(19) United States
(12) Patent Application Publication
(10) Pub. No.: US 2015/0307562 A1
(43) Pub. Date: Oct. 29, 2015

(54) ENGINEERED SECRETED PROTEINS AND METHODS

(71) Applicant: PRONUTRIA BIOSCIENCES, INC., Cambridge, MA (US)

(72) Inventors: Subhayu Basu, Chestnut Hill, MA (US); Katherine G. Gora, Boston, MA (US); Ying-Ja Chen, Cambridge, MA (US); David M. Young, Portsmouth, NH (US); Nathaniel W. Silver, Cambridge, MA (US); Michael J. Hamill, Wellesley, MA (US); David A. Berry, Brookline, MA (US)

(21) Appl. No.: 14/443,773

(22) PCT Filed: Nov. 20, 2013
(86) PCT No.: PCT/US13/71091

§ 371 Date: May 19, 2015

Related U.S. Application Data
(60) Provisional application No. 61/728,427, filed on Nov. 20, 2012.

(51) Int. Cl. C07K 14/32; A23L 1/305; C07K 14/195

(52) U.S. Cl. CPC C07K 14/32; C07K 14/195; A23L 1/3053; A23V 2002/00

(57) ABSTRACT

Nutritive proteins are provided herein. Also provided are various other embodiments including nucleic acids encoding the proteins, recombinant microorganisms that make the proteins, vectors for expressing the proteins, methods of making the proteins using recombinant microorganisms, compositions that comprise the proteins, and methods of using the proteins. Nutritive proteins include engineered proteins, wherein the engineered proteins comprise a sequence of at least 20 amino acids that comprise an altered amino acid sequence compared to the amino acid sequence of a reference secreted protein and a ratio of essential amino acids to total amino acids present in the engineered protein higher than the ratio of essential amino acids to total amino acids present in the reference secreted protein. In some embodiments, the engineered protein comprises at least one essential amino acid residue substitution of a non-essential amino acid residue in the reference secreted protein.

### CROSS REFERENCE TO RELATED APPLICATIONS

[0001] This application claims priority to U.S. Ser. No. 61/728,427, filed Nov. 20, 2012, and is related to PCT/US2013/032232, filed Mar. 15, 2013, PCT/US2013/032180, filed Mar. 15, 2013, PCT/US2013/032225, filed Mar. 15, 2013, PCT/US2013/032218, filed Mar. 15, 2013, PCT/US2013/032212, filed Mar. 15, 2013, PCT/US2013/032206, filed Mar. 15, 2013, and PCT/US2013/038682, filed Apr. 29, 2013; the entire disclosures of which are hereby incorporated by reference in their entirety for all purposes.

### SEQUENCE LISTING

[0002] The instant application contains a Sequence Listing which has been submitted electronically in ASCII format and is hereby incorporated by reference in its entirety. Said ASCII copy, created on Mar. 26, 2014, is named 25045PCT_CRF_SequenceListing.txt and is 83,758,406 bytes in size.

### INTRODUCTION

[0003] Naturally occurring proteins are made from the twenty different types of amino acids, namely alanine (A), arginine (R), asparagine (N), aspartic acid (D), cysteine (C), glutamic acid (E), glutamine (Q), glycine (G), histidine (H), isoleucine (I), leucine (L), lysine (K), methionine (M), phenylalanine (F), proline (P), serine (S), threonine (T), tryptophan (W), tyrosine (Y), and valine (V). During digestion, ingested protein is broken down into amino acids. Protein is an important component of the human diet, because most mammals cannot synthesize all the amino acids they need; essential amino acids must be obtained from food. The amino acids considered essential are Histidine (H), Isoleucine (I), Leucine (L), Lysine (K), Methionine (M), Phenylalanine (F), Threonine (T), Tryptophan (W), and Valine (V).

[0004] The World Health Organization recommends that dietary protein should contribute approximately 10 to 15% of energy intake when in energy balance and weight stable. Average daily protein intakes in various countries indicate that these recommendations are consistent with the amount of protein being consumed worldwide. Meals with an average of 20 to 30% of energy from protein are representative of high-protein diets when consumed in energy balance.

[0005] Both plant and animal foods contain protein. Proteins that provide all the essential amino acids are referred to as “high quality” proteins. Animal foods such as meat, fish, poultry, eggs, and dairy products are all high quality protein sources. These foods provide a good balance of essential amino acids. Proteins that do not provide a good balance of essential amino acids are referred to as “low quality” proteins. Most fruits and vegetables are poor sources of protein. Some plants foods including beans, peas, lentils, nuts and grains such as wheat are better sources of protein.

[0006] Casein, whey, and soy are major sources of protein. Casein is commonly found in mammalian milk, making up 80% of the proteins in cow milk and between 20% and 40% of the proteins in human milk. Casein is also a major component of cheese. Whey is the liquid remaining after milk has been curdled and strained and is also a byproduct of the manufacture of cheese or casein. Soy is a vegetable protein manufactured from soybeans. While most vegetable proteins are considered to be low quality proteins, soy protein is considered by some to be a high quality protein, and it is comparable to many animal/milk based proteins.

[0007] Studies of the acute effects of consuming high amounts of protein in humans have shown that inclusion of, and in some cases increasing, protein content in the diet can have beneficial effects. For example, studies have shown that protein can induce postprandial satiety (including by suppressing hunger), that protein diets induce thermogenesis and that glycemic response is reduced by protein diets.

[0008] Studies of the chronic use of high protein diets for weight loss have shown that protein positively affects energy expenditure and lean body mass, that overeating produces significantly less weight gain in diets containing at least 5% of energy from protein, and that a high-protein diet decreases energy intake.

[0009] Clinical studies provide evidence that protein prevents muscle protein loss due to aging or bed rest. In particular, muscle fractional synthetic rate (FSR) increases after protein supplementation during prolonged bed rest, protein supplementation maintains leg mass and strength during prolonged bed rest, protein supplementation increases lean body mass, protein supplementation improves functional measures of gait and balance, and essential amino acid supplementation may serve as a viable intervention for individuals at risk of sarcopenia due to immobility or prolonged bed rest.

[0010] Studies on increasing muscle protein anabolism in athletes have shown that protein provided following exercise promotes muscle hypertrophy to a greater extent than that achieved by exercise alone. It has also been shown that protein provided following exercise supports protein synthesis without any increase in protein breakdown, resulting in a net positive protein balance and muscle mass accretion. While muscle protein synthesis appears to respond in a dose-response fashion to essential amino acid supplementation, not all proteins are equal in building muscle. For example, milk proteins appear to be superior to soy in supporting muscle mass accretion with resistance training, while both are superior to carbohydrate alone. The amino acid leucine is an important factor in stimulating muscle protein synthesis.

[0011] Whole proteins commonly found in foods do not necessarily provide an amino acid composition that meets the amino acid requirements of a mammal, such as a human, in an efficient manner. The result is that, in order to attain the minimal requirements of each essential amino acid, a larger amount of total protein must be consumed in the diet than would be required if the quality of the dietary protein were higher. By increasing the quality of the protein in the diet it is possible to reduce the total amount of protein that must be consumed compared to diets that include lower quality proteins.

[0012] In general, proteins that have higher protein quality are considered more beneficial in a mammalian diet than other proteins that do not. Such proteins are useful, for example, as components of a mammalian diet. Under certain circumstances such proteins promote maintenance of muscle mass, a healthy body mass index, and glycemic balance, among other things. Accordingly, there is a need for sources of proteins that have high protein quality.

[0013] In general, proteins that have higher protein quality are considered more beneficial in a mammalian diet than other proteins that do not. Such proteins are useful, for example, as components of a mammalian diet. Under certain circumstances such proteins promote maintenance of muscle mass, a healthy body mass index, and glycemic balance, among other things. Accordingly, there is a need for sources of proteins that have high protein quality.

[0014] In theory polypeptides comprising a high proportion of at least one of branch chain amino acids, and essential amino acids could be designed entirely in silico. Nucleic acids encoding the synthetic proteins could then be synthesized and recombinant microbes comprising the nucleic acids produced for production of recombinant proteins. This approach has several potential drawbacks, however. For example, skilled artisans are aware that obtaining high levels of production of soluble versions of such synthetic sequences is very challenging.

### SUMMARY

[0015] In one aspect, provided are nutritive polypeptides and formulations comprising nutritive polypeptides. For example, provided is an isolated nutritive polypeptide, wherein the nutritive polypeptide comprises a ratio of one or more essential amino acids to total amino acids that is higher than the ratio of one or more essential amino acids to total amino acids in a reference secreted protein at least 50 amino acids in length, wherein the nutritive polypeptide is present in the formulation in a nutritional amount, and wherein the formulation is substantially free of non-comestible products. In an embodiment, the one or more essential amino acids are present in the formulation in a nutritional amount. In another embodiment, the nutritive polypeptide comprises a ratio of total essential amino acids to total amino acids that is higher than the ratio of total essential amino acids to total amino acids in the reference secreted protein. In another embodiment, the nutritive polypeptide comprises a ratio of a single essential amino acid to total amino acids that is higher than the ratio of a single essential amino acid to total amino acids in the reference secreted protein. In another embodiment, the nutritive polypeptide comprises a ratio of two essential amino acids to total amino acids that is higher than the ratio of two essential amino acids to total amino acids in the reference secreted protein. In another embodiment, the reference secreted protein comprises a secreted enzyme polypeptide. For example, the isolated nutritive polypeptide is capable of a decreased level of the primary enzymatic activity of the secreted enzyme polypeptide. In another embodiment, the isolated nutritive polypeptide is substantially purified from a host cell. In another embodiment, the solubility of the nutritive polypeptide exceeds about 10 g/l at pH 7. In another embodiment, the solubility of the nutritive polypeptide exceeds the solubility of the reference secreted protein. In another embodiment, the digestibility of the nutritive polypeptide has a simulated gastric digestion half-life of less than sixty minutes. In another embodiment, the digestibility of the nutritive polypeptide exceeds the digestibility of the reference secreted protein. In another embodiment, the thermostability of the nutritive polypeptide exceeds the thermostability of the reference secreted protein. In another embodiment, the nutritive polypeptide has a calculated solvation score of −20 or less. In another embodiment, the nutritive polypeptide has a calculated aggregation score of 0.75 or less. In another embodiment, the solubility and digestibility of the nutritive polypeptide exceeds the solubility and digestibility of the reference secreted protein. In another embodiment, the nutritive polypeptide has less than about 50% homology to a known allergen. Exemplary formulations contain at least 1.0 g of nutritive polypeptide at a concentration of at least 100 g per 1 kg of formulation. In some embodiments, the formulation is present as a liquid, semi-liquid or gel in a volume not greater than about 500 ml or as a solid or semi-solid in a mass not greater than about 200 g. In another embodiment, the nutritive polypeptide is produced in a recombinant organism. In another embodiment, the nutritive polypeptide is produced by a unicellular organism comprising a recombinant nucleic acid sequence encoding the nutritive polypeptide. In another embodiment, the formulation provides a nutritional benefit of at least about 2% of a reference daily intake value of protein or is otherwise present in an amount sufficient to provide a feeling of satiety when consumed by a human subject. In another embodiment, the formulation provides a nutritional benefit of at least about 2% of a reference daily intake value of one or more essential amino acids. In another embodiment, the formulation provides a nutritional benefit of at least about 2% of a reference daily intake value of total essential amino acids. In another embodiment, the formulation provides at least 10 grams of nutritive polypeptide. Formulations are preferably formulated for enteral administration. In another embodiment, i) the nutritive polypeptide comprises at least about 98%, or 99%, or 99.5% or 99.9% overall sequence identity to the reference secreted protein over the full-length of the nutritive polypeptide or the reference secreted protein, or ii) the nutritive polypeptide comprises an ortholog of the reference secreted protein, wherein the ortholog comprises at least about 70% overall sequence identity to the reference secreted protein over the full-length of the nutritive polypeptide or the reference secreted protein. Also provided are food products comprising at least about 1 gram of the formulations provided herein. In another embodiment, the formulation provides a nutritional benefit per 100 g equivalent to or greater than at least about 2% of a reference daily intake value of protein. In another embodiment, the effective amount of the nutritive polypeptide is lower than the effective amount of the reference secreted protein when administered to a human subject. Preferred formulations are substantially free of a surfactant, a polyvinyl alcohol, a propylene glycol, a polyvinyl acetate, a polyvinylpyrrolidone, a non-comestible polyacid or polyol, a fatty alcohol, an alkylbenzyl sulfonate, an alkyl glucoside, or a methyl paraben. In some embodiments the formulations also comprise a tastant, a vitamin, a mineral, or a combination thereof, or a flavorant or non-nutritive polyol, or a nutritive carbohydrate and/or a nutritive lipid.

[0016] In another aspect, provided are recombinant unicellular organisms that individually comprise a recombinant nucleic acid sequence encoding an isolated nutritive polypeptide, wherein the nutritive polypeptide comprises a ratio of one or more essential amino acids to total amino acids that is higher than the ratio of one or more essential amino acids to total amino acids in a reference secreted protein at least 50 amino acids in length. In some embodiments, the nutritive polypeptide is secreted from the unicellular organism.

[0017] Also provided are methods of formulating a nutritive product, comprising the steps of providing a composition comprising an effective amount of an isolated nutritive polypeptide, wherein the nutritive polypeptide comprises a ratio of one or more essential amino acids to total amino acids that is higher than the ratio of one or more essential amino acids to total amino acids in a reference secreted protein at least 50 amino acids in length, wherein the nutritive polypeptide is present in the composition at a concentration of at least 1 mg of nutritive polypeptide per gram of the composition, and combining the composition with at least one food component, thereby formulating the nutritive product. For example, the food component comprises a flavorant, a tastant, an agriculturally-derived food product, a vitamin, a mineral, a nutritive carbohydrate, a nutritive lipid, a binder, a filler or a combination thereof, wherein the nutritive product is comestible, and wherein the nutritive product comprises at least 1.0 g of nutritive polypeptide at a concentration of at least 100 g per 1 kg of nutritive product, and wherein the nutritive product is present as a liquid, semi-liquid or gel in a volume not greater than about 500 ml or as a solid or semi-solid in a mass not greater than about 200 g.

[0018] Also provided are methods of selecting a nutritive composition for administration to a human subject who can benefit from same, the method comprising: identifying a minimal essential amino acid nutritive need in the subject; calculating an essential amino acid content score required to meet the minimal essential amino acid nutritive need; and providing a nutritive composition comprising an effective amount of a nutritive polypeptide, wherein the nutritive composition has at least the required essential amino acid content score.

[0019] Further provided are methods of selecting a nutritive composition for administration to a human subject who can benefit from same, the method comprising: identifying a maximal essential amino acid nutritive need in the subject; calculating an essential amino acid content score required to not exceed the maximal essential amino acid nutritive need; and providing a nutritive composition comprising an effective amount of a nutritive polypeptide, wherein the nutritive composition has no greater than the required essential amino acid content score.

[0020] In another aspect, provided are methods of treating a disease, disorder or condition characterized or exacerbated by protein malnourishment in a human subject in need thereof, comprising the step of administering to the human subject a nutritive formulation in an amount sufficient to treat such disease, disorder or condition, wherein the nutritive formulation comprises a nutritive polypeptide and an agriculturally-derived food product, wherein the nutritive polypeptide comprises a ratio of one or more essential amino acids to total amino acids that is higher than the ratio of one or more essential amino acids to total amino acids in a reference secreted protein at least 50 amino acids in length. In one embodiment, the human subject is an elderly subject. In another embodiment, the human subject is a child under 18 years old. In another embodiment, the human subject is a pregnant subject or lactating female subject. In another embodiment, the human subject is an adult between 18 years old and about 65 years old. In another embodiment, the human subject is an adult suffering from or at risk of developing obesity, diabetes, or cardiovascular disease.

[0021] Also provided are methods of improving the nutritional status of a human subject, comprising administering to the subject an effective amount of a nutritive formulation comprising an agriculturally-derived food product and an isolated nutritive polypeptide, wherein the nutritive polypeptide comprises a ratio of one or more essential amino acids to total amino acids that is higher than the ratio of one or more essential amino acids to total amino acids in a reference secreted protein at least 50 amino acids in length.

[0022] In another aspect, provided are nutrient polypeptides comprising engineered proteins. In some embodiments the engineered protein comprises a sequence of at least 20 amino acids that comprise an altered amino acid sequence compared to the amino acid sequence of a reference secreted protein and a ratio of essential amino acids to total amino acids present in the engineered protein higher than the ratio of essential amino acids to total amino acids present in the reference secreted protein.

[0023] In some embodiments, the engineered protein comprises at least one essential amino acid residue substitution of a non-essential amino acid residue in the reference secreted protein. In some embodiments, the engineered protein comprises at least one branch chain amino acid residue substitution of a non-branch chain amino acid residue in the reference secreted protein. In some embodiments, the engineered protein comprises at least one Arginine (Arg) or Glutamine (Glu) amino acid residue substitution of a non-Arginine (Arg) or non-Glutamine (Glu) amino acid residue in the reference secreted protein.

[0024] In some embodiments, the engineered protein comprises at least one leucine (Leu) amino acid residue substitution of a non-Leu amino acid residue in the reference secreted protein. In some embodiments the Leu amino acid residue substitution is at an amino acid position with a Leu frequency score greater than 0. In some embodiments the Leu amino acid residue substitution is at an amino acid position with a Leu frequency score of at least 0.1. In some embodiments the Leu amino acid residue substitution is at an amino acid position with a branch chain amino acid frequency score of greater than 0. In some embodiments the Leu amino acid residue substitution is at an amino acid position with a branch chain amino acid frequency score of at least 0.1. In some embodiments the Leu amino acid residue substitution is at an amino acid position with a hydrophobic amino acid frequency score of greater than 0. In some embodiments the Leu amino acid residue substitution is at an amino acid position with a hydrophobic amino acid frequency score of at least 0.1. In some embodiments the Leu amino acid residue substitution is at an amino acid position with a per amino acid position entropy of at least 1.5. In some embodiments the difference in total folding free energy between the reference secreted protein and the engineered protein is less than or equal to 0.5.

[0025] In some embodiments of the engineered protein, at least two non-leucine (Leu) amino acid residues in the reference secreted protein are substituted by a Leu amino acid residue in the engineered protein, wherein the difference in total folding free energy between the reference secreted protein and the engineered protein is less than or equal to 0.5, and wherein the major energetic component of the total folding free energies for each amino acid substitution is different.

[0026] In some embodiments the engineered protein comprises at least one Leu amino acid residue substitution of a non-Leu amino acid residue in a reference secreted protein at a position with a position entropy of at least 1.5. In some embodiments the difference in total folding free energy between the reference secreted protein and the engineered protein is less than or equal to 0.5. In some embodiments the engineered protein comprises at least two Leu amino acid residue substitutions of non-Leu amino acid residues in the reference secreted protein, wherein the contribution to the difference in total folding free energy between the reference secreted protein and the engineered protein from each of the Leu amino acid residue substitutions considered independently is less than or equal to 0.5 and the major energetic component of the total folding free energies for each amino acid substitution is different.

[0027] In some embodiments the engineered protein comprises at least one Leu amino acid residue substitution of a non-Leu amino acid residue in a reference secreted protein at a position at which the total free folding energy that results from the Leu substitution is less than or equal to 0.5. In some embodiments the engineered protein comprises at least two Leu amino acid residue substitutions of non-Leu amino acid residues in the reference secreted protein, wherein the contribution to the difference in total folding free energy between the reference secreted protein and the engineered protein from each of the Leu amino acid residue substitutions considered independently is less than or equal to 0.5 and the major energetic component of the total folding free energies for each amino acid substitution is different.

[0028] In some embodiments, the engineered protein comprises at least one valine (Val) amino acid residue substitution of a non-Val amino acid residue in the reference secreted protein. In some embodiments the Val amino acid residue substitution is at an amino acid position with a Val frequency score greater than 0. In some embodiments the Val amino acid residue substitution is at an amino acid position with a Val frequency score of at least 0.1. In some embodiments the Val amino acid residue substitution is at an amino acid position with a branch chain amino acid frequency score of greater than 0. In some embodiments the Val amino acid residue substitution is at an amino acid position with a branch chain amino acid frequency score of at least 0.1. In some embodiments the Val amino acid residue substitution is at an amino acid position with a hydrophobic amino acid frequency score of greater than 0. In some embodiments the Val amino acid residue substitution is at an amino acid position with a hydrophobic amino acid frequency score of at least 0.1. In some embodiments the Val amino acid residue substitution is at an amino acid position with a per amino acid position entropy of at least 1.5. In some embodiments the difference in total folding free energy between the reference secreted protein and the engineered protein is less than or equal to 0.5.

[0029] In some embodiments of the engineered protein, at least two non-valine (Val) amino acid residues in the reference secreted protein are substituted by a Val amino acid residue in the engineered protein, wherein the difference in total folding free energy between the reference secreted protein and the engineered protein is less than or equal to 0.5, and wherein the major energetic component of the total folding free energies for each amino acid substitution is different.

[0030] In some embodiments the engineered protein comprises at least one Val amino acid residue substitution of a non-Val amino acid residue in a reference secreted protein at a position with a position entropy of at least 1.5. In some embodiments the difference in total folding free energy between the reference secreted protein and the engineered protein is less than or equal to 0.5. In some embodiments the engineered protein comprises at least two Val amino acid residue substitutions of non-Val amino acid residues in the reference secreted protein, wherein the contribution to the difference in total folding free energy between the reference secreted protein and the engineered protein from each of the Val amino acid residue substitutions considered independently is less than or equal to 0.5 and the major energetic component of the total folding free energies for each amino acid substitution is different.

[0031] In some embodiments the engineered protein comprises at least one Val amino acid residue substitution of a non-Val amino acid residue in a reference secreted protein at a position at which the total free folding energy that results from the Val substitution is less than or equal to 0.5. In some embodiments the engineered protein comprises at least two Val amino acid residue substitutions of non-Val amino acid residues in the reference secreted protein, wherein the contribution to the difference in total folding free energy between the reference secreted protein and the engineered protein from each of the Val amino acid residue substitutions considered independently is less than or equal to 0.5 and the major energetic component of the total folding free energies for each amino acid substitution is different.

[0032] In some embodiments, the engineered protein comprises at least one isoleucine (Ile) amino acid residue substitution of a non-Ile amino acid residue in the reference secreted protein. In some embodiments the Ile amino acid residue substitution is at an amino acid position with a Ile frequency score greater than 0. In some embodiments the Ile amino acid residue substitution is at an amino acid position with a Ile frequency score of at least 0.1. In some embodiments the Ile amino acid residue substitution is at an amino acid position with a branch chain amino acid frequency score of greater than 0. In some embodiments the Ile amino acid residue substitution is at an amino acid position with a branch chain amino acid frequency score of at least 0.1. In some embodiments the Ile amino acid residue substitution is at an amino acid position with a hydrophobic amino acid frequency score of greater than 0. In some embodiments the Ile amino acid residue substitution is at an amino acid position with a hydrophobic amino acid frequency score of at least 0.1. In some embodiments the Ile amino acid residue substitution is at an amino acid position with a per amino acid position entropy of at least 1.5. In some embodiments the difference in total folding free energy between the reference secreted protein and the engineered protein is less than or equal to 0.5.

[0033] In some embodiments of the engineered protein, at least two non-isoleucine (Ile) amino acid residues in the reference secreted protein are substituted by a Ile amino acid residue in the engineered protein, wherein the difference in total folding free energy between the reference secreted protein and the engineered protein is less than or equal to 0.5, and wherein the major energetic component of the total folding free energies for each amino acid substitution is different.

[0034] In some embodiments the engineered protein comprises at least one Ile amino acid residue substitution of a non-Ile amino acid residue in a reference secreted protein at a position with a position entropy of at least 1.5. In some embodiments the difference in total folding free energy between the reference secreted protein and the engineered protein is less than or equal to 0.5. In some embodiments the engineered protein comprises at least two Ile amino acid residue substitutions of non-Ile amino acid residues in the reference secreted protein, wherein the contribution to the difference in total folding free energy between the reference secreted protein and the engineered protein from each of the Ile amino acid residue substitutions considered independently is less than or equal to 0.5 and the major energetic component of the total folding free energies for each amino acid substitution is different.

[0035] In some embodiments the engineered protein comprises at least one Ile amino acid residue substitution of a non-Ile amino acid residue in a reference secreted protein at a position at which the total free folding energy that results from the Ile substitution is less than or equal to 0.5. In some embodiments the engineered protein comprises at least two Ile amino acid residue substitutions of non-Ile amino acid residues in the reference secreted protein, wherein the contribution to the difference in total folding free energy between the reference secreted protein and the engineered protein from each of the Ile amino acid residue substitutions considered independently is less than or equal to 0.5 and the major energetic component of the total folding free energies for each amino acid substitution is different.

[0036] In some embodiments the reference secreted protein is a naturally occurring protein. In some embodiments the engineered protein is secreted from a compatible microorganism when expressed therein. In some embodiments the compatible microorganism is the same genus as the microorganism that the reference secreted protein naturally occurs in. In some embodiments the microorganism is a heterotroph. In some embodiments the microorganism is photosynthetic. In some embodiments the photosynthetic microorganism is a cyanobacterium.

[0037] In some embodiments the amino acid sequence of the engineered protein is at least 40%, 45%, 50%, 55%, 60%, 65%, 70%, 75%, 80%, 85%, 86%, 87%, 88%, 89%, 90%, 91%, 92%, 93%, 94%, 95%, 96%, 97%, 98%, 99%, or 99.5% homologous to the reference secreted protein.

[0038] In some embodiments from 5 to 50 non-essential amino acid residues in the reference secreted protein are substituted by essential amino acid residues in the engineered protein. In some embodiments from 5 to 50 non-branch chain amino acid residues in the reference secreted protein are substituted by branch chain amino acid residues in the engineered protein. In some embodiments from 5 to 50 non-Leu amino acid residues in the reference secreted protein are substituted by Leu amino acid residues in the engineered protein. In some embodiments from 5 to 50 non-Val amino acid residues in the reference secreted protein are substituted by Val amino acid residues in the engineered protein. In some embodiments from 5 to 50 non-Ile amino acid residues in the reference secreted protein are substituted by Ile amino acid residues in the engineered protein.

[0039] In some embodiments from 5 to 50% of the non-essential amino acid residues in the reference secreted protein are substituted by essential amino acid residues in the engineered protein. In some embodiments from 5 to 50% of the non-branch chain amino acid residues in the reference secreted protein are substituted by branch chain amino acid residues in the engineered protein. In some embodiments from 5 to 50% of the non-Leu amino acid residues in the reference secreted protein are substituted by Leu amino acid residues in the engineered protein. In some embodiments from 5 to 50% of the non-Val amino acid residues in the reference secreted protein are substituted by Val amino acid residues in the engineered protein. In some embodiments from 5 to 50%, e.g., 5 to 10%, 5 to 15%, 5 to 20%, 5 to 25%, 5 to 30%, 5 to 40%, 5 to 45%, 10 to 15%, 10 to 20%, 10 to 25%, 10 to 30%, 10 to 35%, 10 to 40%, 10 to 45%, 15 to 20%, 15 to 25%, 15 to 30%, 15 to 35%, 15 to 40%, 15 to 45%, 20 to 25%, 20 to 30%, 20 to 35%, 20 to 40%, 20 to 45%, 25 to 30%, 25 to 35%, 25 to 40%, 25 to 45%, 30 to 35%, 30 to 40%, 30 to 45%, 35 to 40%, 35 to 45%, or 40 to 45% of the non-Ile amino acid residues in the reference secreted protein are substituted by Ile amino acid residues in the engineered protein.

[0040] In some embodiments the engineered protein comprises of: a) a ratio of branch chain amino acid residues to total amino acid residues present in the engineered nutritional protein sequence of at least 26.3%; b.) a ratio of Leu residues to total amino acid residues present in the engineered nutritional protein sequence of at least 11.8%; and c) a ratio of essential amino acid residues to total amino acid residues present in the engineered nutritional protein sequence of at least 55.5%. In some embodiments the engineered protein comprises each essential amino acid. In some embodiments of the engineered protein, the reference secreted protein is from a member of a genus selected from Aspergillus, Trichoderma, Penicillium, Chrysosporium, Acremonium, Fusarium, Trametes, and Rhizopus. In some embodiments of the engineered protein, the reference secreted protein is from a microorganism selected from Escherichia coli, Bacillus subtilis, Saccharomyces cerevisiae, Pichia pastoris, Corynebacterium species, Synechocystis species, and Synechococcus species. In some embodiments of the engineered protein, the reference secreted protein is a protein selected from the proteins listed in Appendix A. In some embodiments of the engineered protein, the reference secreted protein is selected from SEQ ID NOS: 1-9. In some embodiments of the engineered protein, the reference secreted protein comprises a consensus sequence for a fold selected from cellulose binding domain, carbohydrate binding module, fibronectin type III domain, and hydrophobin. In some embodiments of the engineered protein, the reference secreted protein is selected from proteins identified by UniProt Accession Numbers Q4WBW4, Q99034, A1DBP9, Q8NJP6, A1CU44, B0Y8K2, Q4WM08, Q0CMT2, Q8NK02, A1DNL0, A1CCN4, B0XWL3, Q4WFK4, A2QYR9, Q0CFP1, Q5B2E8, A1DJQ7, A1C4H2, B0Y9G4, B8MXJ7, Q4WBU0, Q96WQ9, A2RSN0, Q2US83, Q0CEU4, Q5BCX8, A1DBS6, Q9HE18, O14405, P62694, Q06886, P13860, Q9P8P3, P62695, P07987, A1C8U0, B0Y9E7, B8NIV9, Q4WBS1, Q2U2I3, Q5AR04, A1DBV1, B0YEK2, B8N7Z0, A4DA70, A2R2S6, Q2UI87, Q0CVX4, Q5AX28, A1D9S3, A1CC12, B0Y2K1, Q4WW45, Q5AQZ4, Q99024, P29026, P29027, P69328, P69327, P36914, P23176, P22832, A2QHE1, A1CR85, B0XPE1, B8NRX2, Q4WJJ3, P87076, A2RAL4, Q2UUD6, D0VKF5, Q0CTD7, Q5B5S8, A1D451, B8NJF4, A2QPK4, Q2UNR0, Q5AUW5, B0Y7Q8, B8NP65, Q4WMU3, Q2UN12, Q0CI67, Q5B6C6, A1DMR8, B8NMR5, Q2U325, Q0CUC1, Q5B0F4, A1DC16, A1CUR8, B0XM94, B8NPL7, Q4WL79, Q2U9M7, Q5B6C7, A1DPG0, A1CA51, B0Y3M6, B8NDE2, Q4WU49, A2R989, Q2U8Y5, Q0CAF5, Q5BB53, A1DFA8, B0Y8M8, Q4WLY1, Q5AV15, A1DNN8, Q5BA18, B0YB65, Q4WGT3, Q0CEF3, Q5B9F2, A1DCV5, B0XPB8, B8N5S6, Q4WR62, A5ABF5, Q2UDK7, Q0C7L4, Q5AWD4, A1D122, Q5B681, Q5BG51, A1CCL9, Q0CB82, Q5ATH9, Q4AEG8, B0XP71, B8MYV0, Q4WRB0, A2QA27, O00089, Q2UR38, Q0CMH8, Q5BAS1, P29026, P29027, P48827, A1CIA7, B0Y708, P35211, B8N106, P28296, P12547, Q00208, A1CWF3, P52750, P52754, P79073, P52755, P41746, and P28346. The sequences indicated by the accession numbers provided herein are those sequences in the database as of the filing date of the instant application.

[0041] In some embodiments the engineered protein is selected from SEQ ID NOS: 10-13. In some embodiments the engineered protein further comprises a polypeptide tag for affinity purification. In some embodiments the tag for affinity purification is a polyhistidine-tag. In some embodiments the engineered protein has a net absolute per amino acid charge of at least 0.05 at pH 7. In some embodiments the engineered protein has a net absolute per amino acid charge of at least 0.10 at pH 7. In some embodiments the engineered protein has a net absolute per amino acid charge of at least 0.15 at pH 7. In some embodiments the engineered protein has a net absolute per amino acid charge of at least 0.20 at pH 7. In some embodiments the engineered protein has a net absolute per amino acid charge of at least 0.25 at pH 7. In some embodiments the engineered protein has a net positive charge at pH 7. In some embodiments the engineered protein has a net negative charge at pH 7. In some embodiments the engineered protein is digestible. In some embodiments the engineered protein comprises a protease recognition site selected from a pepsin recognition site, a trypsin recognition site, and a chymotrypsin recognition site.

[0042] In a further aspect, this disclosure provides nucleic acids, including in some embodiments isolated nucleic acids. In some embodiments the nucleic acid comprises a nucleic acid sequence that encodes an engineered protein of this disclosure. In some embodiments the nucleic acid further comprises an expression control sequence operatively linked to the nucleic acid sequence that encodes the engineered protein.

[0043] In a further aspect, this disclosure provides vectors. In some embodiments the vectors comprise a nucleic acid sequence that encodes an engineered protein of this disclosure. In some embodiments the vector further comprises an expression control sequence operatively linked to the nucleic acid sequence that encodes the engineered protein.

[0044] In a further aspect, this disclosure provides recombinant microorganisms. In some embodiments the recombinant microorganism comprises at least one of a) a nucleic acid that encodes an engineered protein of this disclosure and b) a vector comprising a nucleic acid that encodes an engineered protein of this disclosure. In some embodiments, the recombinant microorganism is a prokaryote. In some embodiments, the prokaryote is heterotrophic. In some embodiments, the prokaryote is autotrophic. In some embodiments, the prokaryote is a bacteria.

[0045] In a further aspect, this disclosure provides methods of making a recombinant engineered protein of this disclosure. In some embodiments the methods comprise culturing a recombinant microorganism of this disclosure under conditions sufficient for production of the recombinant engineered protein by the recombinant microorganism. In some embodiments the methods further comprise isolating the recombinant engineered protein from the culture. In some embodiments the recombinant protein is soluble. In some embodiments, the recombinant engineered protein is secreted by the cultured recombinant microorganism and the secreted protein is isolated from the culture medium.

[0046] In a further aspect, this disclosure provides nutritive compositions. In some embodiments the nutritive compositions comprise an engineered protein of this disclosure and at least one second component. In some embodiments the second component is selected from a protein, a polypeptide, a peptide, a free amino acid, a carbohydrate, a fat, a mineral or mineral source, a vitamin, and an excipient. In some embodiments the second component is a protein. In some embodiments the protein is an engineered protein. In some embodiments the second component is a free amino acid selected from essential amino acids. In some embodiments the second component is a free amino acid selected from branch chain amino acids. In some embodiments the second component is Leu. In some embodiments the second component is Val. In some embodiments the second component is Ile. In some embodiments the second component is an excipient. In some embodiments the excipient is selected from a buffering agent, a preservative, a stabilizer, a binder, a compaction agent, a lubricant, a dispersion enhancer, a disintegration agent, a flavoring agent, a sweetener, a coloring agent. In some embodiments the nutritive composition is formulated as a liquid solution, slurry, suspension, gel, paste, powder, or solid.

[0047] In a further aspect, this disclosure provides methods of making a nutritive composition. In some embodiments the methods comprise providing an engineered protein of this disclosure and combining the engineered protein with second component. In some embodiments the second component is selected from a protein, a polypeptide, a peptide, a free amino acid, a carbohydrate, a fat, a mineral or mineral source, a vitamin, and an excipient. In some embodiments the second component is a protein. In some embodiments the second component is a free amino acid selected from essential amino acids. In some embodiments the second component is a free amino acid selected from branch chain amino acids. In some embodiments the second component is Leu. In some embodiments the second component is Val. In some embodiments the second component is Ile. In some embodiments the second component is an excipient. In some embodiments the excipient is selected from a buffering agent, a preservative, a stabilizer, a binder, a compaction agent, a lubricant, a dispersion enhancer, a disintegration agent, a flavoring agent, a sweetener, a coloring agent. In some embodiments the nutritive composition is formulated as a liquid solution, slurry, suspension, gel, paste, powder, or solid.

[0048] In a further aspect, this disclosure provides methods of maintaining or increasing at least one of muscle mass, muscle strength, and functional performance in a subject. In some embodiments the methods comprise providing to the subject a sufficient amount of an engineered protein according to disclosure, a nutritive composition according to disclosure, or a nutritive composition made by a method according to disclosure. In some embodiments the subject is at least one of elderly, critically-medically ill, and suffering from protein-energy malnutrition. In some embodiments, the engineered protein according to disclosure, the nutritive composition according to disclosure, or the nutritive composition made by a method according to disclosure is consumed by the subject in coordination with performance of exercise. In some embodiments, the engineered protein according to disclosure, the nutritive composition according to disclosure, or the nutritive composition made by a method according to disclosure is consumed by the subject by an oral, enteral, or parenteral route.

[0049] In a further aspect, this disclosure provides methods of maintaining or achieving a desirable body mass index in a subject. In some embodiments the methods comprise providing to the subject a sufficient amount of an engineered protein of this disclosure, a nutritive composition of this disclosure, or a nutritive composition made by a method of this disclosure. In some embodiments the subject is at least one of elderly, critically-medically ill, and suffering from protein-energy malnutrition. In some embodiments, the engineered protein according to disclosure, the nutritive composition according to disclosure, or the nutritive composition made by a method according to disclosure is consumed by the subject in coordination with performance of exercise. In some embodiments, the engineered protein according to disclosure, the nutritive composition according to disclosure, or the nutritive composition made by a method according to disclosure is consumed by the subject by an oral, enteral, or parenteral route.

[0050] In a further aspect, this disclosure provides methods of providing protein to a subject with protein-energy malnutrition. In some embodiments the methods comprise providing to the subject a sufficient amount of an engineered protein of this disclosure, a nutritive composition of this disclosure, or a nutritive composition of this disclosure. In some embodiments, the engineered protein according to disclosure, the nutritive composition according to disclosure, or the nutritive composition made by a method according to disclosure is consumed by the subject by an oral, enteral, or parenteral route.

[0051] In a further aspect, this disclosure provides methods of making an engineered protein. In some embodiments the methods comprise a) providing a reference secreted protein, b) identifying a set of amino acid positions of the reference secreted protein to mutate to improve the nutritive content of the protein, and c) synthesizing the engineered protein comprising the target amino acid substitutions. In some embodiments the reference secreted protein is from a member of a genus selected from Aspergillus, Trichoderma, Penicillium, Chrysosporium, Acremonium, Fusarium, Trametes, and Rhizopus. In some embodiments the reference secreted protein is from a microorganism selected from Escherichia coli, Bacillus subtilis, Saccharomyces cerevisiae, Pichia pastoris, Corynebacterium species, Synechocystis species, and Synechococcus species. In some embodiments the reference secreted protein is a protein listed in Appendix A. In some embodiments the reference secreted protein is a protein selected from proteins identified by UniProt Accession Numbers Q4WBW4, Q99034, A1DBP9, Q8NJP6, A1CU44, B0Y8K2, Q4WM08, Q0CMT2, Q8NK02, A1DNL0, A1CCN4, B0XWL3, Q4WFK4, A2QYR9, Q0CFP1, Q5B2E8, A1DJQ7, A1C4H2, B0Y9G4, B8MXJ7, Q4WBU0, Q96WQ9, A2R5NO, Q2US83, Q0CEU4, Q5BCX8, A1DBS6, Q9HE18, O14405, P62694, Q06886, P13860, Q9P8P3, P62695, P07987, A1C8U0, B0Y9E7, B8NIV9, Q4WBS1, Q2U2I3, Q5AR04, A1DBV1, B0YEK2, B8N7Z0, A4DA70, A2R2S6, Q2UI87, Q0CVX4, Q5AX28, A1D9S3, A1CC12, B0Y2K1, Q4WW45, Q5AQZ4, Q99024, P29026, P29027, P69328, P69327, P36914, P23176, P22832, A2QHE1, A1CR85, B0XPE1, B8NRX2, Q4WJJ3, P87076, A2RAL4, Q2UUD6, D0VKF5, Q0CTD7, Q5B5S8, A1D451, B8NJF4, A2QPK4, Q2UNR0, Q5AUW5, B0Y7Q8, B8NP65, Q4WMU3, Q2UN12, Q0CI67, Q5B6C6, A1DMR8, B8NMR5, Q2U325, Q0CUC1, Q5B0F4, A1DC16, A1CUR8, B0XM94, B8NPL7, Q4WL79, Q2U9M7, Q5B6C7, A1DPG0, A1CA51, B0Y3M6, B8NDE2, Q4WU49, A2R989, Q2U8Y5, Q0CAF5, Q5BB53, A1DFA8, B0Y8M8, Q4WLY1, Q5AV15, A1DNN8, Q5BA18, B0YB65, Q4WGT3, Q0CEF3, Q5B9F2, A1DCV5, B0XPB8, B8N5S6, Q4WR62, A5ABF5, Q2UDK7, Q0C7L4, Q5AWD4, A1D122, Q5B681, Q5BG51, A1CCL9, Q0CB82, Q5ATH9, Q4AEG8, B0XP71, B8MYV0, Q4WRB0, A2QA27, O00089, Q2UR38, Q0CMH8, Q5BAS1, P29026, P29027, P48827, A1CIA7, B0Y708, P35211, B8N106, P28296, P12547, Q00208, A1CWF3, P52750, P52754, P79073, P52755, P41746, and P28346. In some embodiments the reference secreted protein is selected from SEQ ID NOS: 1-9. In some embodiments the reference secreted protein comprises a consensus sequence for a fold selected from a cellulose binding domain, carbohydrate binding mudule, fibronectin type III domain, and hydrophobin.

[0052] In some embodiments identifying the set of amino acid positions of the reference secreted protein to mutate to improve the nutritive content of the protein comprises determining at least one parameter selected from amino acid likelihood (AALike), amino acid type likelihood (AATLike), position entropy (Sₚₒₛ), amino acid type position entropy (S_{AATpos}), relative free energy of folding (ΔΔG_{fold}), and secondary structure identity (LoopID) for a plurality of amino acid positions of the reference secreted protein. In some embodiments a combination of two or more parameters is determined for a plurality of amino acid positions of the reference secreted protein, wherein the combination of parameters is selected from: (A) AAlike and ΔΔG_{fold}, (B) AATlike and ΔΔG_{fold}, (C) AAlike, AATlike, and ΔΔG_{fold}, (D) Sₚₒₛ and ΔΔG_{fold}, (E) S_{AATpos} and ΔΔG_{fold}, (F) LoopID and ΔΔG_{fold}, (G) AAlike, ΔΔG_{fold}, and LoopID, (H) AAlike, AATlike, ΔΔG_{fold}, and LoopID, (I) AATlike, ΔΔG_{fold}, and LoopID, (J) Sₚₒₛ, ΔΔG_{fold}, and LoopID, and (K) S_{AATpos}, ΔΔG_{fold}, and LoopID. In some embodiments the method further comprises ranking the plurality of amino acid positions of the reference secreted protein on the basis of the parameter and mutating the amino acids at positions having at least a threshold parameter value.

[0053] In some embodiments the engineered protein is synthesized in vivo. In some embodiments the engineered protein is synthesized in vitro.

### BRIEF DESCRIPTION OF THE DRAWINGS

[0054] FIG. 1 shows leucine replacement based on amino acid likelihood in the glucoamylase protein from A. niger (SEQ ID NO: 1). FIG. 1A shows leucine replacement based on leucine likelihood, and FIG. 1B shows a blown up view of the left end of the graph in FIG. 1A. FIG. 1C shows leucine replacement based on branch chain amino acid (BCAA) likelihood and FIG. 1D shows leucine replacement based on hydrophobic amino acid (A, M, I, L, V) likelihood.

[0055] FIG. 2 shows leucine replacement based on position entropy in the glucoamylase protein from A. niger (SEQ ID NO: 1). In FIG. 2A position entropy is calculated based on the full set of twenty amino acids, while in FIG. 2B it is calculated based on 5 groups of amino acids that have similar biophysical properties: hydrophobic [A,V,I,L,M], aromatic [F,Y,W], polar [S,T,N,Q], charged [R,H,K,D,E], other [G,P,C].

[0056] FIG. 3 shows leucine replacement mutation free folding energies relative to wild type for each amino acid position in the glucoamylase protein from A. niger (SEQ ID NO: 1).

[0057] FIG. 4 shows leucine replacement based on amino acid likelihood in the endo-beta-1,4-glucanase protein from A. niger (SEQ ID NO: 2). FIG. 4A shows leucine replacement based on leucine likelihood, and FIG. 4B shows a blown up view of the left end of the graph in FIG. 4A. FIG. 4C shows leucine replacement based on branch chain amino acid (BCAA) likelihood and FIG. 4D shows leucine replacement based on hydrophobic amino acid (A, M, I, L, V) likelihood.

[0058] FIG. 5 shows leucine replacement based on position entropy in the endo-beta-1,4-glucanase protein from A. niger (SEQ ID NO: 2). In FIG. 5A position entropy is calculated based on the full set of twenty amino acids, while in FIG. 5B it is calculated based on 5 groups of amino acids that have similar biophysical properties: hydrophobic [A,V,I,L,M], aromatic [F,Y,W], polar [S,T,N,Q], charged [R,H,K,D,E], other [G,P,C].

[0059] FIG. 6 shows leucine replacement mutation free folding energies relative to wild type for each amino acid position in the endo-beta-1,4-glucanase protein from A. niger (SEQ ID NO: 2).

[0060] FIG. 7 shows leucine replacement based on amino acid likelihood in the 1,4-beta-D-glucan cellobiohydrolase protein from A. niger (SEQ ID NO: 3). FIG. 7A shows leucine replacement based on leucine likelihood, and FIG. 7B shows a blown up view of the left end of the graph in FIG. 7A. FIG. 7C shows leucine replacement based on branch chain amino acid (BCAA) likelihood and FIG. 7D shows leucine replacement based on hydrophobic amino acid (A, M, I, L, V) likelihood.

[0061] FIG. 8 shows leucine replacement based on position entropy in the 1,4-beta-D-glucan cellobiohydrolase protein from A. niger (SEQ ID NO: 3). In FIG. 8A position entropy is calculated based on the full set of twenty amino acids, while in FIG. 8B it is calculated based on 5 groups of amino acids that have similar biophysical properties: hydrophobic [A,V,I,L,M], aromatic [F,Y,W], polar [S,T,N,Q], charged [R,H,K,D,E], other [G,P,C].

[0062] FIG. 9 shows leucine replacement mutation free folding energies relative to wild type for each amino acid position in the 1,4-beta-D-glucan cellobiohydrolase protein from A. niger (SEQ ID NO: 3).

[0063] FIG. 10 shows leucine replacement based on amino acid likelihood in the endo-1,4-beta-xylanase protein from A. niger (SEQ ID NO: 4). FIG. 10A shows leucine replacement based on leucine likelihood, and FIG. 10B shows a blown up view of the left end of the graph in FIG. 10A. FIG. 10C shows leucine replacement based on branch chain amino acid (BCAA) likelihood and FIG. 10D shows leucine replacement based on hydrophobic amino acid (A, M, I, L, V) likelihood.

[0064] FIG. 11 shows leucine replacement based on position entropy in the endo-1,4-beta-xylanase protein from A. niger (SEQ ID NO: 4). In FIG. 11A position entropy is calculated based on the full set of twenty amino acids, while in FIG. 11B it is calculated based on 5 groups of amino acids that have similar biophysical properties: hydrophobic [A,V,I,L,M], aromatic [F,Y,W], polar [S,T,N,Q], charged [R,H,K,D,E], other [G,P,C].

[0065] FIG. 12 shows leucine replacement mutation free folding energies relative to wild type for each amino acid position in the endo-1,4-beta-xylanase protein from A. niger (SEQ ID NO: 4).

[0066] FIG. 13 shows leucine replacement based on amino acid likelihood in the cellulose binding domain 1 from A. niger (SEQ ID NO: 5). FIG. 13A shows leucine replacement based on leucine likelihood, and FIG. 13B shows a blown up view of the left end of the graph in FIG. 13A. FIG. 13C shows leucine replacement based on branch chain amino acid (BCAA) likelihood and FIG. 13D shows leucine replacement based on hydrophobic amino acid (A, M, I, L, V) likelihood.

[0067] FIG. 14 shows leucine replacement based on position entropy in cellulose binding domain 1 from A. niger (SEQ ID NO: 5). In FIG. 14A position entropy is calculated based on the full set of twenty amino acids, while in FIG. 14B it is calculated based on 5 groups of amino acids that have similar biophysical properties: hydrophobic [A,V,I,L,M], aromatic [F,Y,W], polar [S,T,N,Q], charged [R,H,K,D,E], other [G,P,C].

[0068] FIG. 15 shows leucine replacement mutation free folding energies relative to wild type for each amino acid position in cellulose binding domain 1 from A. niger (SEQ ID NO: 5).

[0069] FIG. 16 shows leucine replacement based on amino acid likelihood in carbohydrate binding module 20 from A. niger (SEQ ID NO: 6). FIG. 16A shows leucine replacement based on leucine likelihood, and FIG. 16B shows a blown up view of the left end of the graph in FIG. 16A. FIG. 16C shows leucine replacement based on branch chain amino acid (BCAA) likelihood and FIG. 16D shows leucine replacement based on hydrophobic amino acid (A, M, I, L, V) likelihood.

[0070] FIG. 17 shows isoleucine replacement based on amino acid likelihood in carbohydrate binding module 20 from A. niger (SEQ ID NO: 6). FIG. 17A shows isoleucine replacement based on isoleucine likelihood, and FIG. 17B shows a blown up view of the left end of the graph in FIG. 17A. FIG. 17C shows isoleucine replacement based on branch chain amino acid (BCAA) likelihood and FIG. 17D shows isoleucine replacement based on hydrophobic amino acid (A, M, I, L, V) likelihood.

[0071] FIG. 18 shows valine replacement based on amino acid likelihood in carbohydrate binding module 20 from A. niger (SEQ ID NO: 6). FIG. 18A shows valine replacement based on valine likelihood, and FIG. 18B shows a blown up view of the left end of the graph in FIG. 18A. FIG. 18C shows valine replacement based on branch chain amino acid (BCAA) likelihood and FIG. 18D shows valine replacement based on hydrophobic amino acid (A, M, I, L, V) likelihood.

[0072] FIG. 19 shows leucine replacement based on position entropy in carbohydrate binding module 20 from A. niger (SEQ ID NO: 6). In FIG. 19A position entropy is calculated based on the full set of twenty amino acids, while in FIG. 19B it is calculated based on 5 groups of amino acids that have similar biophysical properties: hydrophobic [A,V,I,L,M], aromatic [F,Y,W], polar [S,T,N,Q], charged [R,H,K,D,E], other [G,P,C].

[0073] FIG. 20 shows leucine replacement mutation free folding energies relative to wild type for each amino acid position in carbohydrate binding module 20 from A. niger (SEQ ID NO: 6).

[0074] FIG. 21 shows isoleucine replacement mutation free folding energies relative to wild type for each amino acid position in carbohydrate binding module 20 from A. niger (SEQ ID NO: 6).

[0075] FIG. 22 shows valine replacement mutation free folding energies relative to wild type for each amino acid position in carbohydrate binding module 20 from A. niger (SEQ ID NO: 6).

[0076] FIG. 23 shows arginine replacement mutation free folding energies relative to wild type for each amino acid position in carbohydrate binding module 20 from A. niger (SEQ ID NO: 6).

[0077] FIG. 24 shows leucine replacement based on amino acid likelihood in glucosidase fibronectin type III domain from A. niger (SEQ ID NO: 7). FIG. 24A shows leucine replacement based on leucine likelihood, and FIG. 24B shows a blown up view of the left end of the graph in FIG. 24A. FIG. 24C shows leucine replacement based on branch chain amino acid (BCAA) likelihood and FIG. 24D shows leucine replacement based on hydrophobic amino acid (A, M, I, L, V) likelihood.

[0078] FIG. 25 shows leucine replacement based on position entropy in glucosidase fibronectin type III domain from A. niger (SEQ ID NO: 7). In FIG. 25A position entropy is calculated based on the full set of twenty amino acids, while in FIG. 25B it is calculated based on 5 groups of amino acids that have similar biophysical properties: hydrophobic [A,V,I,L,M], aromatic [F,Y,W], polar [S,T,N,Q], charged [R,H,K,D,E], other [G,P,C].

[0079] FIG. 26 shows leucine replacement mutation free folding energies relative to wild type for each amino acid position in glucosidase fibronectin type III domain from A. niger (SEQ ID NO: 7).

[0080] FIG. 27 shows leucine replacement based on amino acid likelihood in the hydrophobin I protein from T. Reesei (SEQ ID NO: 8). FIG. 27A shows leucine replacement based on leucine likelihood, and FIG. 27B shows a blown up view of the left end of the graph in FIG. 27A. FIG. 27C shows leucine replacement based on branch chain amino acid (BCAA) likelihood and FIG. 27D shows leucine replacement based on hydrophobic amino acid (A, M, I, L, V) likelihood.

[0081] FIG. 28 shows leucine replacement based on position entropy in the hydrophobin I protein from T. Reesei (SEQ ID NO: 8). In FIG. 28A position entropy is calculated based on the full set of twenty amino acids, while in FIG. 28B it is calculated based on 5 groups of amino acids that have similar biophysical properties: hydrophobic [A,V,I,L,M], aromatic [F,Y,W], polar [S,T,N,Q], charged [R,H,K,D,E], other [G,P,C].

[0082] FIG. 29 shows leucine replacement mutation free folding energies relative to wild type for each amino acid position in the hydrophobin I protein from T. Reesei (SEQ ID NO: 8).

[0083] FIG. 30 shows leucine replacement based on amino acid likelihood in the hydrophobin II protein from T. Reesei (SEQ ID NO: 9). FIG. 30A shows leucine replacement based on leucine likelihood, and FIG. 30B shows a blown up view of the left end of the graph in FIG. 30A. FIG. 30C shows leucine replacement based on branch chain amino acid (BCAA) likelihood and FIG. 30D shows leucine replacement based on hydrophobic amino acid (A, M, I, L, V) likelihood.

[0084] FIG. 31 shows leucine replacement based on position entropy in the hydrophobin II protein from T. Reesei (SEQ ID NO: 9). In FIG. 31A position entropy is calculated based on the full set of twenty amino acids, while in FIG. 31B it is calculated based on 5 groups of amino acids that have similar biophysical properties: hydrophobic [A,V,I,L,M], aromatic [F,Y,W], polar [S,T,N,Q], charged [R,H,K,D,E], other [G,P,C].

[0085] FIG. 32 shows leucine replacement mutation free folding energies relative to wild type for each amino acid position in the hydrophobin II protein from T. Reesei (SEQ ID NO: 9).

[0086] FIG. 33 shows a schematic illustration of a library construction strategy used for making SEQID-45001 and SEQID-45029 variants.

[0087] FIGS. 34A and 34B show the result of secretion screening using the Caliper LabChip GXII. (A) Electropherograms demonstrating a hit (protein of interest peak indicated with arrow), negative control, and protein ladder. (B) Simulated gel images generated from electropherograms demonstrating secretion of protein variants (protein of interest peak in box).

[0088] FIG. 35 shows the results of anti-FLAG dotblot analysis of Aspergillus culture supernatants. (A) Isolates transformed with expression vectors encoding specific variants of SEQID-45029. Box indicates standard curve. (B) Quantification of positive wells from (A). SEQID-45029 is a positive control for wild type secretion. (C) Isolates transformed with expression vectors encoding a library of SEQID-45029 variants. (D). Quantification of positive wells from (C) based on standard curve (box).

[0089] FIG. 36 demonstrates the sequence diversity of isolate 18 and 27 expression cassettes. Numerals following the dash indicate specific sub-clone. Boxes indicate identical sequences. Clones suggesting the presence of deletions outside of the variable regions are indicated with an asterix. Figure discloses “Pos1” sequences as SEQ ID NOS 22014-22044, “Pos2” sequences as SEQ ID NOS 22045-22075, “Pos3” sequences as SEQ ID NOS 22076-22106, and “Pos4” sequences as SEQ ID NOS 22107-22137, all respectively, in order of appearance.

### DESCRIPTION OF APPENDICES

[0090] This specification includes Appendices A-D.

[0091] Appendix A lists exemplary reference secreted proteins.

[0092] Appendix B lists representative proteins that include folds/domains selected from ankyrin repeats, Leucine rich repeats, tetratricopeptide repeats, armadillo repeats, fibronectine type III domains, lipocalin-like domains, knottins, cellulose binding domains, carbohydrate binding domains, protein Z folds, PDZ domains, SH3 domains, SH2 domains, WW domains, thioredoxins, Leucine zipper, plant homeodomain, tudor domain, and hydrophobins.

[0093] Appendix C lists proteins used in multiple sequence alignments (MSAs) to analyze amino acid likelihood.

[0094] Appendix D presents analyses of the physiochemical properties of the protein and polypeptide sequences analyzed in the examples.

### DETAILED DESCRIPTION

[0095] Unless otherwise defined herein, scientific and technical terms used in connection with the present disclosure shall have the meanings that are commonly understood by those of ordinary skill in the art. Further, unless otherwise required by context, singular terms shall include the plural and plural terms shall include the singular. Generally, nomenclatures used in connection with, and techniques of, biochemistry, enzymology, molecular and cellular biology, microbiology, genetics and protein and nucleic acid chemistry and hybridization described herein are those well-known and commonly used in the art. Certain references and other documents cited herein are expressly incorporated herein by reference. Additionally, all UniProt/SwissProt records cited herein are hereby incorporated herein by reference. In case of conflict, the present specification, including definitions, will control. The materials, methods, and examples are illustrative only and not intended to be limiting.

[0096] The methods and techniques of the present disclosure are generally performed according to conventional methods well known in the art and as described in various general and more specific references that are cited and discussed throughout the present specification unless otherwise indicated. See, e.g., Sambrook et al., Molecular Cloning: A Laboratory Manual, 3d ed., Cold Spring Harbor Laboratory Press, Cold Spring Harbor, N.Y. (2001); Ausubel et al., Current Protocols in Molecular Biology, Greene Publishing Associates (1992, and Supplements to 2002); Taylor and Drickamer, Introduction to Glycobiology, Oxford Univ. Press (2003); Worthington Enzyme Manual, Worthington Biochemical Corp., Freehold, N.J.; Handbook of Biochemistry: Section A Proteins, Vol I, CRC Press (1976); Handbook of Biochemistry: Section A Proteins, Vol II, CRC Press (1976); Essentials of Glycobiology, Cold Spring Harbor Laboratory Press (1999). Remington's Pharmaceutical Sciences, Mack Pub. Co, Easton, Pa. (18^{th} ed.) (1990). Many molecular biology and genetic techniques applicable to cyanobacteria are described in Heidorn et al., “Synthetic Biology in Cyanobacteria: Engineering and Analyzing Novel Functions,” Methods in Enzymology, Vol. 497, Ch. 24 (2011), which is hereby incorporated herein by reference.

[0097] This disclosure refers to sequence database entries (e.g., UniProt/SwissProt records) for certain protein and gene sequences that are published on the internet, as well as other information on the internet. The skilled artisan understands that information on the internet, including sequence database entries, is updated from time to time and that, for example, the reference number used to refer to a particular sequence can change. Where reference is made to a public database of sequence information or other information on the internet, it is understood that such changes can occur and particular embodiments of information on the internet can come and go. Because the skilled artisan can find equivalent information by searching on the internet, a reference to an internet web page address or a sequence database entry evidences the availability and public dissemination of the information in question. In all cases the sequence information contained in the sequence database entries referenced herein is hereby incorporated herein by reference.

[0098] Before the present proteins, compositions, methods, and other embodiments are disclosed and described, it is to be understood that the terminology used herein is for the purpose of describing particular embodiments only and is not intended to be limiting. It must be noted that, as used in the specification and the appended claims, the singular forms “a,” “an” and “the” include plural referents unless the context clearly dictates otherwise.

[0099] The term “comprising” as used herein is synonymous with “including” or “containing”, and is inclusive or open-ended and does not exclude additional, unrecited members, elements or method steps.

[0100] This disclosure makes reference to amino acids. The full name of the amino acids is used interchangeably with the standard three letter and one letter abbreviations for each. For the avoidance of doubt, those are: Alanine (Ala, A), Arginine (Arg, R), Asparagine (Asn, N), Aspartic acid (Asp, D), Cysteine (Cys, C), Glutamic Acid (Glu, E), Glutamine (Gln, Q), Glycine (Gly, G), Histidine (His, H), Isoleucine (Ile, I), Leucine (Leu, L), Lysine (Lys, K), Methionine (Met, M), Phenylalanine (Phe, F), Proline (Pro, P), Serine (Ser, S), Threonine (Thr, T), Tryptophan (Trp, W), Tyrosine (Tyr, Y), Valine (Val, V).

[0101] As used herein, the term “in vitro” refers to events that occur in an artificial environment, e.g., in a test tube or reaction vessel, in cell culture, in a Petri dish, etc., rather than within an organism (e.g., animal, plant, or microbe).

[0102] As used herein, the term “in vivo” refers to events that occur within an organism (e.g., animal, plant, or microbe).

[0103] As used herein, the term “isolated” refers to a substance or entity that has been (1) separated from at least some of the components with which it was associated when initially produced (whether in nature or in an experimental setting), and/or (2) produced, prepared, and/or manufactured by the hand of man. Isolated substances and/or entities may be separated from at least about 10%, about 20%, about 30%, about 40%, about 50%, about 60%, about 70%, about 80%, about 90%, or more of the other components with which they were initially associated. In some embodiments, isolated agents are more than about 80%, about 85%, about 90%, about 91%, about 92%, about 93%, about 94%, about 95%, about 96%, about 97%, about 98%, about 99%, or more than about 99% pure. As used herein, a substance is “pure” if it is substantially free of other components.

[0104] As used herein, a “branch chain amino acid” is an amino acid selected from Leucine, Isoleucine, and Valine.

[0105] As used herein, an “essential amino acid” is an amino acid selected from Histidine, Isoleucine, Leucine, Lysine, Methionine, Phenylalanine, Threonine, Tryptophan, and Valine.

[0106] The term “peptide” as used herein refers to a short polypeptide, e.g., one that typically contains less than about 50 amino acids and more typically less than about 30 amino acids. The term as used herein encompasses analogs and mimetics that mimic structural and thus biological function.

[0107] The terms “polypeptide” and “protein” can be interchanged, and these terms encompass both naturally-occurring and non-naturally occurring polypeptides, and, as provided herein or as generally known in the art, fragments, mutants, derivatives and analogs thereof. A polypeptide can be monomeric, meaning it has a single chain, or polymeric, meaning it is composed of two or more chains, which can be covalently or non-covalently associated. Further, a polypeptide may comprise a number of different domains each of which has one or more distinct activities. For the avoidance of doubt, a polypeptide can be any length greater than or equal to two amino acids.

[0108] The term “isolated polypeptide” is a polypeptide that by virtue of its origin or source of derivation (1) is not associated with naturally associated components that accompany it in any of its native states, (2) exists in a purity not found in nature, where purity can be adjudged with respect to the presence of other cellular material (e.g., is free of other polypeptides from the same species or from the host species in which the polypeptide was produced) (3) is expressed by a cell from a different species, (4) is recombinantly expressed by a cell (e.g., a polypeptide is an “isolated polypeptide” if it is produced from a recombinant nucleic acid present in a host cell and separated from the producing host cell, (5) does not occur in nature (e.g., it is a domain or other fragment of a polypeptide found in nature or it includes amino acid analogs or derivatives not found in nature or linkages other than standard peptide bonds), or (6) is otherwise produced, prepared, and/or manufactured by the hand of man. Thus, an “isolated polypeptide” includes a polypeptide that is produced in a host cell from a recombinant nucleic acid (such as a vector), regardless of whether the host cell naturally produces a polypeptide having an identical amino acid sequence. A “polypeptide” includes a polypeptide that is produced by a host cell via overexpression, e.g., homologous overexpression of the polypeptide from the host cell such as by altering the promoter of the polypeptide to increase its expression to a level above its normal expression level in the host cell in the absence of the altered promoter. A polypeptide that is chemically synthesized or synthesized in a cellular system different from a cell from which it naturally originates is “isolated” from its naturally associated components. A polypeptide may also be rendered substantially free of naturally associated components by isolation, using protein purification techniques well known in the art. As thus defined, “isolated” does not necessarily require that the protein, polypeptide, peptide or oligopeptide so described has been physically removed from a cell in which it was synthesized.

[0109] The terms “purify,” “purifying” and “purified” refer to a substance (or entity, composition, product or material) that has been separated from at least some of the components with which it was associated either when initially produced (whether in nature or in an experimental setting), or during any time after its initial production. A substance such as a nutritional polypeptide is considered purified if it is isolated at production, or at any level or stage up to and including a final product, but a final product may contain other materials up to about 10%, about 20%, about 30%, about 40%, about 50%, about 60%, about 70%, about 80%, about 90%, or above about 90% and still be considered “isolated.” Purified substances or entities can be separated from at least about 10%, about 20%, about 30%, about 40%, about 50%, about 60%, about 70%, about 80%, about 90%, or more of the other components with which they were initially associated. In some embodiments, purified substances are more than about 80%, about 85%, about 90%, about 91%, about 92%, about 93%, about 94%, about 95%, about 96%, about 97%, about 98%, about 99%, or more than about 99% pure. In the instance of polypeptides and other polypeptides provided herein, such a polypeptide can be purified from one or more other polypeptides capable of being secreted from the unicellular organism that secretes the polypeptide. As used herein, a polypeptide substance is “pure” if it is substantially free of other components or other polypeptide components.

[0110] The term “polypeptide fragment” or “protein fragment” as used herein refers to a polypeptide or domain thereof that has less amino acids compared to a reference polypeptide, e.g., a full-length polypeptide or a polypeptide domain of a naturally occurring protein. A “naturally occurring protein” or “naturally occurring polypeptide” includes a polypeptide having an amino acid sequence produced by a non-recombinant cell or organism. In an embodiment, the polypeptide fragment is a contiguous sequence in which the amino acid sequence of the fragment is identical to the corresponding positions in the naturally-occurring sequence. Fragments typically are at least 5, 6, 7, 8, 9 or 10 amino acids long, or at least 12, 14, 16 or 18 amino acids long, or at least 20 amino acids long, or at least 25, 30, 35, 40 or 45, amino acids, or at least 50, 60, 70, 80, 90 or 100 amino acids long, or at least 110, 120, 130, 140, 150, 160, 170, 180, 190 or 200 amino acids long, or 225, 250, 275, 300, 325, 350, 375, 400, 425, 450, 475, 500, 525, 550, 575, 600 or greater than 600 amino acids long. A fragment can be a portion of a larger polypeptide sequence that is digested inside or outside the cell. Thus, a polypeptide that is 50 amino acids in length can be produced intracellularly, but proteolyzed inside or outside the cell to produce a polypeptide less than 50 amino acids in length. This is of particular significance for polypeptides shorter than about 25 amino acids, which can be more difficult than larger polypeptides to produce recombinantly or to purify once produced recombinantly. The term “peptide” as used herein refers to a short polypeptide or oligopeptide, e.g., one that typically contains less than about 50 amino acids and more typically less than about 30 amino acids, or more typically less than about 15 amino acids, such as less than about 10, 9, 8, 7, 6, 5, 4, or 3 amino acids. The term as used herein encompasses analogs and mimetics that mimic structural and thus biological function.

[0111] The term “fusion protein” refers to a polypeptide comprising a polypeptide or fragment coupled to heterologous amino acid sequences. Fusion proteins are useful because they can be constructed to contain two or more desired functional elements that can be from two or more different proteins. A fusion protein comprises at least 10 contiguous amino acids from a polypeptide of interest, or at least 20 or 30 amino acids, or at least 40, 50 or 60 amino acids, or at least 75, 100 or 125 amino acids. The heterologous polypeptide included within the fusion protein is usually at least 6 amino acids in length, or at least 8 amino acids in length, or at least 15, 20, or 25 amino acids in length. Fusions that include larger polypeptides, such as an IgG Fc region, and even entire proteins, such as the green fluorescent protein (“GFP”) chromophore-containing proteins, have particular utility. Fusion proteins can be produced recombinantly by constructing a nucleic acid sequence which encodes the polypeptide or a fragment thereof in frame with a nucleic acid sequence encoding a different protein or peptide and then expressing the fusion protein. Alternatively, a fusion protein can be produced chemically by crosslinking the polypeptide or a fragment thereof to another protein.

[0112] A composition, formulation or product is “nutritional” or “nutritive” if it provides an appreciable amount of nourishment to its intended consumer, meaning the consumer assimilates all or a portion of the composition or formulation into a cell, organ, and/or tissue. Generally such assimilation into a cell, organ and/or tissue provides a benefit or utility to the consumer, e.g., by maintaining or improving the health and/or natural function(s) of said cell, organ, and/or tissue. A nutritional composition or formulation that is assimilated as described herein is termed “nutrition.” By way of non-limiting example, a polypeptide is nutritional if it provides an appreciable amount of polypeptide nourishment to its intended consumer, meaning the consumer assimilates all or a portion of the protein, typically in the form of single amino acids or small peptides, into a cell, organ, and/or tissue. “Nutrition” also means the process of providing to a subject, such as a human or other mammal, a nutritional composition, formulation, product or other material. A nutritional product need not be “nutritionally complete,” meaning if consumed in sufficient quantity, the product provides all carbohydrates, lipids, essential fatty acids, essential amino acids, conditionally essential amino acids, vitamins, and minerals required for health of the consumer. Additionally, a “nutritionally complete protein” contains all protein nutrition required (meaning the amount required for physiological normalcy by the organism) but does not necessarily contain micronutrients such as vitamins and minerals, carbohydrates or lipids.

[0113] In preferred embodiments, a composition or formulation is nutritional in its provision of polypeptide capable of decomposition (i.e., the breaking of a peptide bond, often termed protein digestion) to single amino acids and/or small peptides (e.g., two amino acids, three amino acids, or four amino acids, possibly up to ten amino acids) in an amount sufficient to provide a “nutritional benefit.” In addition, in certain embodiments provided are nutritional polypeptides that transit across the gastrointestinal wall and are absorbed into the bloodstream as small peptides (e.g., larger than single amino acids but smaller than about ten amino acids) or larger peptides, oligopeptides or polypeptides (e.g., >11 amino acids). A nutritional benefit in a polypeptide-containing composition can be demonstrated and, optionally, quantified, by a number of metrics. For example, a nutritional benefit is the benefit to a consuming organism equivalent to or greater than at least about 0.5% of a reference daily intake value of protein, such as about 1%, 2%, 3%, 4%, 5%, 6%, 7%, 8%, 9%, 10%, 15%, 20%, 25%, 30%, 35%, 40%, 45%, 50%, 60%, 65%, 70%, 75%, 80%, 85%, 90%, 95%, 100% or greater than about 100% of a reference daily intake value. Alternatively, a nutritional benefit is demonstrated by the feeling and/or recognition of satiety by the consumer. In other embodiments, a nutritional benefit is demonstrated by incorporation of a substantial amount of the polypeptide component of the composition or formulation into the cells, organs and/or tissues of the consumer, such incorporation generally meaning that single amino acids or short peptides are used to produce polypeptides de novo intracellularly. A “consumer” or a “consuming organism” means any animal capable of ingesting the product having the nutritional benefit. Typically, the consumer is a mammal such as a healthy human, e.g., a healthy infant, child, adult, or older adult. Alternatively, the consumer is a mammal such as a human (e.g., an infant, child, adult or older adult) at risk of developing or suffering from a disease, disorder or condition characterized by (i) the lack of adequate nutrition and/or (ii) the alleviation thereof by the nutritional products of the present invention. An “infant” is generally a human under about age 1 or 2, a “child” is generally a human under about age 18, and an “older adult” or “elderly” human is a human aged about 65 or older.

[0114] It is an aspect of the present invention that the polypeptides provided herein have functional benefits beyond provision of polypeptide capable of decomposition, including the demonstration that peptides contained within the polypeptides have unique amino acid compositions. Moreover, provided are polypeptides that have amino acid ratios not found in naturally-occurring full-length polypeptides or mixtures of polypeptides, such ratios are beneficial, both in the ability of the polypeptides to modulate the metabolic signaling that occurs via single amino acids and small peptides, as well as the ability of polypeptides (and their amino acid components) to stimulate specific metabolic responses important to the health of the consuming organism. As provided herein, a ratio of amino acids can be demonstrated by comparison of the composition in a polypeptide of a single amino acid, or two or more amino acids, either to a reference polypeptide or a reference polypeptide mixture. In some embodiments, such comparison may include the content of one amino acid in a polypeptide versus the content of the same amino acid in a reference polypeptide or a reference polypeptide mixture. In other embodiments, such comparison may include the relative content of one amino acid in a polypeptide versus the content of all other amino acids present in a reference polypeptide or a reference polypeptide mixture.

[0115] In other preferred embodiments, a composition or formulation is nutritional in its provision of carbohydrate capable of hydrolysis by the intended consumer (termed a “nutritional carbohydrate”). A nutritional benefit in a carbohydrate-containing composition can be demonstrated and, optionally, quantified, by a number of metrics. For example, a nutritional benefit is the benefit to a consuming organism equivalent to or greater than at least about 2% of a reference daily intake value of carbohydrate.

[0116] In other preferred embodiments, a composition or formulation is nutritional in its provision of lipid capable of digestion, incorporation, conversion, or other cellular uses by the intended consumer (termed a “nutritional lipid”). A nutritional benefit in a lipid-containing composition can be demonstrated and, optionally, quantified, by a number of metrics. For example, a nutritional benefit is the benefit to a consuming organism equivalent to or greater than at least about 2% of a reference daily intake value of lipid (i.e., fat).

[0117] An “agriculturally-derived food product” is a food product resulting from the cultivation of soil or rearing of animals.

[0118] As used herein, a protein has “homology” or is “homologous” to a second protein if the nucleic acid sequence that encodes the protein has a similar sequence to the nucleic acid sequence that encodes the second protein. Alternatively, a protein has homology to a second protein if the two proteins have similar amino acid sequences. (Thus, the term “homologous proteins” is defined to mean that the two proteins have similar amino acid sequences.) As used herein, homology between two regions of amino acid sequence (especially with respect to predicted structural similarities) is interpreted as implying similarity in function.

[0119] When “homologous” is used in reference to proteins or peptides, it is recognized that residue positions that are not identical often differ by conservative amino acid substitutions. A “conservative amino acid substitution” is one in which an amino acid residue is substituted by another amino acid residue having a side chain (R group) with similar chemical properties (e.g., charge or hydrophobicity). In general, a conservative amino acid substitution will not substantially change the functional properties of a protein. In cases where two or more amino acid sequences differ from each other by conservative substitutions, the percent sequence identity or degree of homology may be adjusted upwards to correct for the conservative nature of the substitution. Means for making this adjustment are well known to those of skill in the art. See, e.g., Pearson, 1994, Methods Mol. Biol. 24:307-31 and 25:365-89.

[0120] The following six groups each contain amino acids that are conservative substitutions for one another: 1) Serine, Threonine; 2) Aspartic Acid, Glutamic Acid; 3) Asparagine, Glutamine; 4) Arginine, Lysine; 5) Isoleucine, Leucine, Methionine, Alanine, Valine, and 6) Phenylalanine, Tyrosine, Tryptophan.

[0121] Sequence homology for polypeptides, which is also referred to as percent sequence identity, is typically measured using sequence analysis software. See, e.g., the Sequence Analysis Software Package of the Genetics Computer Group (GCG), University of Wisconsin Biotechnology Center, 910 University Avenue, Madison, Wis. 53705. Protein analysis software matches similar sequences using a measure of homology assigned to various substitutions, deletions and other modifications, including conservative amino acid substitutions. For instance, GCG contains programs such as “Gap” and “Bestfit” which can be used with default parameters to determine sequence homology or sequence identity between closely related polypeptides, such as homologous polypeptides from different species of organisms or between a wild-type protein and a mutein thereof. See, e.g., GCG Version 6.1.

[0122] An exemplary algorithm when comparing a particular polypeptide sequence to a database containing a large number of sequences from different organisms is the computer program BLAST (Altschul et al., J. Mol. Biol. 215:403-410 (1990); Gish and States, Nature Genet. 3:266-272 (1993); Madden et al., Meth. Enzymol. 266:131-141 (1996); Altschul et al., Nucleic Acids Res. 25:3389-3402 (1997); Zhang and Madden, Genome Res. 7:649-656 (1997)), especially blastp or tblastn (Altschul et al., Nucleic Acids Res. 25:3389-3402 (1997)).

[0123] Exemplary parameters for BLASTp are: Expectation value: 10 (default); Filter: seg (default); Cost to open a gap: 11 (default); Cost to extend a gap: 1 (default); Max. alignments: 100 (default); Word size: 11 (default); No. of descriptions: 100 (default); Penalty Matrix: BLOWSUM62. The length of polypeptide sequences compared for homology will generally be at least about 16 amino acid residues, or at least about 20 residues, or at least about 24 residues, or at least about 28 residues, or more than about 35 residues. When searching a database containing sequences from a large number of different organisms, it may be useful to compare amino acid sequences. Database searching using amino acid sequences can be measured by algorithms other than blastp known in the art. For instance, polypeptide sequences can be compared using FASTA, a program in GCG Version 6.1. FASTA provides alignments and percent sequence identity of the regions of the best overlap between the query and search sequences. Pearson, Methods Enzymol. 183:63-98 (1990). For example, percent sequence identity between amino acid sequences can be determined using FASTA with its default parameters (a word size of 2 and the PAM250 scoring matrix), as provided in GCG Version 6.1, herein incorporated by reference.

[0124] In some embodiments, polymeric molecules (e.g., a polypeptide sequence or nucleic acid sequence) are considered to be “homologous” to one another if their sequences are at least 25%, at least 30%, at least 35%, at least 40%, at least 45%, at least 50%, at least 55%, at least 60%, at least 65%, at least 70%, at least 75%, at least 80%, at least 85%, at least 90%, at least 95%, or at least 99% identical. In some embodiments, polymeric molecules are considered to be “homologous” to one another if their sequences are at least 25%, at least 30%, at least 35%, at least 40%, at least 45%, at least 50%, at least 55%, at least 60%, at least 65%, at least 70%, at least 75%, at least 80%, at least 85%, at least 90%, at least 95%, or at least 99% similar. The term “homologous” necessarily refers to a comparison between at least two sequences (nucleotides sequences or amino acid sequences). In some embodiments, two nucleotide sequences are considered to be homologous if the polypeptides they encode are at least about 50% identical, at least about 60% identical, at least about 70% identical, at least about 80% identical, or at least about 90% identical for at least one stretch of at least about 20 amino acids. In some embodiments, homologous nucleotide sequences are characterized by the ability to encode a stretch of at least 4-5 uniquely specified amino acids. Both the identity and the approximate spacing of these amino acids relative to one another must be considered for nucleotide sequences to be considered homologous. In some embodiments of nucleotide sequences less than 60 nucleotides in length, homology is determined by the ability to encode a stretch of at least 4-5 uniquely specified amino acids. In some embodiments, two protein sequences are considered to be homologous if the proteins are at least about 50% identical, at least about 60% identical, at least about 70% identical, at least about 80% identical, or at least about 90% identical for at least one stretch of at least about 20 amino acids.

[0125] As used herein, a “modified derivative” refers to polypeptides or fragments thereof that are substantially homologous in primary structural sequence to a reference polypeptide sequence but which include, e.g., in vivo or in vitro chemical and biochemical modifications or which incorporate amino acids that are not found in the reference polypeptide. Such modifications include, for example, acetylation, carboxylation, phosphorylation, glycosylation, ubiquitination, labeling, e.g., with radionuclides, and various enzymatic modifications, as will be readily appreciated by those skilled in the art. A variety of methods for labeling polypeptides and of substituents or labels useful for such purposes are well known in the art, and include radioactive isotopes such as ¹²⁵I, ³²P, ³⁵S, and ³H, ligands that bind to labeled antiligands (e.g., antibodies), fluorophores, chemiluminescent agents, enzymes, and antiligands that can serve as specific binding pair members for a labeled ligand. The choice of label depends on the sensitivity required, ease of conjugation with the primer, stability requirements, and available instrumentation. Methods for labeling polypeptides are well known in the art. See, e.g., Ausubel et al., Current Protocols in Molecular Biology, Greene Publishing Associates (1992, and Supplements to 2002).

[0126] As used herein, “polypeptide mutant” or “mutein” refers to a polypeptide whose sequence contains an insertion, duplication, deletion, rearrangement or substitution of one or more amino acids compared to the amino acid sequence of a reference protein or polypeptide, such as a native or wild-type protein. A mutein may have one or more amino acid point substitutions, in which a single amino acid at a position has been changed to another amino acid, one or more insertions and/or deletions, in which one or more amino acids are inserted or deleted, respectively, in the sequence of the reference protein, and/or truncations of the amino acid sequence at either or both the amino or carboxy termini. A mutein may have the same or a different biological activity compared to the reference protein.

[0127] In some embodiments, a mutein has, for example, at least 85% overall sequence homology to its counterpart reference protein. In some embodiments, a mutein has at least 90% overall sequence homology to the wild-type protein. In other embodiments, a mutein exhibits at least 95% sequence identity, or 98%, or 99%, or 99.5% or 99.9% overall sequence identity.

[0128] As used herein, a “polypeptide tag for affinity purification” is any polypeptide that has a binding partner that can be used to isolate or purify a second protein or polypeptide sequence of interest fused to the first “tag” polypeptide. Several examples are well known in the art and include a His-6 tag (SEQ ID NO: 22138), a FLAG epitope, a c-myc epitope, a Strep-TAGII, a biotin tag, a glutathione 5-transferase (GST), a chitin binding protein (CBP), a maltose binding protein (MBP), or a metal affinity tag.

[0129] As used herein, a “polypeptide charge” or “protein charge” is calculated for a polypeptide or protein at pH 7 using Formula 1.

Charge_{P}=−0.002−C*0.045−D*0.999−E*0.998+H*0.091+K*1.0+R*1.0−Y*−0.001 Formula 1:

[0130] Charge_{P} is the net charge of the polypeptide or protein.

[0131] C is the number cysteine residues in the polypeptide or protein.

[0132] D is the number of aspartic acid residues in the polypeptide or protein.

[0133] E is the number of glutamic acid residues in the polypeptide or protein.

[0134] H is the number of histidine residues in the polypeptide or protein.

[0135] K is the number of lysine residues in the polypeptide or protein.

[0136] R is the number of arginine residues in the polypeptide or protein.

[0137] Y is the number of tyrosine residues in the polypeptide or protein.

[0138] As used herein, a “per amino acid charge” is calculated for a polypeptide or protein at pH 7 using Formula 2.

Charge_{A}=(−0.002−C*0.045−D*0.999−E*0.998+H*0.091+K*1.0+R*1.0−Y*−0.001)/N Formula 2:

[0139] Charge_{A} is the net charge per amino acid of the polypeptide or protein.

[0140] C, D, E, H, K, R, and Y are as in Formula 1.

[0141] N is the number of amino acids in the polypeptide or protein.

[0142] As used herein, “recombinant” refers to a biomolecule, e.g., a gene or polypeptide, that (1) has been removed from its naturally occurring environment, (2) is not associated with all or a portion of a polynucleotide in which the gene is found in nature, (3) is operatively linked to a polynucleotide which it is not linked to in nature, or (4) does not occur in nature. Also, “recombinant” refers to a cell or an organism, such as a unicellular organism, herein termed a “recombinant unicellular organism,” a “recombinant host” or a “recombinant cell” that contains, produces and/or secretes a biomolecule, which can be a recombinant biomolecule or a non-recombinant biomolecule. For example, a recombinant unicellular organism may contain a recombinant nucleic acid providing for enhanced production and/or secretion of a recombinant polypeptide or a non-recombinant polypeptide. A recombinant cell or organism, is also intended to refer to a cell into which a recombinant nucleic acid such as a recombinant vector has been introduced. A “recombinant unicellular organism” includes a recombinant microorganism host cell and refers not only to the particular subject cell but to the progeny of such a cell. Because certain modifications may occur in succeeding generations due to either mutation or environmental influences, such progeny may not, in fact, be identical to the parent cell, but are still included within the scope of the terms herein.

[0143] The term “polynucleotide”, “nucleic acid molecule”, “nucleic acid”, or “nucleic acid sequence” refers to a polymeric form of nucleotides of at least 10 bases in length. The term includes DNA molecules (e.g., cDNA or genomic or synthetic DNA) and RNA molecules (e.g., mRNA or synthetic RNA), as well as analogs of DNA or RNA containing non-natural nucleotide analogs, non-native internucleoside bonds, or both. The nucleic acid can be in any topological conformation. For instance, the nucleic acid can be single-stranded, double-stranded, triple-stranded, quadruplexed, partially double-stranded, branched, hairpinned, circular, or in a padlocked conformation.

[0144] A “synthetic” RNA, DNA or a mixed polymer is one created outside of a cell, for example one synthesized chemically.

[0145] The term “nucleic acid fragment” as used herein refers to a nucleic acid sequence that has a deletion, e.g., a 5′-terminal or 3′-terminal deletion compared to a full-length reference nucleotide sequence. In an embodiment, the nucleic acid fragment is a contiguous sequence in which the nucleotide sequence of the fragment is identical to the corresponding positions in the naturally-occurring sequence. In some embodiments, fragments are at least 10, 15, 20, or 25 nucleotides long, or at least 20, 30, 40, 50, 60, 70, 80, 90, 100, 110, 120, 130, 140, or 150 nucleotides long. In some embodiments a fragment of a nucleic acid sequence is a fragment of an open reading frame sequence. In some embodiments such a fragment encodes a polypeptide fragment (as defined herein) of the protein encoded by the open reading frame nucleotide sequence.

[0146] As used herein, an endogenous nucleic acid sequence in the genome of an organism (or the encoded protein product of that sequence) is deemed “recombinant” herein if a heterologous sequence is placed adjacent to the endogenous nucleic acid sequence, such that the expression of this endogenous nucleic acid sequence is altered. In this context, a heterologous sequence is a sequence that is not naturally adjacent to the endogenous nucleic acid sequence, whether or not the heterologous sequence is itself endogenous (originating from the same host cell or progeny thereof) or exogenous (originating from a different host cell or progeny thereof). By way of example, a promoter sequence can be substituted (e.g., by homologous recombination) for the native promoter of a gene in the genome of a host cell, such that this gene has an altered expression pattern. This gene would now become “recombinant” because it is separated from at least some of the sequences that naturally flank it.

[0147] A nucleic acid is also considered “recombinant” if it contains any modifications that do not naturally occur to the corresponding nucleic acid in a genome. For instance, an endogenous coding sequence is considered “recombinant” if it contains an insertion, deletion or a point mutation introduced artificially, e.g., by human intervention. A “recombinant nucleic acid” also includes a nucleic acid integrated into a host cell chromosome at a heterologous site and a nucleic acid construct present as an episome. The term “recombinant” can also be used in reference to cloned DNA isolates, chemically-synthesized polynucleotide analogs, or polynucleotide analogs that are biologically synthesized by heterologous systems, as well as polypeptides and/or mRNAs encoded by such nucleic acids. Thus, for example, a polypeptide synthesized by a microorganism is recombinant, for example, if it is produced from an mRNA transcribed from a recombinant gene or other nucleic acid sequence present in the cell.

[0148] As used herein, the phrase “degenerate variant” of a reference nucleic acid sequence encompasses nucleic acid sequences that can be translated, according to the standard genetic code, to provide an amino acid sequence identical to that translated from the reference nucleic acid sequence. The term “degenerate oligonucleotide” or “degenerate primer” is used to signify an oligonucleotide capable of hybridizing with target nucleic acid sequences that are not necessarily identical in sequence but that are homologous to one another within one or more particular segments.

[0149] The term “percent sequence identity” or “identical” in the context of nucleic acid sequences refers to the residues in the two sequences which are the same when aligned for maximum correspondence. The length of sequence identity comparison may be over a stretch of at least about nine nucleotides, usually at least about 20 nucleotides, more usually at least about 24 nucleotides, typically at least about 28 nucleotides, more typically at least about 32, and even more typically at least about 36 or more nucleotides. There are a number of different algorithms known in the art which can be used to measure nucleotide sequence identity. For instance, polynucleotide sequences can be compared using FASTA, Gap or Bestfit, which are programs in Wisconsin Package Version 10.0, Genetics Computer Group (GCG), Madison, Wis. FASTA provides alignments and percent sequence identity of the regions of the best overlap between the query and search sequences. Pearson, Methods Enzymol. 183:63-98 (1990). For instance, percent sequence identity between nucleic acid sequences can be determined using FASTA with its default parameters (a word size of 6 and the NOPAM factor for the scoring matrix) or using Gap with its default parameters as provided in GCG Version 6.1, herein incorporated by reference. Alternatively, sequences can be compared using the computer program, BLAST (Altschul et al., J. Mol. Biol. 215:403-410 (1990); Gish and States, Nature Genet. 3:266-272 (1993); Madden et al., Meth. Enzymol. 266:131-141 (1996); Altschul et al., Nucleic Acids Res. 25:3389-3402 (1997); Zhang and Madden, Genome Res. 7:649-656 (1997)), especially blastp or tblastn (Altschul et al., Nucleic Acids Res. 25:3389-3402 (1997)).

[0150] The term “substantial homology” or “substantial similarity,” when referring to a nucleic acid or fragment thereof, indicates that, when aligned with appropriate nucleotide insertions or deletions with another nucleic acid (or its complementary strand), there is nucleotide sequence identity in at least about 76%, 80%, 85%, or at least about 90%, or at least about 95%, 96%, 97%, 98% or 99% of the nucleotide bases, as measured by any well-known algorithm of sequence identity, such as FASTA, BLAST or Gap, as discussed above.

[0151] Alternatively, substantial homology or similarity exists when a nucleic acid or fragment thereof hybridizes to another nucleic acid, to a strand of another nucleic acid, or to the complementary strand thereof, under stringent hybridization conditions. “Stringent hybridization conditions” and “stringent wash conditions” in the context of nucleic acid hybridization experiments depend upon a number of different physical parameters. Nucleic acid hybridization will be affected by such conditions as salt concentration, temperature, solvents, the base composition of the hybridizing species, length of the complementary regions, and the number of nucleotide base mismatches between the hybridizing nucleic acids, as will be readily appreciated by those skilled in the art. One having ordinary skill in the art knows how to vary these parameters to achieve a particular stringency of hybridization.

[0152] In general, “stringent hybridization” is performed at about 25° C. below the thermal melting point (Tm) for the specific DNA hybrid under a particular set of conditions. “Stringent washing” is performed at temperatures about 5° C. lower than the Tm for the specific DNA hybrid under a particular set of conditions. The Tm is the temperature at which 50% of the target sequence hybridizes to a perfectly matched probe. See Sambrook et al., Molecular Cloning: A Laboratory Manual, 2d ed., Cold Spring Harbor Laboratory Press, Cold Spring Harbor, N.Y. (1989), page 9.51, hereby incorporated by reference. For purposes herein, “stringent conditions” are defined for solution phase hybridization as aqueous hybridization (i.e., free of formamide) in 6×SSC (where 20×SSC contains 3.0 M NaCl and 0.3 M sodium citrate), 1% SDS at 65° C. for 8-12 hours, followed by two washes in 0.2×SSC, 0.1% SDS at 65° C. for 20 minutes. It will be appreciated by the skilled worker that hybridization at 65° C. will occur at different rates depending on a number of factors including the length and percent identity of the sequences which are hybridizing.

[0153] As used herein, an “expression control sequence” refers to polynucleotide sequences which are necessary to affect the expression of coding sequences to which they are operatively linked. Expression control sequences are sequences which control the transcription, post-transcriptional events and translation of nucleic acid sequences. Expression control sequences include appropriate transcription initiation, termination, promoter and enhancer sequences; efficient RNA processing signals such as splicing and polyadenylation signals; sequences that stabilize cytoplasmic mRNA; sequences that enhance translation efficiency (e.g., ribosome binding sites); sequences that enhance protein stability; and when desired, sequences that enhance protein secretion. The nature of such control sequences differs depending upon the host organism; in prokaryotes, such control sequences generally include promoter, ribosomal binding site, and transcription termination sequence. The term “control sequences” is intended to encompass, at a minimum, any component whose presence is essential for expression, and can also encompass an additional component whose presence is advantageous, for example, leader sequences and fusion partner sequences.

[0154] As used herein, “operatively linked” or “operably linked” expression control sequences refers to a linkage in which the expression control sequence is contiguous with the gene of interest to control the gene of interest, as well as expression control sequences that act in trans or at a distance to control the gene of interest.

[0155] As used herein, a “vector” is intended to refer to a nucleic acid molecule capable of transporting another nucleic acid to which it has been linked. One type of vector is a “plasmid,” which generally refers to a circular double stranded DNA loop into which additional DNA segments may be ligated, but also includes linear double-stranded molecules such as those resulting from amplification by the polymerase chain reaction (PCR) or from treatment of a circular plasmid with a restriction enzyme. Other vectors include cosmids, bacterial artificial chromosomes (BAC) and yeast artificial chromosomes (YAC). Another type of vector is a viral vector, wherein additional DNA segments may be ligated into the viral genome (discussed in more detail below). Certain vectors are capable of autonomous replication in a host cell into which they are introduced (e.g., vectors having an origin of replication which functions in the host cell). Other vectors can be integrated into the genome of a host cell upon introduction into the host cell, and are thereby replicated along with the host genome. Moreover, certain vectors are capable of directing the expression of genes to which they are operatively linked. Such vectors are referred to herein as “recombinant expression vectors” (or simply “expression vectors”).

[0156] The term “recombinant host cell” (or simply “recombinant cell” or “host cell”), as used herein, is intended to refer to a cell into which a recombinant nucleic acid such as a recombinant vector has been introduced. In some instances the word “cell” is replaced by a name specifying a type of cell. For example, a “recombinant microorganism” is a recombinant host cell that is a microorganism host cell. It should be understood that such terms are intended to refer not only to the particular subject cell but to the progeny of such a cell. Because certain modifications may occur in succeeding generations due to either mutation or environmental influences, such progeny may not, in fact, be identical to the parent cell, but are still included within the scope of the term “recombinant host cell,” “recombinant cell,” and “host cell”, as used herein. A recombinant host cell may be an isolated cell or cell line grown in culture or may be a cell which resides in a living tissue or organism.

[0157] As used herein, the term “heterotrophic” refers to an organism that cannot fix carbon and uses organic carbon for growth.

[0158] As used herein, the term “autotrophic” refers to an organism that produces complex organic compounds (such as carbohydrates, fats, and proteins) from simple inorganic molecules using energy from light (by photosynthesis) or inorganic chemical reactions (chemosynthesis).

[0159] As used herein, “muscle mass” refers to the weight of muscle in a subject's body. Muscle mass includes the skeletal muscles, smooth muscles (such as cardiac and digestive muscles) and the water contained in these muscles. Muscle mass of specific muscles can be determined using dual energy x-ray absorptiometry (DEXA) (Padden-Jones et al., 2004). Total lean body mass (minus the fat), total body mass, and bone mineral content can be measured by DEXA as well. In some embodiments a change in the muscle mass of a specific muscle of a subject is determined, for example by DEXA, and the change is used as a proxy for the total change in muscle mass of the subject. Thus, for example, if a subject consumes a nutritive protein as disclosed herein and experiences an increase over a period of time in muscle mass in a particular muscle or muscle group, it can be concluded that the subject has experienced an increase in muscle mass. Changes in muscle mass can be measured in a variety of ways including protein synthesis, fractional synthetic rate, and certain key activities such mTor/mTorc. In general, “lean muscle mass” refers to the mass of muscle tissue in the absence of other tissues such as fat.

[0160] As used herein, “muscle strength” refers to the amount of force a muscle can produce with a single maximal effort. There are two types of muscle strength, static strength and dynamic strength. Static strength refers to isometric contraction of a muscle, where a muscle generates force while the muscle length remains constant and/or when there is no movement in a joint. Examples include holding or carrying an object, or pushing against a wall. Dynamic strength refers to a muscle generating force that results in movement. Dynamic strength can be isotonic contraction, where the muscle shortens under a constant load or isokinetic contraction, where the muscle contracts and shortens at a constant speed. Dynamic strength can also include isoinertial strength.

[0161] Unless specified, “muscle strength” refers to maximum dynamic muscle strength. Maximum strength is referred to as “one repetition maximum” (1RM). This is a measurement of the greatest load (in kilograms) that can be fully moved (lifted, pushed or pulled) once without failure or injury. This value can be measured directly, but doing so requires that the weight is increased until the subject fails to carry out the activity to completion. Alternatively, 1RM is estimated by counting the maximum number of exercise repetitions a subject can make using a load that is less than the maximum amount the subject can move. Leg extension and leg flexion are often measured in clinical trials (Borsheim et al., “Effect of amino acid supplementation on muscle mass, strength and physical function in elderly,” Clin Nutr 2008; 27:189-195; Paddon-Jones, et al., “Essential amino acid and carbohydrate supplementation ameliorates muscle protein loss in humans during 28 days bed rest,” J Clin Endocrinol Metab 2004; 89:4351-4358).

[0162] As used herein, “functional performance” refers to a functional test that simulates daily activities. “Functional performance” is measured by any suitable accepted test, including timed-step test (step up and down from a 4 inch bench as fast as possible 5 times), timed floor transfer test (go from a standing position to a supine position on the floor and thereafter up to a standing position again as fast as possible for one repetition), and physical performance battery test (static balance test, chair test, and a walking test) (Borsheim et al., “Effect of amino acid supplementation on muscle mass, strength and physical function in elderly,” Clin Nutr 2008; 27:189-195).

[0163] As used herein, a “body mass index” or “BMI” or “Quetelet index” is a subject's weight in kilograms divided by the square of the subject's height in meters (kg/m²).

[0164] For adults, a frequent use of the BMI is to assess how much an individual's body weight departs from what is normal or desirable for a person of his or her height. The weight excess or deficiency may, in part, be accounted for by body fat, although other factors such as muscularity also affect BMI significantly. The World Health Organization regards a BMI of less than 18.5 as underweight and may indicate malnutrition, an eating disorder, or other health problems, while a BMI greater than 25 is considered overweight and above 30 is considered obese. (World Health Organization. BMI classification.) As used herein a “desirable body mass index” is a body mass index of from about 18.5 to about 25. Thus, if a subject has a BMI below about 18.5, then an increase in the subject's BMI is an increase in the desirability of the subject's BMI. If instead a subject has a BMI above about 25, then a decrease in the subject's BMI is an increase in the desirability of the subject's BMI.

[0165] As used herein, an “elderly” mammal is one who experiences age related changes in at least one of body mass index and muscle mass (e.g., age related sarcopenia). In some embodiments an “elderly” human is at least 50 years old, at least 60 years old, at least 65 years old, at least 70 years old, at least 75 years old, at least 80 years old, at least 85 years old, at least 90 years old, at least 95 years old, or at least 100 years old. In some embodiments and an elderly animal, mammal, or human is a human who has experienced a loss of muscle mass from peak lifetime muscle mass of at least 5%, at least 10%, at least 15%, at least 20%, at least 25%, at least 30%, at least 35%, at least 40%, at least 45%, at least 50%, at least 55%, or at least 60%. Because age related changes to at least one of body mass index and muscle mass are known to correlate with increasing age, in some embodiments an elderly mammal is identified or defined simply on the basis of age. Thus, in some embodiments an “elderly” human is identified or defined simply by the fact that their age is at least 60 years old, at least 65 years old, at least 70 years old, at least 75 years old, at least 80 years old, at least 85 years old, at least 90 years old, at least 95 years old, or at least 100 years old, and without recourse to a measurement of at least one of body mass index and muscle mass.

[0166] As used herein, “sarcopenia” refers to the degenerative loss of skeletal muscle mass (typically 0.5-1% loss per year after the age of 25), quality, and strength associated with aging. Sarcopenia is a component of the frailty syndrome. The European Working Group on Sarcopenia in Older People (EWGSOP) has developed a practical clinical definition and consensus diagnostic criteria for age-related sarcopenia. For the diagnosis of sarcopenia, the working group has proposed using the presence of both low muscle mass and low muscle function (strength or performance). Sarcopenia is characterized first by a muscle atrophy (a decrease in the size of the muscle), along with a reduction in muscle tissue “quality,” caused by such factors as replacement of muscle fibres with fat, an increase in fibrosis, changes in muscle metabolism, oxidative stress, and degeneration of the neuromuscular junction. Combined, these changes lead to progressive loss of muscle function and eventually to frailty. Frailty is a common geriatric syndrome that embodies an elevated risk of catastrophic declines in health and function among older adults. Contributors to frailty can include sarcopenia, osteoporosis, and muscle weakness. Muscle weakness, also known as muscle fatigue, (or “lack of strength”) refers to the inability to exert force with one's skeletal muscles. Weakness often follows muscle atrophy and a decrease in activity, such as after a long bout of bedrest as a result of an illness. There is also a gradual onset of muscle weakness as a result of sarcopenia.

[0167] As used herein, a patient is “critically-medically ill” if the patient, because of medical illness, experiences changes in at least one of body mass index and muscle mass (e.g., sarcopenia). In some embodiments the patient is confined to bed for at least 25%, at least 50%, at least 60%, at least 70%, at least 80%, at least 90%, at least 95%, or 100% of their waking time. In some embodiments the patient is unconscious. In some embodiments the patient has been confined to bed as described in this paragraph for at least 1 day, 2 days, 3 days, 4 days, 5 days, 10 days, 2 weeks, 3 weeks, 4 weeks, 5 weeks, 10 weeks or longer.

[0168] As used herein, “protein-energy malnutrition” refers to a form of malnutrition where there is inadequate protein intake. Types include Kwashiorkor (protein malnutrition predominant), Marasmus (deficiency in both calorie and protein nutrition), and Marasmic Kwashiorkor (marked protein deficiency and marked calorie insufficiency signs present, sometimes referred to as the most severe form of malnutrition).

[0169] As used herein, “exercise” is, most broadly, any bodily activity that enhances or maintains physical fitness and overall health and wellness. Exercise is performed for various reasons including strengthening muscles and the cardiovascular system, honing athletic skills, weight loss or maintenance, as well as for the purpose of enjoyment.

[0170] As used herein, a “sufficient amount” is an amount of a protein or polypeptide disclosed herein that is sufficient to cause a desired effect. For example, if an increase in muscle mass is desired, a sufficient amount is an amount that causes an increase in muscle mass in a subject over a period of time. A sufficient amount of a protein or polypeptide fragment can be provided directly, i.e., by administering the protein or polypeptide fragment to a subject, or it can be provided as part of a composition comprising the protein or polypeptide fragment. Modes of administration are discussed elsewhere herein.

[0171] As used herein, the term “mammal” refers to any member of the taxonomic class mammalia, including placental mammals and marsupial mammals. Thus, “mammal” includes humans, primates, livestock, and laboratory mammals. Exemplary mammals include a rodent, a mouse, a rat, a rabbit, a dog, a cat, a sheep, a horse, a goat, a llama, cattle, a primate, a pig, and any other mammal. In some embodiments, the mammal is at least one of a transgenic mammal, a genetically-engineered mammal, and a cloned mammal.

[0172] As used herein, “satiation” is the act of becoming full while eating or a reduced desire to eat. This halts or diminishes eating.

[0173] As used herein, “satiety” is the act of remaining full after a meal which manifests as the period of no eating follow the meal.

[0174] As used herein, “exercise” is, most broadly, any bodily activity that enhances or maintains physical fitness and overall health and wellness. Exercise is performed for various reasons including strengthening muscles and the cardiovascular system, honing athletic skills, weight loss or maintenance, as well as for the purpose of enjoyment.

[0175] The term “ameliorating” refers to any therapeutically beneficial result in the treatment of a disease state, e.g., including prophylaxis, lessening in the severity or progression, remission, or cure thereof.

[0176] As used herein, the term “in vitro” refers to events that occur in an artificial environment, e.g., in a test tube or reaction vessel, in cell culture, in a Petri dish, etc., rather than within an organism (e.g., animal, plant, or microbe). As used herein, the term “ex vivo” refers to experimentation done in or on tissue in an environment outside the organism.

[0177] The term “in situ” refers to processes that occur in a living cell growing separate from a living organism, e.g., growing in tissue culture.

[0178] The term “in vivo” refers to processes that occur in a living organism.

[0179] The term “sufficient amount” means an amount sufficient to produce a desired effect, e.g., an amount sufficient to modulate protein aggregation in a cell.

[0180] The term “therapeutically effective amount” is an amount that is effective to ameliorate a symptom of a disease. A therapeutically effective amount can be a “prophylactically effective amount” as prophylaxis can be considered therapy.

[0181] As used herein, “amino acid likelihood” (abbreviated as “AALike”) is a measure of the frequency with which a given amino acid appears at a given position of a multiple sequence alignment (MSA) generated with reference to a reference protein. The position is defined relative to the amino acid sequence of the reference protein. The reference protein can be any protein, such as a reference secreted protein. After a MSA is generated, the frequency with which each amino acid appears at each position of the protein sequences in the MSA is calculated to give the amino acid likelihood for each position. Thus, for each amino acid position of the reference protein up to 20 different amino acid likelihood values can be calculated.

[0182] For a given query protein sequence an MSA is created using homologous proteins. Homologous proteins can be identified using any of the several methods known in the art. For example, homologous proteins may be identified by performing local sequence alignments of the query with NCBI's library of non-redundant proteins. The initial local alignments may be performed using the blastp program from the NCBI toolkit v.2.2.26+(Altschul S. F., Gish W., Miller W., Myers E. W., and Lipman D. J. “Basic Local Alignment Search Tool”. J. Mol. Biol. (1990) 215: 403-410) with parameters selected from:

[0183] An e-value cutoff of 1, a gap opening penalty of −11, a gap extension penalty of −1, and the BLOSUM62 scoring matrix;

[0184] An e-value cutoff of 1, a gap opening penalty of −15, a gap extension penalty of −2, and the BLOSUM45 scoring matrix;

[0185] An e-value cutoff of 1, a gap opening penalty of −10, a gap extension penalty of −1, and the BLOSUM80 scoring matrix;

[0186] An e-value cutoff of 1, a gap opening penalty of −10, a gap extension penalty of −1, and the PAM70 scoring matrix; and

[0187] An e-value cutoff of 1, a gap opening penalty of −9, a gap extension penalty of −1, and the PAM30 scoring matrix.

[0188] The multiple sequence alignment of the resulting library was performed using the Align123 algorithm as implemented in Discovery Studio v3.1 (Accelrys Software Inc., Discovery Studio Modeling Environment, Release 3.1, San Diego: Accelrys Software Inc., 2012). Residue secondary structure was assigned using the DSC algorithm (King R. D., Sternberg M. J. E. “Identification and application of the concepts important for accurate and reliable protein secondary structure prediction”. Prot. Sci. (1996) 5: 2298-2310) with a weight of 1. Pairwise alignments were performed using the Smith and Waterman algorithm with a Gap opening penalty of −10 and gap extension penalty of −0.1, and the BLOSUM30 scoring matrix. Higher order alignments used the BLOSUM scoring matrix set, a gap opening penalty of −10, a gap extension penalty of −0.5, and an alignment delay identity cutoff (delay divergent parameter) of 40%.

[0189] All proteins with a local alignment expectation value less than 1 (from 75 to 1000 unique hits) were identified and aligned to generate a multiple sequence alignment (MSA). The proteins used for each MSA are presented in Appendix C.

[0190] As used herein, “amino acid type likelihood” (abbreviated as “AATLike”) is a measure of the frequency with which a given type of amino acid appears at a given position of a multiple sequence alignment (MSA) generated with reference to a reference protein. The amino acid type is chosen from branched chain amino acids (BCAA) (Leu, Ile, and Val), hydrophobic amino acids (Ala, Met, Ile, Leu, and Val), positively charged amino acids (Arg, Lys, His), negatively charged amino acids (Asp, Glu), charged amino acids (Arg, Lys, His, Asp Glu), and aromatic amino acids (Phe, Tyr, Trp). The position is defined relative to the amino acid sequence of the reference protein. The reference protein can be any protein, such as a reference secreted protein. After a MSA is generated, the frequency with which each type of amino acid appears at each position of the protein sequences in the MSA is calculated to give the amino acid type likelihood for each position.

[0191] As used herein, “position entropy” (abbreviated as “Sₚₒₛ”) is a measure of the spread of the amino acid distribution at a position in a MSA. An MSA is used to compute the entropy of each amino acid position in a given reference amino acid sequence using the full amino acid alphabet, AA=[A, R, N, D, C, Q, E, G, H, I, L, K, M, F, P, S, T, W, Y, V]:

S=−Σ_{jεAA}pⱼ ln pⱼ

[0192] where pⱼ is the probability of seeing the amino acid j at that position. Highly variable positions will have large entropies (the maximum entropy at a position corresponds to each amino acid being equally likely, which yields an entropy of 2.996) and highly conserved positions will have an entropy close to 0.

[0193] As used herein, “amino acid type position entropy” (abbreviated as “S_{AATpos}”) is a variation on position entropy in which, instead of using the full amino acid alphabet to calculate the position entropy, amino acids are grouped based on physiochemical properties as follows: hydrophobic [A, V, I, L, M], aromatic [F, Y, W], polar [S, T, N, Q], charged [R, H, K, D, E], and non-classified [G, P, C]. Using this physiochemical alphabet, pⱼ now corresponds to the probability of seeing each amino acid type (hydrophobic, aromatic, polar, charged, or non-classified) at position j. These amino acid type (AAType) probabilities are the sum of the probabilities of seeing each amino acid of that type. The equation for the position entropy stays the same, although the theoretical maximum is now 1.609.

[0194] A. Engineered Proteins

[0195] In some embodiments a protein comprises or consists of a derivative or mutein of a protein or fragment of a protein that naturally occurs in an edible product. Such a protein can be referred to as an “engineered protein.” In such embodiments the natural protein or fragment thereof is a “reference” protein or polypeptide and the engineered protein or a first polypeptide sequence thereof comprises at least one sequence modification relative to the amino acid sequence of the reference protein or polypeptide. For example, in some embodiments the engineered protein or first polypeptide sequence thereof is at least 40%, 45%, 50%, 55%, 60%, 65%, 70%, 75%, 80%, 85%, 86%, 87%, 88%, 89%, 90%, 91%, 92%, 93%, 94%, 95%, 96%, 97%, 98%, 99%, or 99.5% identical to at least one reference protein amino acid sequence. Typically the ratio of at least one of branched chain amino acid residues to total amino acid residues, essential amino acid residues to total amino acid residues, and leucine residues to total amino acid residues, present in the engineered protein or a first polypeptide sequence thereof is greater than the corresponding ratio of at least one of branched chain amino acid residues to total amino acid residues, essential amino acid residues to total amino acid residues, and leucine residues to total amino acid residues present in the reference protein or polypeptide sequence.

[0196] In some aspects the nutritive polypeptide is substantially digestible upon consumption by a mammalian subject. Preferably, the nutritive polypeptide is easier to digest than at least a reference polypeptide or a reference mixture of polypeptides, or a portion of other polypeptides in the consuming subject's diet. As used herein, “substantially digestible” can be demonstrated by measuring half-life of the nutritive polypeptide upon consumption. For example, a nutritive polypeptide is easier to digest if it has a half-life in the gastrointestinal tract of a human subject of less than 60 minutes, or less than 50, 40, 30, 20, 15, 10, 5, 4, 3, 2 minutes or 1 minute. In certain embodiments the nutritive polypeptide is provided in a formulation that provides enhanced digestion; for example, the nutritive polypeptide is provided free from other polypeptides or other materials. In some embodiments, the nutritive polypeptide contains one or more recognition sites for one or more endopeptidases. In a specific embodiment, the nutritive polypeptide contains a secretion leader (or secretory leader) sequence, which is then cleaved from the nutritive polypeptide. As provided herein, a nutritive polypeptide encompasses polypeptides with or without signal peptides and/or secretory leader sequences. In some embodiments, the nutritive polypeptide is susceptible to cleavage by one or more exopeptidases.

[0197] In some aspects the nutritive polypeptide is selected to have a desired density of one or more essential amino acids (EAA). Essential amino acid deficiency can be treated or prevented with the effective administration of the one or more essential amino acids otherwise absent or present in insufficient amounts in a subject's diet. For example, EAA density is about equal to or greater than the density of essential amino acids present in a full-length reference nutritional polypeptide, e.g., EAA density in a nutritive polypeptide is at least about 5%, 10%, 15%, 20%, 25%, 30%, 35%, 40%, 45%, 50%, 55%, 60%, 65%, 70%, 75%, 80%, 85%, 90%, 95%, 100%, 200%, 300%, 400%, 500% or above 500% greater than a reference nutritional polypeptide or the polypeptide present in an agriculturally-derived food product.

[0198] In some aspects the nutritive polypeptide is selected to have a desired density of aromatic amino acids (“AAA”, including phenylalanine, tryptophan, tyrosine, histidine, and thyroxine). AAAs are useful, e.g., in neurological development and prevention of exercise-induced fatigue. For example, AAA density is about equal to or greater than the density of essential amino acids present in a full-length reference nutritional polypeptide, e.g., AAA density in a nutritive polypeptide is at least about 5%, 10%, 15%, 20%, 25%, 30%, 35%, 40%, 45%, 50%, 55%, 60%, 65%, 70%, 75%, 80%, 85%, 90%, 95%, 100%, 200%, 300%, 400%, 500% or above 500% greater than a reference nutritional polypeptide or the polypeptide present in an agriculturally-derived food product.

[0199] In some aspects the nutritive polypeptide is selected to have a desired density of branched chain amino acids (BCAA). For example, BCAA density, either individual BCAAs or total BCAA content is about equal to or greater than the density of branched chain amino acids present in a full-length reference nutritional polypeptide, e.g., BCAA density in a nutritive polypeptide is at least about 5%, 10%, 15%, 20%, 25%, 30%, 35%, 40%, 45%, 50%, 55%, 60%, 65%, 70%, 75%, 80%, 85%, 90%, 95%, 100%, 200%, 300%, 400%, 500% or above 500% greater than a reference nutritional polypeptide or the polypeptide present in an agriculturally-derived food product. BCAA density in a nutritive polypeptide can also be selected for in combination with one or more attributes such as EAA density.

[0200] In some aspects the nutritive polypeptide is selected to have a desired density of amino acids arginine, glutamine and/or leucine (RQL amino acids). For example, RQL amino acid density is about equal to or greater than the density of essential amino acids present in a full-length reference nutritional polypeptide, e.g., RQL amino acid density in a nutritive polypeptide is at least about 5%, 10%, 15%, 20%, 25%, 30%, 35%, 40%, 45%, 50%, 55%, 60%, 65%, 70%, 75%, 80%, 85%, 90%, 95%, 100%, 200%, 300%, 400%, 500% or above 500% greater than a reference nutritional polypeptide or the polypeptide present in an agriculturally-derived food product.

[0201] In some embodiments, the engineered protein comprises at least one threonine (Thr) amino acid residue substitution of a non-Thr amino acid residue in the reference secreted protein.

[0202] In some embodiments, the engineered protein comprises at least one arginine (Arg) amino acid residue substitution of a non-Arg amino acid residue in the reference secreted protein.

[0203] In some embodiments, the engineered protein comprises at least one histidine (His) amino acid residue substitution of a non-His amino acid residue in the reference secreted protein.

[0204] In some embodiments, the engineered protein comprises at least one lysine (Lys) amino acid residue substitution of a non-Lys amino acid residue in the reference secreted protein.

[0205] In some embodiments, the engineered protein comprises at least one leucine (Leu) amino acid residue substitution of a non-Leu amino acid residue in the reference secreted protein.

[0206] In some embodiments, the engineered protein comprises at least one isoleucine (Ile) amino acid residue substitution of a non-Ile amino acid residue in the reference secreted protein.

[0207] In some embodiments, the engineered protein comprises at least one valine (Val) amino acid residue substitution of a non-Val amino acid residue in the reference secreted protein.

[0208] In another aspect, provided are nutritive polypeptides that contain amino acid sequences homologous to naturally-occurring polypeptides or variants thereof, which are engineered to be secreted from unicellular organisms and purified therefrom. Such homologous polypeptides can be 70%, 75%, 80%, 85%, 90%, 91%, 92%, 93%, 94%, 95%, 96%, 97%, 98%, 99% or greater than 99% similar, or can be 70%, 75%, 80%, 85%, 90%, 91%, 92%, 93%, 94%, 95%, 96%, 97%, 98%, 99% or greater than 99% identical to a naturally-occurring polypeptide or variant thereof. Such nutritive polypeptides can be endogenous to the host cell or exogenous, can be naturally secreted in the host cell, or both, and can be engineered for secretion.

[0209] In some embodiments herein a fragment of a naturally-occurring protein is selected and optionally isolated. In some embodiments the fragment comprises at least 25 amino acids. In some embodiments the fragment comprises at least 50 amino acids. In some embodiments the fragment consists of at least 25 amino acids. In some embodiments the fragment consists of at least 50 amino acids. In some embodiments an isolated recombinant protein is provided. In some embodiments the protein comprises a first polypeptide sequence, and the first polypeptide sequence comprises a fragment of at least 25 or at least 50 amino acids of a naturally-occurring protein. In some embodiments the proteins is isolated. In some embodiments the proteins are recombinant. In some embodiments the proteins comprise a first polypeptide sequence comprising a fragment of at least 50 amino acids of a naturally-occurring protein. In some embodiments the proteins are isolated recombinant proteins. In some embodiments the isolated recombinant proteins disclosed herein are provided in a non-isolated and/or non-recombinant form.

[0210] In some instances herein the portion of amino acid(s) of a particular type within a polypeptide, protein or a composition is quantified based on the weight ratio of the type of amino acid(s) to the total weight of amino acids present in the polypeptide, protein or composition in question. This value is calculated by dividing the weight of the particular amino acid(s) in the polypeptide, protein or a composition by the weight of all amino acids present in the polypeptide, protein or a composition.

[0211] In other instances the ratio of a particular type of amino acid(s) residues present in a polypeptide or protein to the total number of amino acids present in the polypeptide or protein in question is used. This value is calculated by dividing the number of the amino acid(s) in question that is present in each molecule of the polypeptide or protein by the total number of amino acid residues present in each molecule of the polypeptide or protein. A skilled artisan appreciates that these two methods are interchangeable and that the weight proportion of a type of amino acid(s) present in a polypeptide or protein can be converted to a ratio of the particular type of amino acid residue(s), and vice versa.

[0212] In some embodiments the protein comprises from 10 to 5,000 amino acids, from 20-2,000 amino acids, from 20-1,000 amino acids, from 20-500 amino acids, from 20-250 amino acids, from 20-200 amino acids, from 20-150 amino acids, from 20-100 amino acids, from 20-40 amino acids, from 30-50 amino acids, from 40-60 amino acids, from 50-70 amino acids, from 60-80 amino acids, from 70-90 amino acids, from 80-100 amino acids, at least 10 amino acids, at least 11 amino acids, at least 12 amino acids, at least 13 amino acids, at least 14 amino acids, at least 15 amino acids, at least 16 amino acids, at least 17 amino acids, at least 18 amino acids, at least 19 amino acids, at least 20 amino acids, at least 21 amino acids, at least 22 amino acids, at least 23 amino acids, at least 24 amino acids, at least 25 amino acids, at least 30 amino acids, at least 35 amino acids, at least 40 amino acids, at least 45 amino acids, at least 50 amino acids, at least 55 amino acids, at least 60 amino acids, at least 65 amino acids, at least 70 amino acids, at least 75 amino acids, at least 80 amino acids, at least 85 amino acids, at least 90 amino acids, at least 95 amino acids, at least 100 amino acids, at least 105 amino acids, at least 110 amino acids, at least 115 amino acids, at least 120 amino acids, at least 125 amino acids, at least 130 amino acids, at least 135 amino acids, at least 140 amino acids, at least 145 amino acids, at least 150 amino acids, at least 155 amino acids, at least 160 amino acids, at least 165 amino acids, at least 170 amino acids, at least 175 amino acids, at least 180 amino acids, at least 185 amino acids, at least 190 amino acids, at least 195 amino acids, at least 200 amino acids, at least 205 amino acids, at least 210 amino acids, at least 215 amino acids, at least 220 amino acids, at least 225 amino acids, at least 230 amino acids, at least 235 amino acids, at least 240 amino acids, at least 245 amino acids, or at least 250 amino acids. In some embodiments the protein consists of from 20 to 5,000 amino acids, from 20-2,000 amino acids, from 20-1,000 amino acids, from 20-500 amino acids, from 20-250 amino acids, from 20-200 amino acids, from 20-150 amino acids, from 20-100 amino acids, from 20-40 amino acids, from 30-50 amino acids, from 40-60 amino acids, from 50-70 amino acids, from 60-80 amino acids, from 70-90 amino acids, from 80-100 amino acids, at least 25 amino acids, at least 30 amino acids, at least 35 amino acids, at least 40 amino acids, at least 2455 amino acids, at least 50 amino acids, at least 55 amino acids, at least 60 amino acids, at least 65 amino acids, at least 70 amino acids, at least 75 amino acids, at least 80 amino acids, at least 85 amino acids, at least 90 amino acids, at least 95 amino acids, at least 100 amino acids, at least 105 amino acids, at least 110 amino acids, at least 115 amino acids, at least 120 amino acids, at least 125 amino acids, at least 130 amino acids, at least 135 amino acids, at least 140 amino acids, at least 145 amino acids, at least 150 amino acids, at least 155 amino acids, at least 160 amino acids, at least 165 amino acids, at least 170 amino acids, at least 175 amino acids, at least 180 amino acids, at least 185 amino acids, at least 190 amino acids, at least 195 amino acids, at least 200 amino acids, at least 205 amino acids, at least 210 amino acids, at least 215 amino acids, at least 220 amino acids, at least 225 amino acids, at least 230 amino acids, at least 235 amino acids, at least 240 amino acids, at least 245 amino acids, or at least 250 amino acids. In some aspects, a protein or fragment thereof includes at least two domains: a first domain and a second domain. One of the two domains can include a tag domain, which can be removed if desired. Each domain can be 1, 2, 3, 4, 5, 6, 7, 8, 9, 10, 11, 12, 13, 14, 15, 16, 17, 18, 19, 20, 21, 22, 23, 24, 25, or greater than 25 amino acids in length. For example, the first domain can be a polypeptide of interest that is 18 amino acids in length and the second domain can be a tag domain that is 7 amino acids in length. As another example, the first domain can be a polypeptide of interest that is 17 amino acids in length and the second domain can be a tag domain that is 8 amino acids in length.

[0213] In some embodiments herein a fragment of a naturally-occurring protein is selected and optionally isolated. In some embodiments the fragment comprises at least 25 amino acids. In some embodiments the fragment comprises at least 50 amino acids. In some embodiments the fragment consists of at least 25 amino acids. In some embodiments the fragment consists of at least 50 amino acids. In some embodiments an isolated recombinant protein is provided. In some embodiments the protein comprises a first polypeptide sequence, and the first polypeptide sequence comprises a fragment of at least 25 or at least 50 amino acids of a naturally-occurring protein. In some embodiments the proteins is isolated. In some embodiments the proteins are recombinant. In some embodiments the proteins comprise a first polypeptide sequence comprising a fragment of at least 50 amino acids of a naturally-occurring protein. In some embodiments the proteins are isolated recombinant proteins. In some embodiments the isolated recombinant proteins disclosed herein are provided in a non-isolated and/or non-recombinant form.

[0214] This disclosure provides engineered proteins comprising a sequence of at least 20 amino acids that comprise an altered amino acid sequence compared to the amino acid sequence of a reference secreted protein. In some embodiments the engineered protein comprises a sequence of at least 25 amino acids, at least 30 amino acids, at least 35 amino acids, at least 40 amino acids, at least 45 amino acids, at least 50 amino acids, at least 60 amino acids, at least 70 amino acids, at least 80 amino acids, at least 85 amino acids, at least 90 amino acids, at least 95 amino acids, or at least 100 amino acids that comprises an altered amino acid sequence compared to the amino acid sequence of a reference secreted protein. In some embodiments the engineered protein comprises a sequence of at least 20 to 30 amino acids, at least 20 to 40 amino acids, at least 25 to 50 amino acids, ar at least 50 to 100 amino acids that comprises an altered amino acid sequence compared to the amino acid sequence of a reference secreted protein. As used herein, a “reference secreted protein” is a protein that is secreted from a compatible microorganism when expressed therein. A “compatible microorganism” is one that comprises the necessary machinery to synthesize and process the protein for secretion. The reference secreted protein may be a naturally occurring protein (i.e., a protein that naturally occurs in an organism) or a non-naturally occurring protein (i.e., a protein that does not naturally occur in the an organism). The compatible microorganisms for a particular reference secreted protein that is naturally occurring will necessarily include the microorganism that the reference secreted protein naturally occurs in.

[0215] The alterations between the sequence of the reference secreted protein and the engineered protein may be defined by performing a sequence alignment between the reference secreted protein and the engineered protein and identifying amino acid positions that differ. In some embodiments the sequence of at least 20 amino acids that comprises an altered amino acid sequence in the engineered protein is at least 40%, 45%, 50%, 55%, 60%, 65%, 70%, 75%, 80%, 85%, 86%, 87%, 88%, 89%, 90%, 91%, 92%, 93%, 94%, 95%, 96%, 97%, 98%, 99%, or 99.5% homologous to a homologous sequence is the reference secreted protein. In some embodiments the amino acid sequence of the engineered protein is at least 40%, 45%, 50%, 55%, 60%, 65%, 70%, 75%, 80%, 85%, 86%, 87%, 88%, 89%, 90%, 91%, 92%, 93%, 94%, 95%, 96%, 97%, 98%, 99%, or 99.5% homologous to the reference secreted protein.

[0216] In some embodiments the engineered protein comprises a ratio of essential amino acids to total amino acids present in the engineered protein higher than the ratio of essential amino acids to total amino acids present in the reference secreted protein. In some embodiments the engineered protein comprises at least one essential amino acid residue substitution of a non-essential amino acid residue in the reference secreted protein. In some embodiments the engineered protein comprises at least one branch chain amino acid residue substitution of a non-branch chain amino acid residue in the reference secreted protein. In some embodiments the engineered protein comprises at least one Arginine (Arg) or Glutamine (Glu) amino acid residue substitution of a non-Arginine (Arg) or non-Glutamine (Glu) amino acid residue in the reference secreted protein.

[0217] In some embodiments, the engineered protein comprises at least one leucine (Leu) amino acid residue substitution of a non-Leu amino acid residue in the reference secreted protein. In some embodiments the Leu amino acid residue substitution is at an amino acid position with a Leu frequency score greater than 0. In some embodiments the Leu amino acid residue substitution is at an amino acid position with a Leu frequency score of at least 0.1. In some embodiments the Leu amino acid residue substitution is at an amino acid position with a branch chain amino acid frequency score of greater than 0. In some embodiments the Leu amino acid residue substitution is at an amino acid position with a branch chain amino acid frequency score of at least 0.1. In some embodiments the Leu amino acid residue substitution is at an amino acid position with a hydrophobic amino acid frequency score of greater than 0. In some embodiments the Leu amino acid residue substitution is at an amino acid position with a hydrophobic amino acid frequency score of at least 0.1. In some embodiments the Leu amino acid residue substitution is at an amino acid position with a per amino acid position entropy of at least 1.5. In some embodiments the difference in total folding free energy between the reference secreted protein and the engineered protein is less than or equal to 0.5.

[0218] In some embodiments of the engineered protein, at least two non-leucine (Leu) amino acid residues in the reference secreted protein are substituted by a Leu amino acid residue in the engineered protein, wherein the difference in total folding free energy between the reference secreted protein and the engineered protein is less than or equal to 0.5, and wherein the major energetic component of the total folding free energies for each amino acid substitution is different.

[0219] In some embodiments the engineered protein comprises at least one Leu amino acid residue substitution of a non-Leu amino acid residue in a reference secreted protein at a position with a position entropy of at least 1.5. In some embodiments the difference in total folding free energy between the reference secreted protein and the engineered protein is less than or equal to 0.5. In some embodiments the engineered protein comprises at least two Leu amino acid residue substitutions of non-Leu amino acid residues in the reference secreted protein, wherein the contribution to the difference in total folding free energy between the reference secreted protein and the engineered protein from each of the Leu amino acid residue substitutions considered independently is less than or equal to 0.5 and the major energetic component of the total folding free energies for each amino acid substitution is different.

[0220] In some embodiments the engineered protein comprises at least one Leu amino acid residue substitution of a non-Leu amino acid residue in a reference secreted protein at a position at which the total free folding energy that results from the Leu substitution is less than or equal to 0.5. In some embodiments the engineered protein comprises at least two Leu amino acid residue substitutions of non-Leu amino acid residues in the reference secreted protein, wherein the contribution to the difference in total folding free energy between the reference secreted protein and the engineered protein from each of the Leu amino acid residue substitutions considered independently is less than or equal to 0.5 and the major energetic component of the total folding free energies for each amino acid substitution is different.

[0221] In some embodiments, the engineered protein comprises at least one valine (Val) amino acid residue substitution of a non-Val amino acid residue in the reference secreted protein. In some embodiments the Val amino acid residue substitution is at an amino acid position with a Val frequency score greater than 0. In some embodiments the Val amino acid residue substitution is at an amino acid position with a Val frequency score of at least 0.1. In some embodiments the Val amino acid residue substitution is at an amino acid position with a branch chain amino acid frequency score of greater than 0. In some embodiments the Val amino acid residue substitution is at an amino acid position with a branch chain amino acid frequency score of at least 0.1. In some embodiments the Val amino acid residue substitution is at an amino acid position with a hydrophobic amino acid frequency score of greater than 0. In some embodiments the Val amino acid residue substitution is at an amino acid position with a hydrophobic amino acid frequency score of at least 0.1. In some embodiments the Val amino acid residue substitution is at an amino acid position with a per amino acid position entropy of at least 1.5. In some embodiments the difference in total folding free energy between the reference secreted protein and the engineered protein is less than or equal to 0.5.

[0222] In some embodiments of the engineered protein, at least two non-valine (Val) amino acid residues in the reference secreted protein are substituted by a Val amino acid residue in the engineered protein, wherein the difference in total folding free energy between the reference secreted protein and the engineered protein is less than or equal to 0.5, and wherein the major energetic component of the total folding free energies for each amino acid substitution is different.

[0223] In some embodiments the engineered protein comprises at least one Val amino acid residue substitution of a non-Val amino acid residue in a reference secreted protein at a position with a position entropy of at least 1.5. In some embodiments the difference in total folding free energy between the reference secreted protein and the engineered protein is less than or equal to 0.5. In some embodiments the engineered protein comprises at least two Val amino acid residue substitutions of non-Val amino acid residues in the reference secreted protein, wherein the contribution to the difference in total folding free energy between the reference secreted protein and the engineered protein from each of the Val amino acid residue substitutions considered independently is less than or equal to 0.5 and the major energetic component of the total folding free energies for each amino acid substitution is different.

[0224] In some embodiments the engineered protein comprises at least one Val amino acid residue substitution of a non-Val amino acid residue in a reference secreted protein at a position at which the total free folding energy that results from the Val substitution is less than or equal to 0.5. In some embodiments the engineered protein comprises at least two Val amino acid residue substitutions of non-Val amino acid residues in the reference secreted protein, wherein the contribution to the difference in total folding free energy between the reference secreted protein and the engineered protein from each of the Val amino acid residue substitutions considered independently is less than or equal to 0.5 and the major energetic component of the total folding free energies for each amino acid substitution is different.

[0225] In some embodiments, the engineered protein comprises at least one isoleucine (Ile) amino acid residue substitution of a non-Ile amino acid residue in the reference secreted protein. In some embodiments the Ile amino acid residue substitution is at an amino acid position with a Ile frequency score greater than 0. In some embodiments the Ile amino acid residue substitution is at an amino acid position with a Ile frequency score of at least 0.1. In some embodiments the Ile amino acid residue substitution is at an amino acid position with a branch chain amino acid frequency score of greater than 0. In some embodiments the Ile amino acid residue substitution is at an amino acid position with a branch chain amino acid frequency score of at least 0.1. In some embodiments the Ile amino acid residue substitution is at an amino acid position with a hydrophobic amino acid frequency score of greater than 0. In some embodiments the Ile amino acid residue substitution is at an amino acid position with a hydrophobic amino acid frequency score of at least 0.1. In some embodiments the Ile amino acid residue substitution is at an amino acid position with a per amino acid position entropy of at least 1.5. In some embodiments the difference in total folding free energy between the reference secreted protein and the engineered protein is less than or equal to 0.5.

[0226] In some embodiments of the engineered protein, at least two non-isoleucine (Ile) amino acid residues in the reference secreted protein are substituted by a Ile amino acid residue in the engineered protein, wherein the difference in total folding free energy between the reference secreted protein and the engineered protein is less than or equal to 0.5, and wherein the major energetic component of the total folding free energies for each amino acid substitution is different.

[0227] In some embodiments the engineered protein comprises at least one Ile amino acid residue substitution of a non-Ile amino acid residue in a reference secreted protein at a position with a position entropy of at least 1.5. In some embodiments the difference in total folding free energy between the reference secreted protein and the engineered protein is less than or equal to 0.5. In some embodiments the engineered protein comprises at least two Ile amino acid residue substitutions of non-Ile amino acid residues in the reference secreted protein, wherein the contribution to the difference in total folding free energy between the reference secreted protein and the engineered protein from each of the Ile amino acid residue substitutions considered independently is less than or equal to 0.5 and the major energetic component of the total folding free energies for each amino acid substitution is different.

[0228] In some embodiments the engineered protein comprises at least one Ile amino acid residue substitution of a non-Ile amino acid residue in a reference secreted protein at a position at which the total free folding energy that results from the Ile substitution is less than or equal to 0.5. In some embodiments the engineered protein comprises at least two Ile amino acid residue substitutions of non-Ile amino acid residues in the reference secreted protein, wherein the contribution to the difference in total folding free energy between the reference secreted protein and the engineered protein from each of the Ile amino acid residue substitutions considered independently is less than or equal to 0.5 and the major energetic component of the total folding free energies for each amino acid substitution is different.

[0229] As used herein, an “amino acid frequency score,” such as a “Leu frequency score” is a measure of the frequency with which a particular amino acid or type of amino acid occurs at a homologous position across the naturally occurring sequences of homologous proteins. Thus, for a reference secreted protein, if a set of homologous sequences are identified using a multiple sequence alignment (MSA) and the sequences are aligned, the frequency with which each amino acid appears at each position across all of the sequences in the MSA may be determined and a frequency score assigned to each amino acid at each position. Alternatively, amino acids may be grouped by type, such as branch chain amino acids, essential amino acids, or hydrophobic amino acids, and frequency scores may be calculated based on the occurrence of any member of each type at each position (referred to herein as “amino acid type frequency score”). The amino acid frequency scores and amino acid type frequency scores may be used to identify amino acid positions in a reference secreted protein sequence that are tolerant of substitution by a different amino acid than the amino acid appearing at that position in the reference secreted protein sequence. For example, positions in a reference sequence that have an amino acid other than Leu, but that have a relatively high Leu frequency score may be substituted by Leu to make an engineered protein with an increased Leu content.

[0230] In some embodiments the engineered protein comprises at least one amino acid N substitution (wherein “N” stands for any amino acid) at a position with an N amino acid frequency score greater than 0. In some embodiments the engineered protein comprises at least one amino acid N substitution at a position with an N amino acid frequency score of at least 0.01. In some embodiments the engineered protein comprises at least one amino acid N substitution at a position with an N amino acid frequency score of at least 0.02. In some embodiments the engineered protein comprises at least one amino acid N substitution at a position with an N amino acid frequency score of at least 0.03. In some embodiments the engineered protein comprises at least one amino acid N substitution at a position with an N amino acid frequency score of at least 0.04. In some embodiments the engineered protein comprises at least one amino acid N substitution at a position with an N amino acid frequency score of at least 0.05. In some embodiments the engineered protein comprises at least one amino acid N substitution at a position with an N amino acid frequency score of at least 0.06. In some embodiments the engineered protein comprises at least one amino acid N substitution at a position with an N amino acid frequency score of at least 0.07. In some embodiments the engineered protein comprises at least one amino acid N substitution at a position with an N amino acid frequency score of at least 0.08. In some embodiments the engineered protein comprises at least one amino acid N substitution at a position with an N amino acid frequency score of at least 0.09. In some embodiments the engineered protein comprises at least one amino acid N substitution at a position with an N amino acid frequency score of at least 0.10. In some embodiments the engineered protein comprises at least one amino acid N substitution at a position with an N amino acid frequency score of at least 0.11. In some embodiments the engineered protein comprises at least one amino acid N substitution at a position with an N amino acid frequency score of at least 0.12. In some embodiments the engineered protein comprises at least one amino acid N substitution at a position with an N amino acid frequency score of at least 0.13. In some embodiments the engineered protein comprises at least one amino acid N substitution at a position with an N amino acid frequency score of at least 0.14. In some embodiments the engineered protein comprises at least one amino acid N substitution at a position with an N amino acid frequency score of at least 0.15. In some embodiments the engineered protein comprises at least one amino acid N substitution at a position with an N amino acid frequency score of at least 0.16. In some embodiments the engineered protein comprises at least one amino acid N substitution at a position with an N amino acid frequency score of at least 0.17. In some embodiments the engineered protein comprises at least one amino acid N substitution at a position with an N amino acid frequency score of at least 0.18. In some embodiments the engineered protein comprises at least one amino acid N substitution at a position with an N amino acid frequency score of at least 0.19. In some embodiments the engineered protein comprises at least one amino acid N substitution at a position with an N amino acid frequency score of at least 0.20. In some embodiments the engineered protein comprises at least one amino acid N substitution at a position with an N amino acid frequency score of at least 0.25. In some embodiments the engineered protein comprises at least one amino acid N substitution at a position with an N amino acid frequency score of at least 0.30. In some embodiments the engineered protein comprises at least one amino acid N substitution at a position with an N amino acid frequency score of at least 0.35. In some embodiments the engineered protein comprises at least one amino acid N substitution at a position with an N amino acid frequency score of at least 0.40. In some embodiments the engineered protein comprises at least one amino acid N substitution at a position with an N amino acid frequency score of at least 0.45. In some embodiments the engineered protein comprises at least one amino acid N substitution at a position with an N amino acid frequency score of at least 0.50. In some embodiments the amino acid N is selected from Leu, Ile, and Val. In some embodiments the amino acid N is selected from Arg and Glu. In some embodiments the amino acid N is selected from essential amino acids. In some embodiments the amino acid N is selected from hydrophobic amino acids.

[0231] In some embodiments the engineered protein comprises at least one amino acid N substitution (wherein “N” stands for any amino acid) at a position with a branch chain amino acid frequency score greater than 0. In some embodiments the engineered protein comprises at least one amino acid N substitution at a position with a branch chain amino acid frequency score of at least 0.01. In some embodiments the engineered protein comprises at least one amino acid N substitution at a position with a branch chain amino acid frequency score of at least 0.02. In some embodiments the engineered protein comprises at least one amino acid N substitution at a position with a branch chain amino acid frequency score of at least 0.03. In some embodiments the engineered protein comprises at least one amino acid N substitution at a position with a branch chain amino acid frequency score of at least 0.04. In some embodiments the engineered protein comprises at least one amino acid N substitution at a position with a branch chain amino acid frequency score of at least 0.05. In some embodiments the engineered protein comprises at least one amino acid N substitution at a position with a branch chain amino acid frequency score of at least 0.06. In some embodiments the engineered protein comprises at least one amino acid N substitution at a position with a branch chain amino acid frequency score of at least 0.07. In some embodiments the engineered protein comprises at least one amino acid N substitution at a position with a branch chain amino acid frequency score of at least 0.08. In some embodiments the engineered protein comprises at least one amino acid N substitution at a position with a branch chain amino acid frequency score of at least 0.09. In some embodiments the engineered protein comprises at least one amino acid N substitution at a position with a branch chain amino acid frequency score of at least 0.10. In some embodiments the engineered protein comprises at least one amino acid N substitution at a position with a branch chain amino acid frequency score of at least 0.11. In some embodiments the engineered protein comprises at least one amino acid N substitution at a position with a branch chain amino acid frequency score of at least 0.12. In some embodiments the engineered protein comprises at least one amino acid N substitution at a position with a branch chain amino acid frequency score of at least 0.13. In some embodiments the engineered protein comprises at least one amino acid N substitution at a position with a branch chain amino acid frequency score of at least 0.14. In some embodiments the engineered protein comprises at least one amino acid N substitution at a position with a branch chain amino acid frequency score of at least 0.15. In some embodiments the engineered protein comprises at least one amino acid N substitution at a position with a branch chain amino acid frequency score of at least 0.16. In some embodiments the engineered protein comprises at least one amino acid N substitution at a position with a branch chain amino acid frequency score of at least 0.17. In some embodiments the engineered protein comprises at least one amino acid N substitution at a position with a branch chain amino acid frequency score of at least 0.18. In some embodiments the engineered protein comprises at least one amino acid N substitution at a position with a branch chain amino acid frequency score of at least 0.19. In some embodiments the engineered protein comprises at least one amino acid N substitution at a position with a branch chain amino acid frequency score of at least 0.20. In some embodiments the engineered protein comprises at least one amino acid N substitution at a position with a branch chain amino acid frequency score of at least 0.25. In some embodiments the engineered protein comprises at least one amino acid N substitution at a position with a branch chain amino acid frequency score of at least 0.30. In some embodiments the engineered protein comprises at least one amino acid N substitution at a position with a branch chain amino acid frequency score of at least 0.35. In some embodiments the engineered protein comprises at least one amino acid N substitution at a position with a branch chain amino acid frequency score of at least 0.40. In some embodiments the engineered protein comprises at least one amino acid N substitution at a position with a branch chain amino acid frequency score of at least 0.45. In some embodiments the engineered protein comprises at least one amino acid N substitution at a position with a branch chain amino acid frequency score of at least 0.50. In some embodiments the amino acid N is selected from Leu, Ile, and Val. In some embodiments the amino acid N is selected from essential amino acids. In some embodiments the amino acid N is selected from hydrophobic amino acids.

[0232] In some embodiments the engineered protein comprises at least one amino acid N substitution (wherein “N” stands for any amino acid) at a position with an essential amino acid frequency score greater than 0. In some embodiments the engineered protein comprises at least one amino acid N substitution at a position with an essential amino acid frequency score of at least 0.01. In some embodiments the engineered protein comprises at least one amino acid N substitution at a position with an essential amino acid frequency score of at least 0.02. In some embodiments the engineered protein comprises at least one amino acid N substitution at a position with an essential amino acid frequency score of at least 0.03. In some embodiments the engineered protein comprises at least one amino acid N substitution at a position with an essential amino acid frequency score of at least 0.04. In some embodiments the engineered protein comprises at least one amino acid N substitution at a position with an essential amino acid frequency score of at least 0.05. In some embodiments the engineered protein comprises at least one amino acid N substitution at a position with an essential amino acid frequency score of at least 0.06. In some embodiments the engineered protein comprises at least one amino acid N substitution at a position with an essential amino acid frequency score of at least 0.07. In some embodiments the engineered protein comprises at least one amino acid N substitution at a position with an essential amino acid frequency score of at least 0.08. In some embodiments the engineered protein comprises at least one amino acid N substitution at a position with an essential amino acid frequency score of at least 0.09. In some embodiments the engineered protein comprises at least one amino acid N substitution at a position with an essential amino acid frequency score of at least 0.10. In some embodiments the engineered protein comprises at least one amino acid N substitution at a position with an essential amino acid frequency score of at least 0.11. In some embodiments the engineered protein comprises at least one amino acid N substitution at a position with an essential amino acid frequency score of at least 0.12. In some embodiments the engineered protein comprises at least one amino acid N substitution at a position with an essential amino acid frequency score of at least 0.13. In some embodiments the engineered protein comprises at least one amino acid N substitution at a position with an essential amino acid frequency score of at least 0.14. In some embodiments the engineered protein comprises at least one amino acid N substitution at a position with an essential amino acid frequency score of at least 0.15. In some embodiments the engineered protein comprises at least one amino acid N substitution at a position with an essential amino acid frequency score of at least 0.16. In some embodiments the engineered protein comprises at least one amino acid N substitution at a position with an essential amino acid frequency score of at least 0.17. In some embodiments the engineered protein comprises at least one amino acid N substitution at a position with a essential amino acid frequency score of at least 0.18. In some embodiments the engineered protein comprises at least one amino acid N substitution at a position with an essential amino acid frequency score of at least 0.19. In some embodiments the engineered protein comprises at least one amino acid N substitution at a position with an essential amino acid frequency score of at least 0.20. In some embodiments the engineered protein comprises at least one amino acid N substitution at a position with an essential amino acid frequency score of at least 0.25. In some embodiments the engineered protein comprises at least one amino acid N substitution at a position with an essential amino acid frequency score of at least 0.30. In some embodiments the engineered protein comprises at least one amino acid N substitution at a position with an essential amino acid frequency score of at least 0.35. In some embodiments the engineered protein comprises at least one amino acid N substitution at a position with an essential amino acid frequency score of at least 0.40. In some embodiments the engineered protein comprises at least one amino acid N substitution at a position with an essential amino acid frequency score of at least 0.45. In some embodiments the engineered protein comprises at least one amino acid N substitution at a position with an essential amino acid frequency score of at least 0.50. In some embodiments the amino acid N is selected from Leu, Ile, and Val. In some embodiments the amino acid N is selected from essential amino acids. In some embodiments the amino acid N is selected from hydrophobic amino acids.

[0233] In some embodiments the amino acid substitution(s) made to the reference secreted protein are selected so that for at least one of the substitutions the difference in total folding free energy between the reference secreted protein (without the substitution) and the engineered protein is less than or equal to −0.5, −0.4, −0.3, −0.0.2, −0.1, 0, 0.1, 0.2, 0.3, 0.4, or 0.5. In some embodiments the amino acid substitutions made to the reference secreted protein are selected so that the difference in total folding free energy between the reference secreted protein and the engineered protein is less than or equal to −0.5, −0.4, −0.3, −0.0.2, −0.1, 0, 0.1, 0.2, 0.3, 0.4, or 0.5.

[0234] In some embodiments the amino acid substitution(s) made to the reference secreted protein are selected so that for at least one of the substitutions the position entropy is at least 1.5, at least 1.6, at least 1.7, at least 1.8, at least 1.9, at least 2.0, at least 2.1, at least 2.2, at least 2.3, at least 2.4, at least 2.5, at least 2.6, at least 2.7, at least 2.8, at least 2.9, or at least 3.0.

[0235] In some embodiments from 5 to 50 non-essential amino acid residues in the reference secreted protein are substituted by essential amino acid residues in the engineered protein. In some embodiments from 10 to 50 non-essential amino acid residues in the reference secreted protein are substituted by essential amino acid residues in the engineered protein. In some embodiments from 25 to 50 non-essential amino acid residues in the reference secreted protein are substituted by essential amino acid residues in the engineered protein. In some embodiments at least 1, 2, 3, 4, 5, 6, 7, 8, 9, 10, 15, 20, 25, 30, 35, 40, 45, or 50 non-essential amino acid residues in the reference secreted protein are substituted by essential amino acid residues in the engineered protein.

[0236] In some embodiments from 5 to 50 non-branch chain amino acid residues in the reference secreted protein are substituted by branch chain amino acid residues in the engineered protein. In some embodiments from 10 to 50 non-branch chain amino acid residues in the reference secreted protein are substituted by branch chain amino acid residues in the engineered protein. In some embodiments from 25 to 50 non-branch chain amino acid residues in the reference secreted protein are substituted by branch chain amino acid residues in the engineered protein. In some embodiments at least 1, 2, 3, 4, 5, 6, 7, 8, 9, 10, 15, 20, 25, 30, 35, 40, 45, or 50 non-branch chain amino acid residues in the reference secreted protein are substituted by branch chain amino acid residues in the engineered protein.

[0237] In some embodiments from 5 to 50 non-Leu amino acid residues in the reference secreted protein are substituted by Leu amino acid residues in the engineered protein. In some embodiments from 10 to 50 non-Leu amino acid residues in the reference secreted protein are substituted by Leu amino acid residues in the engineered protein. In some embodiments from 25 to 50 non-Leu amino acid residues in the reference secreted protein are substituted Leu amino acid residues in the engineered protein. In some embodiments at least 1, 2, 3, 4, 5, 6, 7, 8, 9, 10, 15, 20, 25, 30, 35, 40, 45, or 50 non-Leu amino acid residues in the reference secreted protein are substituted by Leu amino acid residues in the engineered protein.

[0238] In some embodiments from 5 to 50 non-Val amino acid residues in the reference secreted protein are substituted by Val amino acid residues in the engineered protein. In some embodiments from 10 to 50 non-Val amino acid residues in the reference secreted protein are substituted by Val amino acid residues in the engineered protein. In some embodiments from 25 to 50 non-Val amino acid residues in the reference secreted protein are substituted Val amino acid residues in the engineered protein. In some embodiments at least 1, 2, 3, 4, 5, 6, 7, 8, 9, 10, 15, 20, 25, 30, 35, 40, 45, or 50 non-Val amino acid residues in the reference secreted protein are substituted by Val amino acid residues in the engineered protein.

[0239] In some embodiments from 5 to 50 non-Ile amino acid residues in the reference secreted protein are substituted by Ile amino acid residues in the engineered protein. In some embodiments from 10 to 50 non-Ile amino acid residues in the reference secreted protein are substituted by Ile amino acid residues in the engineered protein. In some embodiments from 25 to 50 non-Ile amino acid residues in the reference secreted protein are substituted Ile amino acid residues in the engineered protein. In some embodiments at least 1, 2, 3, 4, 5, 6, 7, 8, 9, 10, 15, 20, 25, 30, 35, 40, 45, or 50 non-Ile amino acid residues in the reference secreted protein are substituted by Ile amino acid residues in the engineered protein.

[0240] In some embodiments from 5 to 50% of non-essential amino acid residues in the reference secreted protein are substituted by essential amino acid residues in the engineered protein. In some embodiments from 10 to 50% of non-essential amino acid residues in the reference secreted protein are substituted by essential amino acid residues in the engineered protein. In some embodiments from 25 to 50% of non-essential amino acid residues in the reference secreted protein are substituted by essential amino acid residues in the engineered protein. In some embodiments at least 1, 2, 3, 4, 5, 6, 7, 8, 9, 10, 15, 20, 25, 30, 35, 40, 45, or 50% of non-essential amino acid residues in the reference secreted protein are substituted by essential amino acid residues in the engineered protein.

[0241] In some embodiments from 5 to 50% of non-branch chain amino acid residues in the reference secreted protein are substituted by branch chain amino acid residues in the engineered protein. In some embodiments from 10 to 50% of non-branch chain amino acid residues in the reference secreted protein are substituted by branch chain amino acid residues in the engineered protein. In some embodiments from 25 to 50% of non-branch chain amino acid residues in the reference secreted protein are substituted by branch chain amino acid residues in the engineered protein. In some embodiments at least 1, 2, 3, 4, 5, 6, 7, 8, 9, 10, 15, 20, 25, 30, 35, 40, 45, or 50% of non-branch chain amino acid residues in the reference secreted protein are substituted by branch chain amino acid residues in the engineered protein.

[0242] In some embodiments from 5 to 50% of non-Leu amino acid residues in the reference secreted protein are substituted by Leu amino acid residues in the engineered protein. In some embodiments from 10 to 50% of non-Leu amino acid residues in the reference secreted protein are substituted by Leu amino acid residues in the engineered protein. In some embodiments from 25 to 50% of non-Leu amino acid residues in the reference secreted protein are substituted Leu amino acid residues in the engineered protein. In some embodiments at least 1, 2, 3, 4, 5, 6, 7, 8, 9, 10, 15, 20, 25, 30, 35, 40, 45, or 50% of non-Leu amino acid residues in the reference secreted protein are substituted by Leu amino acid residues in the engineered protein.

[0243] In some embodiments from 5 to 50% of non-Val amino acid residues in the reference secreted protein are substituted by Val amino acid residues in the engineered protein. In some embodiments from 10 to 50% of non-Val amino acid residues in the reference secreted protein are substituted by Val amino acid residues in the engineered protein. In some embodiments from 25 to 50% of non-Val amino acid residues in the reference secreted protein are substituted Val amino acid residues in the engineered protein. In some embodiments at least 1, 2, 3, 4, 5, 6, 7, 8, 9, 10, 15, 20, 25, 30, 35, 40, 45, or 50% of non-Val amino acid residues in the reference secreted protein are substituted by Val amino acid residues in the engineered protein.

[0244] In some embodiments from 5 to 50% of non-Ile amino acid residues in the reference secreted protein are substituted by Ile amino acid residues in the engineered protein. In some embodiments from 10 to 50% of non-Ile amino acid residues in the reference secreted protein are substituted by Ile amino acid residues in the engineered protein. In some embodiments from 25 to 50% of non-Ile amino acid residues in the reference secreted protein are substituted Ile amino acid residues in the engineered protein. In some embodiments at least 1, 2, 3, 4, 5, 6, 7, 8, 9, 10, 15, 20, 25, 30, 35, 40, 45, or 50% of non-Ile amino acid residues in the reference secreted protein are substituted by Ile amino acid residues in the engineered protein.

[0245] In some embodiments from 5 to 50% of non-Arg amino acid residues in the reference secreted protein are substituted by Arg amino acid residues in the engineered protein. In some embodiments from 10 to 50% of non-Arg amino acid residues in the reference secreted protein are substituted by Arg amino acid residues in the engineered protein. In some embodiments from 25 to 50% of non-Arg amino acid residues in the reference secreted protein are substituted Arg amino acid residues in the engineered protein. In some embodiments at least 1, 2, 3, 4, 5, 6, 7, 8, 9, 10, 15, 20, 25, 30, 35, 40, 45, or 50% of non-Arg amino acid residues in the reference secreted protein are substituted by Arg amino acid residues in the engineered protein.

[0246] In some embodiments the engineered protein comprises at least one amino acid sequence, comprising an insertion of at least 5, at least 10, at least 15, at least 20, at least 25, or at least 50 amino acid residues. In some embodiments the at least one amino acid insertion comprises at least 5%, at least 10%, at least 15%, at least 20%, at least 25%, at least 30%, at least 35%, at least 40%, at least 45%, at least 50%, at least 55%, at least 60%, at least 65%, at least 70%, at least 75%, at least 80%, at least 85%, at least 90%, at least 95%, or 100% essential amino acids. In some embodiments the at least one amino acid insertion comprises at least 5%, at least 10%, at least 15%, at least 20%, at least 25%, at least 30%, at least 35%, at least 40%, at least 45%, at least 50%, at least 55%, at least 60%, at least 65%, at least 70%, at least 75%, at least 80%, at least 85%, at least 90%, at least 95%, or 100% branch chain amino acids. In some embodiments the at least one amino acid insertion comprises at least 5%, at least 10%, at least 15%, at least 20%, at least 25%, at least 30%, at least 35%, at least 40%, at least 45%, at least 50%, at least 55%, at least 60%, at least 65%, at least 70%, at least 75%, at least 80%, at least 85%, at least 90%, at least 95%, or 100% hydrophobic amino acids. In some embodiments the at least one amino acid insertion comprises at least 5%, at least 10%, at least 15%, at least 20%, at least 25%, at least 30%, at least 35%, at least 40%, at least 45%, at least 50%, at least 55%, at least 60%, at least 65%, at least 70%, at least 75%, at least 80%, at least 85%, at least 90%, at least 95%, or 100% Leu. In some embodiments the at least one amino acid insertion comprises at least 5%, at least 10%, at least 15%, at least 20%, at least 25%, at least 30%, at least 35%, at least 40%, at least 45%, at least 50%, at least 55%, at least 60%, at least 65%, at least 70%, at least 75%, at least 80%, at least 85%, at least 90%, at least 95%, or 100% Ile. In some embodiments the at least one amino acid insertion comprises at least 5%, at least 10%, at least 15%, at least 20%, at least 25%, at least 30%, at least 35%, at least 40%, at least 45%, at least 50%, at least 55%, at least 60%, at least 65%, at least 70%, at least 75%, at least 80%, at least 85%, at least 90%, at least 95%, or 100% Val.

[0247] In some embodiments the at least one amino acid sequence insertion is located at a terminus of the engineered protein.

[0248] Phenylketonuria (PKU) is an autosomal recessive metabolic genetic disorder characterized by a mutation in the gene for the hepatic enzyme phenylalanine hydroxylase (PAH), rendering it nonfunctional. This enzyme is necessary to metabolize phenylalanine to tyrosine. When PAH activity is reduced, phenylalanine accumulates and is converted into phenylpyruvate (also known as phenylketone), which is detected in the urine. Untreated children are normal at birth, but fail to attain early developmental milestones, develop microcephaly, and demonstrate progressive impairment of cerebral function. Hyperactivity, EEG abnormalities and seizures, and severe learning disabilities are major clinical problems later in life. A characteristic odor of skin, hair, sweat and urine (due to phenylacetate accumulation); and a tendency to hypopigmentation and eczema are also observed. All PKU patients must adhere to a special diet low in Phe. Accordingly, engineered proteins intended for use by PKU patients should comprise a low number or no Phe residues. This can be done by selecting reference secreted proteins that have few or no Phe residues. Alternatively, the reference secreted protein may contain one or more Phe residues and such Phe residues may be replaced by non-Phe residues in the engineered protein. In some embodiments Phe residues present in reference secreted protein sequences are replaced by non-Phe residues such as Tyr. In some embodiments the reference secreted protein and/or engineered protein comprises a ratio of Phe residues to total amino acid residues equal to or lower than 5%, 4%, 3%, 2%, or 1%. In some embodiments the reference secreted protein and/or engineered protein comprises 10 or fewer Phe residues, 9 or fewer Phe residues, 8 or fewer Phe residues, 7 or fewer Phe residues, 6 or fewer Phe residues, 5 or fewer Phe residues, 4 or fewer Phe residues, 3 or fewer Phe residues, 2 or fewer Phe residues, 1 Phe residue, or no Phe residues.

[0249] Arginine is a conditionally nonessential amino acid, meaning most of the time it can be manufactured by the human body, and does not need to be obtained directly through the diet. Individuals who have poor nutrition, the elderly, or people with certain physical conditions (e.g., sepsis) may not produce sufficient amounts of arginine and therefore need to increase their intake of foods containing arginine. Arginine is believed to have beneficial health properties, including reducing healing time of injuries (particularly bone), and decreasing blood pressure, particularly high blood pressure during high risk pregnancies (pre-eclampsia). In addition, studies have shown that dietary supplementation with L-arginine is beneficial for enhancing the reproductive performance of pigs with naturally occurring intrauterine growth retardation, enhancing protein deposition and postnatal growth of milk-fed piglets, normalizing plasma glucose levels in streptozotocin-induced diabetic rats, reducing fat mass in obese Zucker diabetic fatty (ZDF) rats, and improving vascular function in diabetic rats. In some embodiments the engineered proteins disclosed herein comprise a ratio of Arginine residues to total amino acid residues in the engineered protein of equal to or greater than 3%, equal to or greater than 4%, equal to or greater than 5%, equal to or greater than 6%, equal to or greater than 7%, equal to or greater than 8%, equal to or greater than 9%, equal to or greater than 10%, equal to or greater than 11%, or equal to or greater than 12%.

[0250] Digestibility is a parameter relevant to the nutritive benefits and utility of engineered proteins. In some embodiments engineered proteins disclosed herein are screened to assess their digestibility. Digestibility of proteins can be assessed by any suitable method known in the art. In some embodiments the in vitro gastric and duodenal digestion assay using the physiologically relevant two-phase system described by Moreno et al. is used for this purpose. Moreno, et al., “Stability of the major allergen Brazil nut 2S albumin (Ber e 1) to physiologically relevant in vitro gastrointestinal digestion.” FEBS Journal, 341-352 (2005). Briefly, experimental proteins are sequentially exposed to a simulated gastric fluid (SGF) for 120 minutes and then transferred to a simulated duodenal fluid (SDF) to digest for an additional 120 minutes. Protein samples at different stages of the digestion (e.g., 2, 5, 15, 30, 60 and 120 min) are analyzed for digestion by sodium dodecyl sulfate polyacrylamide gel electrophoresis (SDS-PAGE). Each sample (20 μL) is added to 10 μL of ultrapure water and 10 μL of 4× NuPAGE LDS Sample buffer and heated at 95° C. for 10 min. The samples are loaded (10 μL) on a 15-lane 12% polyacrylamide NuPAGE Novex Bis-Tris gel and run for 35 min at 200 V then stained using SimplyBlue Safe Stain. The disappearance of protein over time indicates the rate at which the protein is digested in the assay. This assay can be used to assess comparative digestibility or to assess absolute digestibility. In some embodiments the digestibility of an engineered protein disclosed herein is higher (i.e., it digests to below the detection limit of the assay sooner) than whey protein. In some embodiments the engineered protein is not detectable in the assay by 2 minutes, 5 minutes, 15 minutes, 30 minutes, 60 minutes, or 120 minutes.

[0251] In some embodiments digestibility of an engineered protein is assessed by identification and quantification of digestive protease recognition sites in the protein amino acid sequence. In some embodiments the engineered protein comprises at least one protease recognition site selected from a pepsin recognition site, a trypsin recognition site, and a chymotrypsin recognition site. In some embodiments at least one amino acid mutation is made to the reference secreted protein amino acid sequence to add at least one protease recognition site to the engineered protein.

[0252] As used herein, a “pepsin recognition site” is any site in a polypeptide sequence that is experimentally shown to be cleaved by pepsin. In some embodiments it is a peptide bond after (i.e., downstream of) an amino acid residue selected from Phe, Trp, Tyr, Leu, Ala, Glu, and Gln, provided that the following residue is not an amino acid residue selected from Ala, Gly, and Val.

[0253] As used herein, a “trypsin recognition site” is any site in a polypeptide sequence that is experimentally shown to be cleaved by trypsin. In some embodiments it is a peptide bond after an amino acid residue selected from Lys or Arg, provided that the following residue is not a proline.

[0254] As used herein, a “chymotrypsin recognition site” is any site in a polypeptide sequence that is experimentally shown to be cleaved by chymotrypsin. In some embodiments it is a peptide bond after an amino acid residue selected from Phe, Trp, Tyr, and Leu.

[0255] Disulfide bonded cysteine residues in a protein tend to reduce the rate of digestion of the protein compared to what it would be in the absence of the disulfide bond. Accordingly, digestibility of a protein with fewer disulfide bonds tends to be higher than for a comparable protein with a greater number of disulfide bonds. Accordingly, in some embodiments an engineered protein disclosed herein is screened to identify the number of cysteine residues present and to allow selection of an engineered protein comprising a relatively low number of cysteine residues. In some embodiments at least one amino acid replacement is made to the reference secreted protein amino acid sequence to remove at least one protease recognition site in the engineered protein. In some embodiments the engineered protein comprises a ratio of Cys residues to total amino acid residues equal to or lower than 5%, 4%, 3%, 2%, or 1%. In some embodiments the engineered protein comprises 10 or fewer Cys residues, 9 or fewer Cys residues, 8 or fewer Cys residues, 7 or fewer Cys residues, 6 or fewer Cys residues, 5 or fewer Cys residues, 4 or fewer Cys residues, 3 or fewer Cys residues, 2 or fewer Cys residues, 1 Cys residue, or no Cys residues.

[0256] In some embodiments the engineered protein is soluble. Solubility can be measured by any method known in the art. In some embodiments solubility is examined by centrifuge concentration followed by protein concentration assays. Samples of proteins in 20 mM HEPES pH 7.5 are tested for protein concentration according to protocols using two methods, Coomassie Plus (Bradford) Protein Assay (Thermo Scientific) and Bicinchoninic Acid (BCA) Protein Assay (Sigma-Aldrich). Based on these measurements 10 mg of protein is added to an Amicon Ultra 3 kDa centrifugal filter (Millipore). Samples are concentrated by centrifugation at 10,000×g for 30 minutes. The final, now concentrated, samples are examined for precipitated protein and then tested for protein concentration as above using two methods, Bradford and BCA.

[0257] In some embodiments the engineered proteins have a final solubility limit of at least 5 g/L, 10 g/L, 20 g/L, 30 g/L, 40 g/L, 50 g/L, or 100 g/L at physiological pH. In some embodiments the engineered proteins are greater than 50%, greater than 60%, greater than 70%, greater than 80%, greater than 90%, greater than 95%, greater than 96%, greater than 97%, greater than 98%, greater than 99%, or greater than 99.5% soluble with no precipitated protein observed at a concentration of greater than 5 g/L, or 10 g/L, or 20 g/L, or 30 g/L, or 40 g/L, or 50 g/L, or 100 g/L at physiological pH. In some embodiments, the solubility of the engineered protein is higher than those typically reported in studies examining the solubility limits of whey (12.5 g/L; Pelegrine et al., Lebensm.-Wiss. U.-Technol. 38 (2005) 77-80) and soy (10 g/L; Lee et al., JAOCS 80(1) (2003) 85-90).

[0258] In some embodiments, the engineered protein exhibits enhanced stability. As used herein, a “stable” protein is one that resists changes (e.g., unfolding, oxidation, aggregation, hydrolysis, etc.) that alter the biophysical (e.g., solubility), biological (e.g., digestibility), or compositional (e.g. proportion of Leucine amino acids) traits of the protein of interest.

[0259] Protein stability can be measured using various assays known in the art and engineered proteins disclosed herein may have a stability above a threshold. In some embodiments a protein is selected that displays thermal stability that is comparable to or better than that of whey protein. In some embodiments the stability of engineered protein samples is determined by monitoring aggregation formation using size exclusion chromatography (SEC) after exposure to extreme temperatures. Samples of proteins to be tested are prepared at 10 g/L protein in water and mixed thoroughly. Protein solutions are placed in a heating block at 90° C. and samples are taken after 0, 1, 5, 10, 30 and 60 min for SEC analysis.

[0260] For example, SEC analysis can run on a Superdex 75 5/150 GL column (GE Healthcare) using an Agilent 1100 HPLC with a mobile phase of 20 mM Na₂PO₄ and 130 mM NaCl at pH 7. After heating, samples are diluted to 2 g/L for 10 μl injection onto the column. Protein is detected by monitoring absorbance at 214 nm, aggregates are characterized as peaks larger in size (eluting faster) than the protein of interest. No overall change in peak area indicates no precipitation of protein during the heat treatment. Whey protein rapidly forms approximately 80% aggregates when exposed to 90° C. in this assay. In some embodiments an engineered protein of this disclosure shows resistance to aggregation, exhibiting, for example, less than 80% aggregation, less than 10% aggregation, or no detectable aggregation.

[0261] For most embodiments it is preferred that the engineered protein not exhibit inappropriately high allergenicity. Accordingly, in some embodiments the potential allergenicy of the engineered protein is assessed. This can be done by any suitable method known in the art. In some embodiments an allergenicity score is calculated. The allergenicity score is a primary sequence based metric based on WHO recommendations (See, for example, www.fao.org/ag/agn/food/pdf/allergygm.pdf) for assessing how similar a protein is to any known allergen, the primary hypothesis being that high percent identity between a target and a known allergen is likely indicative of cross reactivity. For a given protein, the allergenicity score is found by examining all possible contiguous 80 amino acid fragments and locally aligning each fragment against a database of known allergen sequences using the FASTA algorithm with the BLOSUM50 substitution matrix, a gap open penalty of 10, and a gap extension penalty of 2. The highest percent identity of any 80 amino acid window with any allergen is taken as the final score for the protein of interest. The WHO guidelines suggest using a 35% identity cutoff. In some embodiments the engineered protein has an allergenicity score less than 35%. In some embodiments a cutoff of less than 35% identity is used. In some embodiments a cutoff of from 30% to 35% identity is used. In some embodiments a cutoff of from 25% to 30% identity is used. In some embodiments a cutoff of from 20% to 25% identity is used. In some embodiments a cutoff of from 15% to 20% identity is used. In some embodiments a cutoff of from 10% to 15% identity is used. In some embodiments a cutoff of from 5% to 10% identity is used. In some embodiments a cutoff of from 0% to 5% identity is used. In some embodiments a cutoff of greater than 35% identity is used. In some embodiments a cutoff of from 35% to 40% identity is used. In some embodiments a cutoff of from 40% to 45% identity is used. In some embodiments a cutoff of from 45% to 50% identity is used. In some embodiments a cutoff of from 50% to 55% identity is used. In some embodiments a cutoff of from 55% to 60% identity is used. In some embodiments a cutoff of from 65% to 70% identity is used. In some embodiments a cutoff of from 70% to 75% identity is used. In some embodiments a cutoff of from 75% to 80% identity is used.

[0262] Skilled artisans are able to identify and use a suitable database of known allergens for this purpose. In some embodiments the database is made by selecting proteins from more than one database source. In some embodiments the custom database comprises pooled allergen lists collected by the Food Allergy Research and Resource Program (http://www.allergenonline.org/), UNIPROT annotations (http://www.uniprot.org/docs/allergen), and the Structural Database of Allergenic Proteins (SDAP, http://fermi.utmb.edu/SDAP/sdap_lnk.html). This database includes all currently recognized allergens by the International Union of Immunological Societies (IUIS, http://www.allergen.org/) as well as a large number of additional allergens not yet officially named.

[0263] In some embodiments all (or a selected subset) contiguous amino acid windows of different lengths (e.g., 70, 60, 50, 40, 30, 20, 10, 8 or 6 amino acid windows) of an engineered protein are tested against an allergen database and peptide sequences that have 100% identity, 95% or higher identity, 90% or higher identity, 85% or higher identity, 80% or higher identity, 75% or higher identity, 70% or higher identity, 65% or higher identity, 60% or higher identity, 55% or higher identity, or 50% or higher identity matches are identified for further examination of potential allergenicity.

[0264] One feature that can enhance the utility of a engineered protein is its charge (or per amino acid charge). Engineered proteins with higher charge can in some embodiments exhibit desirable characteristics such as increased solubility, increased stability, resistance to aggregation, and desirable taste profiles. For example, a charged engineered protein that exhibits enhanced solubility can be formulated into a beverage or liquid formulation that includes a high concentration of engineered protein in a relatively low volume of solution, thus delivering a large dose of protein nutrition per unit volume. A charged engineered protein that exhibits enhanced solubility can be useful in sports drinks or recovery drinks wherein a user (e.g., an athlete) wants to ingest protein before, during or after physical activity. A charged engineered protein that exhibits enhanced solubility can also be particularly useful in a clinical setting wherein a subject (e.g., a patient or an elderly person) is in need of protein nutrition but is unable to ingest solid foods or large volumes of liquids.

[0265] Certain free amino acids and mixtures of free amino acids are known to have a bitter or otherwise unpleasant taste. In addition, hydrolysates of common proteins (e.g., whey and soy) often have a bitter or unpleasant taste. In some embodiments, an engineered protein disclosed and described herein does not have a bitter or otherwise unpleasant taste. In some embodiments, an engineered protein disclosed and described herein has a more acceptable taste as compared to at least one of free amino acids, mixtures of free amino acids, and/or protein hydrolysates. In some embodiments, an engineered protein disclosed and described herein has a taste that is equal to or exceeds at least one of whey protein and whey protein hydrolysates.

[0266] Proteins are known to have tastes covering the five established taste modalities: sweet, sour, bitter, salty and umami. The taste of a particular protein (or its lack thereof) can be attributed to several factors, including the primary structure, the presence of charged side chains, and the electronic and conformational features of the protein. In some embodiments, an engineered protein disclosed and described herein is designed to have a desired taste (e.g., sweet, salty, umami) and/or not to have an undesired taste (e.g., bitter, sour). In this context “design” includes, for example, selecting naturally occurring proteins embodying features that achieve the desired taste property, as well as creating muteins of naturally-occurring proteins that have desired taste properties. For example, an engineered protein can be designed to interact with specific taste receptors, such as sweet receptors (T1R2-T1R3 heterodimer) or umami receptors (T1R1-T1R3 heterodimer, mGluR4, and/or mGluR1). Further, an engineered protein may be designed not to interact, or to have diminished interaction, with other taste receptors, such as bitter receptors (T2R receptors).

[0267] An engineered protein disclosed and described herein can also elicit different physical sensations in the mouth when ingested, sometimes referred to as “mouth feel”. The mouth feel of the engineered protein may be due to one or more factors including primary structure, the presence of charged side chains, and the electronic and conformational features of the protein. In some embodiments, an engineered protein elicits a buttery or fat-like mouth feel when ingested.

[0268] In some embodiments the engineered protein comprises from 20 to 5,000 amino acids, from 20-2,000 amino acids, from 20-1,000 amino acids, from 20-500 amino acids, from 20-250 amino acids, from 20-200 amino acids, from 20-150 amino acids, from 20-100 amino acids, from 20-40 amino acids, from 30-50 amino acids, from 40-60 amino acids, from 50-70 amino acids, from 60-80 amino acids, from 70-90 amino acids, from 80-100 amino acids, at least 25 amino acids, at least 30 amino acids, at least 35 amino acids, at least 40 amino acids, at least 2455 amino acids, at least 50 amino acids, at least 55 amino acids, at least 60 amino acids, at least 65 amino acids, at least 70 amino acids, at least 75 amino acids, at least 80 amino acids, at least 85 amino acids, at least 90 amino acids, at least 95 amino acids, at least 100 amino acids, at least 105 amino acids, at least 110 amino acids, at least 115 amino acids, at least 120 amino acids, at least 125 amino acids, at least 130 amino acids, at least 135 amino acids, at least 140 amino acids, at least 145 amino acids, at least 150 amino acids, at least 155 amino acids, at least 160 amino acids, at least 165 amino acids, at least 170 amino acids, at least 175 amino acids, at least 180 amino acids, at least 185 amino acids, at least 190 amino acids, at least 195 amino acids, at least 200 amino acids, at least 205 amino acids, at least 210 amino acids, at least 215 amino acids, at least 220 amino acids, at least 225 amino acids, at least 230 amino acids, at least 235 amino acids, at least 240 amino acids, at least 245 amino acids, or at least 250 amino acids. In some embodiments the engineered protein consists of from 20 to 5,000 amino acids, from 20-2,000 amino acids, from 20-1,000 amino acids, from 20-500 amino acids, from 20-250 amino acids, from 20-200 amino acids, from 20-150 amino acids, from 20-100 amino acids, from 20-40 amino acids, from 30-50 amino acids, from 40-60 amino acids, from 50-70 amino acids, from 60-80 amino acids, from 70-90 amino acids, from 80-100 amino acids, at least 25 amino acids, at least 30 amino acids, at least 35 amino acids, at least 40 amino acids, at least 2455 amino acids, at least 50 amino acids, at least 55 amino acids, at least 60 amino acids, at least 65 amino acids, at least 70 amino acids, at least 75 amino acids, at least 80 amino acids, at least 85 amino acids, at least 90 amino acids, at least 95 amino acids, at least 100 amino acids, at least 105 amino acids, at least 110 amino acids, at least 115 amino acids, at least 120 amino acids, at least 125 amino acids, at least 130 amino acids, at least 135 amino acids, at least 140 amino acids, at least 145 amino acids, at least 150 amino acids, at least 155 amino acids, at least 160 amino acids, at least 165 amino acids, at least 170 amino acids, at least 175 amino acids, at least 180 amino acids, at least 185 amino acids, at least 190 amino acids, at least 195 amino acids, at least 200 amino acids, at least 205 amino acids, at least 210 amino acids, at least 215 amino acids, at least 220 amino acids, at least 225 amino acids, at least 230 amino acids, at least 235 amino acids, at least 240 amino acids, at least 245 amino acids, or at least 250 amino acids.

[0269] 1. Methods of Identifying Reference Secreted Proteins

[0270] Without wishing to be bound by any theory, it is believed that modifying the amino acid sequence of reference secreted proteins to improve at least one nutritive feature of the protein is a useful way to make proteins with useful nutritive amino acid compositions. Because the reference secreted protein is naturally secreted by the organism it is possible, in some embodiments, to create proteins with useful nutritive content which are secreted using this approach. Secreted nutritive proteins may be particular useful in certain embodiments because secretion can aid in manufacture of engineered proteins in certain applications.

[0271] To this end, in some embodiments annotated databases of the proteins of organisms of interest are screened to identify those that are characterized as secreted. An alternative or additional method is to screen sequence information for the proteins of an organism of interest and identify those proteins that comprise a secretion leader sequence. An alternative or additional method is to obtain cDNAs encoding proteins of an organism of interest and to screen those cDNAs functionally to identify those that encode secreted proteins. The resulting set of proteins that are identified by one or more of these methods in or any equivalent method for an organism is teamed the secretome for that organism. In some embodiments any secreted protein is used as a reference secreted protein in the methods of this disclosure.

[0272] In some embodiments secreted proteins are screened to identify those that comprise structural domains and/or folds that have been used in previous studies to reengineer protein-protein binding interactions. The NCBI Conserved Domain Database (Marchler-Bauer A., and Bryant, S. H. “CD-Search: protein domain annotations on the fly”. Nuc. Acid. Res. (2004) 32: W327-W331) includes such protein domains. (Binz, K H, and Pluckthun, A. “Engineered proteins as specific binding reagents”. Curr. Op. Biotech. (2005) 16: 459-469; Gebauer, M. and Skerra, A. “Engineered protein scaffolds as next-generation antibody therapeutics”. Curr. Op. Chem. Biol. (2009) 13: 245-255; Lehtio, J., Teeri T. T., and Nygren P. A. “Alpha-Amylase Inhibitors Selected From a Combinatorial Library of a Cellulose Binding Domain Scaffold”. Proteins: Struct., Func., Gene., (2000) 41: 316-322; and Olson C A and Roberts R W. “Design, expression, and stability of a diverse protein library based on the human fibronectin type III domain”. Prot. Sci. (2007) 16: 476-484.) As such, the database can be used to identify protein scaffolds that are expected to contain a robust, stable fold with known variable positions or regions, wherein such variable positions or regions can be tailored to match a desired overall amino acid distribution. In some embodiments the naturally occurring protein comprising such a domain is used as a reference secreted protein. In some embodiments some or all of the remaining portions of the naturally occurring protein comprising such a domain is not included in an engineered protein comprising a derivative of the domain.

[0273] 2. Methods of Identifying Amino Acid Positions in Reference Secreted Proteins to Modify in Engineered Proteins

[0274] This disclosure identifies six factors that may be used to identify amino acid positions in a reference secreted protein for substitution by another amino acid, for example, positions where the amino acid in the reference secreted protein sequence are non-Leu for substitution with a Leu amino acid. The six factors are amino acid likelihood (AALike), amino acid type likelihood (AATLike), position entropy (Sₚₒₛ), amino acid type position entropy (S_{AATpos}), relative free energy of folding (ΔΔG_{fold}), and secondary structure identity (LoopID). These factors may be combined to identify amino acid positions for substitution using the following Formula 3.

((α)AALike+(β)AATLike+(γ)Spos+(δ)SAATpos+(ε)ΔΔGfold+(ζ)LoopID)/(α+β+γ+δ+ε+ζ) Formula 3:

[0275] In Formula 3, the coefficients α, β, γ, δ, ε, and ζ are scaling coefficients chosen by a skilled artisan that indicate the relative importance of each factor when rank ordering a set of positions in a secreted protein. In some embodiments 1, 2, 3, 4, or 5 of the coefficients are set to 0.

[0276] B. Nucleic Acids

[0277] Also provided herein are nucleic acids encoding engineered proteins disclosed herein. In some embodiments the nucleic acid is isolated. In some embodiments the nucleic acid is purified. In some embodiments the nucleic acid is synthetic.

[0278] In some embodiments the nucleic acid comprises the coding sequence for an engineered protein disclosed herein. In some embodiments the nucleic acid consists of the coding sequence for an engineered protein disclosed herein. In some embodiments the nucleic acid further comprises an expression control sequence operably linked to the coding sequence.

[0279] In some embodiments of the nucleic acid, the nucleic acid comprises a nucleic acid sequence that encodes an engineered protein disclosed in Section A above. In some embodiments of the nucleic acid, the nucleic acid consists of a nucleic acid sequence that encodes an engineered protein disclosed in Section A above.

[0280] In some embodiments the nucleic acid comprises at least 10 nucleotides, at least 20 nucleotides, at least 30 nucleotides, at least 40 nucleotides, at least 50 nucleotides, at least 60 nucleotides, at least 70 nucleotides, at least 80 nucleotides, at least 90 nucleotides, at least 100 nucleotides, at least 200 nucleotides, at least 300 nucleotides, at least 400 nucleotides, at least 500 nucleotides, at least 600 nucleotides, at least 700 nucleotides, at least 800 nucleotides, at least 900 nucleotides, at least 1,000 nucleotides. In some embodiments the nutritrive nucleic acid comprises from 10 to 100 nucleotides, from 20 to 100 nucleotides, from 10 to 50 nucleotides, or from 20 to 40 nucleotides. In some embodiments the nucleic acid comprises all or part of an open reading frame that encodes a nutritive polypeptide. In some embodiments the nucleic acid consists of an open reading frame that encodes a fragment of a naturally occurring protein, wherein the open reading frame does not encode the complete naturally occurring protein. In some embodiments the nucleic acid is a cDNA. In some embodiments nucleic acid molecules are provided that comprise a sequence that is at least 50%, 60%, 70%, 80%, 85%, 90%, 95%, 96%, 97%, 98%, 99%, or 99.9% identical to a naturally occurring nucleic acid. In some embodiments nucleic acids are provided that hybridize under stringent hybridization conditions with at least one reference nucleic acid.

[0281] C. Vectors

[0282] Also provided are vectors, including expression vectors, which comprise at least one of the nucleic acid molecules disclosed herein, as described further herein. In some embodiments, the vectors comprise at least one isolated nucleic acid molecule encoding an engineered protein as disclosed herein. In alternative embodiments, the vectors comprise such a nucleic acid molecule operably linked to one or more expression control sequence. The vectors can thus be used to express at least one recombinant protein in a recombinant microbial host cell.

[0283] Suitable vectors for expression of nucleic acids in microorganisms are well known to those of skill in the art. Suitable vectors for use in cyanobacteria are described, for example, in Heidorn et al., “Synthetic Biology in Cyanobacteria: Engineering and Analyzing Novel Functions,” Methods in Enzymology, Vol. 497, Ch. 24 (2011). Exemplary replicative vectors that can be used for engineering cyanobacteria as disclosed herein include pPMQAK1, pSL1211, pFC1, pSB2A, pSCR119/202, pSUN119/202, pRL2697, pRL25C, pRL1050, pSG111M, and pPBH201.

[0284] Other vectors such as pJB161 which are capable of receiving nucleic acid sequences disclosed herein may also be used. Vectors such as pJB161 comprise sequences which are homologous with sequences present in plasmids endogenous to certain photosynthetic microorganisms (e.g., plasmids pAQ1, pAQ3, and pAQ4 of certain Synechococcus species). Examples of such vectors and how to use them is known in the art and provided, for example, in Xu et al., “Expression of Genes in Cyanobacteria: Adaptation of Endogenous Plasmids as Platforms for High-Level Gene Expression in Synechococcus sp. PCC 7002,” Chapter 21 in Robert Carpentier (ed.), “Photosynthesis Research Protocols,” Methods in Molecular Biology, Vol. 684, 2011, which is hereby incorporated herein. Recombination between pJB161 and the endogenous plasmids in vivo yield engineered microbes expressing the genes of interest from their endogenous plasmids. Alternatively, vectors can be engineered to recombine with the host cell chromosome, or the vector can be engineered to replicate and express genes of interest independent of the host cell chromosome or any of the host cell's endogenous plasmids.

[0285] A further example of a vector suitable for recombinant protein production is the pET system (Novagen®). This system has been extensively characterized for use in E. coli and other microorganisms. In this system, target genes are cloned in pET plasmids under control of strong bacteriophage T7 transcription and (optionally) translation signals; expression is induced by providing a source of T7 RNA polymerase in the host cell. T7 RNA polymerase is so selective and active that, when fully induced, almost all of the microorganism's resources are converted to target gene expression; the desired product can comprise more than 50% of the total cell protein a few hours after induction. It is also possible to attenuate the expression level simply by lowering the concentration of inducer. Decreasing the expression level may enhance the soluble yield of some target proteins. In some embodiments this system also allows for maintenance of target genes in a transcriptionally silent un-induced state.

[0286] In some embodiments of using this system, target genes are cloned using hosts that do not contain the T7 RNA polymerase gene, thus alleviating potential problems related to plasmid instability due to the production of proteins potentially toxic to the host cell. Once established in a non-expression host, target protein expression may be initiated either by infecting the host with λCE6, a phage that carries the T7 RNA polymerase gene under the control of the λ pL and pI promoters, or by transferring the plasmid into an expression host containing a chromosomal copy of the T7 RNA polymerase gene under lacUV5 control. In the second case, expression is induced by the addition of IPTG or lactose to the bacterial culture or using an autoinduction medium. Other plasmids systems that are controlled by the lac operator, but do not require the T7 RNA polymerase gene and rely upon E. coli's native RNA polymerase include the pTrc plasmid suite (Invitrogen) or pQE plamid suite (QIAGEN).

[0287] In other embodiments it is possible to clone directly into expression hosts. Two types of T7 promoters and several hosts that differ in their stringency of suppressing basal expression levels are available, providing great flexibility and the ability to optimize the expression of a wide variety of target genes.

[0288] Promoters useful for expressing the recombinant genes described herein include both constitutive and inducible/repressible promoters. Examples of inducible/repressible promoters include nickel-inducible promoters (e.g., PnrsA, PnrsB; see, e.g., Lopez-Mauy et al., Cell (2002) v.43: 247-256) and urea repressible promoters such as PnirA (described in, e.g., Qi et al., Applied and Environmental Microbiology (2005) v.71: 5678-5684). Additional examples of inducible/repressible promoters include PnirA (promoter that drives expression of the nirA gene, induced by nitrate and repressed by urea) and Psuf (promoter that drives expression of the sufB gene, induced by iron stress).

[0289] Examples of constitutive promoters include Pcpc (promoter that drives expression of the cpc operon), Prbc (promoter that drives expression of rubisco), PpsbAII (promoter that drives expression of the D1 protein of photosystem II reaction center), Pcro (lambda phage promoter that drives expression of cro). In other embodiments, a PaphII and/or a laclq-Ptrc promoter can used to control expression. Where multiple recombinant genes are expressed in an engineered microorganism, the different genes can be controlled by different promoters or by identical promoters in separate operons, or the expression of two or more genes may be controlled by a single promoter as part of an operon.

[0290] Further non-limiting examples of inducible promoters include, but are not limited to, those induced by expression of an exogenous protein (e.g., T7 RNA polymerase, SP6 RNA polymerase), by the presence of a small molecule (e.g., IPTG, galactose, tetracycline, steroid hormone, abscisic acid), by absence or low concentration of small molecules (e.g., CO₂, iron, nitrogen), by metals or metal ions (e.g., copper, zinc, cadmium, nickel), and by environmental factors (e.g., heat, cold, stress, light, darkness), and by growth phase. In some embodiments, the inducible promoter is tightly regulated such that in the absence of induction, substantially no transcription is initiated through the promoter. In some embodiments, induction of the promoter does not substantially alter transcription through other promoters. Also, generally speaking, the compound or condition that induces an inducible promoter is not be naturally present in the organism or environment where expression is sought.

[0291] In some embodiments, the inducible promoter is induced by limitation of CO₂ supply to a cyanobacteria culture. By way of non-limiting example, the inducible promoter may be the promoter sequence of Synechocystis PCC 6803 that are up-regulated under the CO₂-limitation conditions, such as the cmp genes, ntp genes, ndh genes, sbt genes, chp genes, and rbc genes, or a variant or fragment thereof.

[0292] In some embodiments, the inducible promoter is induced by iron starvation or by entering the stationary growth phase. In some embodiments, the inducible promoter may be variant sequences of the promoter sequence of cyanobacterial genes that are up-regulated under Fe-starvation conditions such as isiA, or when the culture enters the stationary growth phase, such as isiA, phrA, sigC, sigB, and sigH genes, or a variant or fragment thereof.

[0293] In some embodiments, the inducible promoter is induced by a metal or metal ion. By way of non-limiting example, the inducible promoter may be induced by copper, zinc, cadmium, mercury, nickel, gold, silver, cobalt, and bismuth or ions thereof. In some embodiments, the inducible promoter is induced by nickel or a nickel ion. In some embodiments, the inducible promoter is induced by a nickel ion, such as Ni²⁺. In another exemplary embodiment, the inducible promoter is the nickel inducible promoter from Synechocystis PCC 6803. In another embodiment, the inducible promoter may be induced by copper or a copper ion. In yet another embodiment, the inducible promoter may be induced by zinc or a zinc ion. In still another embodiment, the inducible promoter may be induced by cadmium or a cadmium ion. In yet still another embodiment, the inducible promoter may be induced by mercury or a mercury ion. In an alternative embodiment, the inducible promoter may be induced by gold or a gold ion. In another alternative embodiment, the inducible promoter may be induced by silver or a silver ion. In yet another alternative embodiment, the inducible promoter may be induced by cobalt or a cobalt ion. In still another alternative embodiment, the inducible promoter may be induced by bismuth or a bismuth ion.

[0294] In some embodiments, the promoter is induced by exposing a cell comprising the inducible promoter to a metal or metal ion. The cell may be exposed to the metal or metal ion by adding the metal to the microbial growth media. In certain embodiments, the metal or metal ion added to the microbial growth media may be efficiently recovered from the media. In other embodiments, the metal or metal ion remaining in the media after recovery does not substantially impede downstream processing of the media or of the bacterial gene products.

[0295] Further non-limiting examples of constitutive promoters include constitutive promoters from Gram-negative bacteria or a bacteriophage propagating in a Gram-negative bacterium. For instance, promoters for genes encoding highly expressed Gram-negative gene products may be used, such as the promoter for Lpp, OmpA, rRNA, and ribosomal proteins. Alternatively, regulatable promoters may be used in a strain that lacks the regulatory protein for that promoter. For instance P_{lac}, P_{tac}, and P_{trc}, may be used as constitutive promoters in strains that lack Lac1. Similarly, P22 P_{R} and P_{L} may be used in strains that lack the lambda C2 repressor protein, and lambda P_{R} and P_{L} may be used in strains that lack the lambda C1 repressor protein. In one embodiment, the constitutive promoter is from a bacteriophage. In another embodiment, the constitutive promoter is from a Salmonella bacteriophage. In yet another embodiment, the constitutive promoter is from a cyanophage. In some embodiments, the constitutive promoter is a Synechocystis promoter. For instance, the constitutive promoter may be the PpsbAll promoter or its variant sequences, the Prbc promoter or its variant sequences, the P_{cpc} promoter or its variant sequences, and the PrnpB promoter or its variant sequences.

[0296] D. Host Microorganisms

[0297] Also provided are host cells transformed with the nucleic acid molecules or vectors disclosed herein, and descendants thereof. In some embodiments the host cells are microbial cells. In some embodiments, the host cells carry the nucleic acid sequences on vectors, which may but need not be freely replicating vectors. In other embodiments, the nucleic acids have been integrated into the genome of the host cells and/or into an endogenous plasmid of the host cells. The transformed host cells find use, e.g., in the production of recombinant engineered proteins disclosed herein.

[0298] In some embodiments the protein is an endogenous protein of the host cell used to express it. That is, the cellular genome of the host cell comprises an open reading frame that encodes the recombinant protein. In some embodiments regulatory sequences sufficient to increase expression of the protein are inserted into the host cell genome and operatively linked to the endogenous open reading frame such that the regulatory sequences drive overexpression of the recombinant protein from a recombinant nucleic acid. In some embodiments heterologous nucleic acid sequences are fused to the endogenous open reading frame of the protein and cause the protein to be synthesized comprising a heterologous amino acid sequence that changes the cellular trafficking of the recombinant protein, such as directing it to an organelle or to a secretion pathway. In some embodiments an open reading frame that encodes the endogeneous host cell protein is introduced into the host cell on a plasmid that further comprises regulatory sequences operatively linked to the open reading frame. In some embodiments the recombinant host cell expresses at least 2 times, at least 3 times, at least 4 times, at least 5 times, at least 10 times, or at least 20 times, at least 30 times, at least 40 times, at least 50 times, or at least 100 times more of the recombinant protein than the amount of the protein produced by a similar host cell grown under similar conditions.

[0299] “Microorganisms” includes prokaryotic and eukaryotic microbial species from the Domains Archaea, Bacteria and Eucarya, the latter including yeast and filamentous fungi, protozoa, algae, or higher Protista. The terms “microbial cells” and “microbes” are used interchangeably with the term microorganism.

[0300] A variety of host microorganisms can be transformed with a nucleic acid sequence disclosed herein and can in some embodiments produce a recombinant engineered protein disclosed herein. Suitable host microorganisms include both autotrophic and heterotrophic microbes. In some applications the autotrophic microorganisms allows for a reduction in the fossil fuel and/or electricity inputs required to make an engineered protein encoded by a recombinant nucleic acid sequence introduced into the host microorganism. This, in turn, in some applications reduces the cost and/or the environmental impact of producing the engineered protein and/or reduces the cost and/or the environmental impact in comparison to the cost and/or environmental impact of manufacturing alternative nutritive proteins, such as whey, egg, and soy. For example, the cost and/or environmental impact of making an engineered protein disclosed herein using a host microorganism as disclosed herein is in some embodiments lower that the cost and/or environmental impact of making whey protein in a form suitable for human consumption by processing of cow's milk.

[0301] Photoautotrophic microorganisms include eukaryotic algae, as well as prokaryotic cyanobacteria, green-sulfur bacteria, green non-sulfur bacteria, purple sulfur bacteria, and purple non-sulfur bacteria.

[0302] Extremophiles are also contemplated as suitable organisms. Such organisms withstand various environmental parameters such as temperature, radiation, pressure, gravity, vacuum, desiccation, salinity, pH, oxygen tension, and chemicals. They include hyperthermophiles, which grow at or above 80° C. such as Pyrolobus fumarii; thermophiles, which grow between 60-80° C. such as Synechococcus lividis; mesophiles, which grow between 15-60° C.; and psychrophiles, which grow at or below 15° C. such as Psychrobacter and some insects. Radiation tolerant organisms include Deinococcus radiodurans. Pressure-tolerant organisms include piezophiles, which tolerate pressure of 130 MPa. Weight-tolerant organisms include barophiles. Hypergravity (e.g., >1 g) hypogravity (e.g., <1 g) tolerant organisms are also contemplated. Vacuum tolerant organisms include tardigrades, insects, microbes and seeds. Dessicant tolerant and anhydrobiotic organisms include xerophiles such as Artemia salina; nematodes, microbes, fungi and lichens. Salt-tolerant organisms include halophiles (e.g., 2-5 M NaCl) Halobacteriacea and Dunaliella salina. pH-tolerant organisms include alkaliphiles such as Natronobacterium, Bacillus firmus OF4, Spirulina spp. (e.g., pH>9) and acidophiles such as Cyanidium caldarium, Ferroplasma sp. (e.g., low pH). Anaerobes, which cannot tolerate O₂ such as Methanococcus jannaschii; microaerophils, which tolerate some O₂ such as Clostridium and aerobes, which require O₂ are also contemplated. Gas-tolerant organisms, which tolerate pure CO₂ include Cyanidium caldarium and metal tolerant organisms include metalotolerants such as Ferroplasma acidarmanus (e.g., Cu, As, Cd, Zn), Ralstonia sp. CH34 (e.g., Zn, Co, Cd, Hg, Pb). Gross, Michael. Life on the Edge: Amazing Creatures Thriving in Extreme Environments. New York: Plenum (1998) and Seckbach, J. “Search for Life in the Universe with Terrestrial Microbes Which Thrive Under Extreme Conditions.” In Cristiano Batalli Cosmovici, Stuart Bowyer, and Dan Wertheimer, eds., Astronomical and Biochemical Origins and the Search for Life in the Universe, p. 511. Milan: Editrice Compositori (1997).

[0303] Algae and cyanobacteria include but are not limited to the following genera: Acanthoceras, Acanthococcus, Acaryochloris, Achnanthes, Achnanthidium, Actinastrum, Actinochloris, Actinocyclus, Actinotaenium, Amphichrysis, Amphidinium, Amphikrikos, Amphipleura, Amphiprora, Amphithrix, Amphora, Anabaena, Anabaenopsis, Aneumastus, Ankistrodesmus, Ankyra, Anomoeoneis, Apatococcus, Aphanizomenon, Aphanocapsa, Aphanochaete, Aphanothece, Apiocystis, Apistonema, Arthrodesmus, Artherospira, Ascochloris, Asterionella, Asterococcus, Audouinella, Aulacoseira, Bacillaria, Balbiania, Bambusina, Bangia, Basichlamys, Batrachospermum, Binuclearia, Bitrichia, Blidingia, Botrdiopsis, Botrydium, Botryococcus, Botryosphaerella, Brachiomonas, Brachysira, Brachytrichia, Brebissonia, Bulbochaete, Bumilleria, Bumilleriopsis, Caloneis, Calothrix, Campylodiscus, Capsosiphon, Carteria, Catena, Cavinula, Centritractus, Centronella, Ceratium, Chaetoceros, Chaetochloris, Chaetomorpha, Chaetonella, Chaetonema, Chaetopeltis, Chaetophora, Chaetosphaeridium, Chamaesiphon, Chara, Characiochloris, Characiopsis, Characium, Charales, Chilomonas, Chlainomonas, Chlamydoblepharis, Chlamydocapsa, Chlamydomonas, Chlamydomonopsis, Chlamydomyxa, Chlamydonephris, Chlorangiella, Chlorangiopsis, Chlorella, Chlorobotrys, Chlorobrachis, Chlorochytrium, Chlorococcum, Chlorogloea, Chlorogloeopsis, Chlorogonium, Chlorolobion, Chloromonas, Chlorophysema, Chlorophyta, Chlorosaccus, Chlorosarcina, Choricystis, Chromophyton, Chromulina, Chroococcidiopsis, Chroococcus, Chroodactylon, Chroomonas, Chroothece, Chrysamoeba, Chrysapsis, Chrysidiastrum, Chrysocapsa, Chrysocapsella, Chrysochaete, Chrysochromulina, Chrysococcus, Chrysocrinus, Chrysolepidomonas, Chrysolykos, Chrysonebula, Chrysophyta, Chrysopyxis, Chrysosaccus, Chrysophaerella, Chrysostephanosphaera, Clodophora, Clastidium, Closteriopsis, Closterium, Coccomyxa, Cocconeis, Coelastrella, Coelastrum, Coelosphaerium, Coenochloris, Coenococcus, Coenocystis, Colacium, Coleochaete, Collodictyon, Compsogonopsis, Compsopogon, Conjugatophyta, Conochaete, Coronastrum, Cosmarium, Cosmioneis, Cosmocladium, Crateriportula, Craticula, Crinalium, Crucigenia, Crucigeniella, Cryptoaulax, Cryptomonas, Cryptophyta, Ctenophora, Cyanodictyon, Cyanonephron, Cyanophora, Cyanophyta, Cyanothece, Cyanothomonas, Cyclonexis, Cyclostephanos, Cyclotella, Cylindrocapsa, Cylindrocystis, Cylindrospermum, Cylindrotheca, Cymatopleura, Cymbella, Cymbellonitzschia, Cystodinium Dactylococcopsis, Debarya, Denticula, Dermatochrysis, Dermocarpa, Dermocarpella, Desmatractum, Desmidium, Desmococcus, Desmonema, Desmosiphon, Diacanthos, Diacronema, Diadesmis, Diatoma, Diatomella, Dicellula, Dichothrix, Dichotomococcus, Dicranochaete, Dictyochloris, Dictyococcus, Dictyosphaerium, Didymocystis, Didymogenes, Didymosphenia, Dilabifilum, Dimorphococcus, Dinobryon, Dinococcus, Diplochloris, Diploneis, Diplostauron, Distrionella, Docidium, Draparnaldia, Dunaliella, Dysmorphococcus, Ecballocystis, Elakatothrix, Ellerbeckia, Encyonema, Enteromorpha, Entocladia, Entomoneis, Entophysalis, Epichrysis, Epipyxis, Epithemia, Eremosphaera, Euastropsis, Euastrum, Eucapsis, Eucocconeis, Eudorina, Euglena, Euglenophyta, Eunotia, Eustigmatophyta, Eutreptia, Fallacia, Fischerella, Fragilaria, Fragilariforma, Franceia, Frustulia, Curcilla, Geminella, Genicularia, Glaucocystis, Glaucophyta, Glenodiniopsis, Glenodinium, Gloeocapsa, Gloeochaete, Gloeochrysis, Gloeococcus, Gloeocystis, Gloeodendron, Gloeomonas, Gloeoplax, Gloeothece, Gloeotila, Gloeotrichia, Gloiodictyon, Golenkinia, Golenkiniopsis, Gomontia, Gomphocymbella, Gomphonema, Gomphosphaeria, Gonatozygon, Gongrosia, Gongrosira, Goniochloris, Gonium, Gonyostomum, Granulochloris, Granulocystopsis, Groenbladia, Gymnodinium, Gymnozyga, Gyrosigma, Haematococcus, Hafniomonas, Hallassia, Hammatoidea, Hannaea, Hantzschia, Hapalosiphon, Haplotaenium, Haptophyta, Haslea, Hemidinium, Hemitoma, Heribaudiella, Heteromastix, Heterothrix, Hibberdia, Hildenbrandia, Hillea, Holopedium, Homoeothrix, Hormanthonema, Hormotila, Hyalobrachion, Hyalocardium, Hyalodiscus, Hyalogonium, Hyalotheca, Hydrianum, Hydrococcus, Hydrocoleum, Hydrocoryne, Hydrodictyon, Hydrosera, Hydrurus, Hyella, Hymenomonas, Isthmochloron, Johannesbaptistia, Juranyiella, Karayevia, Kathablepharis, Katodinium, Kephyrion, Keratococcus, Kirchneriella, Klebsormidium, Kolbesia, Koliella, Komarekia, Korshikoviella, Kraskella, Lagerheimia, Lagynion, Lamprothamnium, Lemanea, Lepocinclis, Leptosira, Lobococcus, Lobocystis, Lobomonas, Luticola, Lyngbya, Malleochloris, Mallomonas, Mantoniella, Marssoniella, Martyana, Mastigocoleus, Gastogloia, Melosira, Merismopedia, Mesostigma, Mesotaenium, Micractinium, Micrasterias, Microchaete, Microcoleus, Microcystis, Microglena, Micromonas, Microspora, Microthamnion, Mischococcus, Monochrysis, Monodus, Monomastix, Monoraphidium, Monostroma, Mougeotia, Mougeotiopsis, Myochloris, Myromecia, Myxosarcina, Naegeliella, Nannochloris, Nautococcus, Navicula, Neglectella, Neidium, Nephroclamys, Nephrocytium, Nephrodiella, Nephroselmis, Netrium, Nitella, Nitellopsis, Nitzschia, Nodularia, Nostoc, Ochromonas, Oedogonium, Oligochaetophora, Onychonema, Oocardium, Oocystis, Opephora, Ophiocytium, Orthoseira, Oscillatoria, Oxyneis, Pachycladella, Palmella, Palmodictyon, Pnadorina, Pannus, Paralia, Pascherina, Paulschulzia, Pediastrum, Pedinella, Pedinomonas, Pedinopera, Pelagodictyon, Penium, Peranema, Peridiniopsis, Peridinium, Peronia, Petroneis, Phacotus, Phacus, Phaeaster, Phaeodermatium, Phaeophyta, Phaeosphaera, Phaeothamnion, Phormidium, Phycopeltis, Phyllariochloris, Phyllocardium, Phyllomitas, Pinnularia, Pitophora, Placoneis, Planctonema, Planktosphaeria, Planothidium, Plectonema, Pleodorina, Pleurastrum, Pleurocapsa, Pleurocladia, Pleurodiscus, Pleurosigma, Pleurosira, Pleurotaenium, Pocillomonas, Podohedra, Polyblepharides, Polychaetophora, Polyedriella, Polyedriopsis, Polygoniochloris, Polyepidomonas, Polytaenia, Polytoma, Polytomella, Porphyridium, Posteriochromonas, Prasinochloris, Prasinocladus, Prasinophyta, Prasiola, Prochlorphyta, Prochlorothrix, Protoderma, Protosiphon, Provasoliella, Prymnesium, Psammodictyon, Psammothidium, Pseudanabaena, Pseudenoclonium, Psuedocarteria, Pseudochate, Pseudocharacium, Pseudococcomyxa, Pseudodictyosphaerium, Pseudokephyrion, Pseudoncobyrsa, Pseudoquadrigula, Pseudosphaerocystis, Pseudostaurastrum, Pseudostaurosira, Pseudotetrastrum, Pteromonas, Punctastruata, Pyramichlamys, Pyramimonas, Pyrrophyta, Quadrichloris, Quadricoccus, Quadrigula, Radiococcus, Radiofilum, Raphidiopsis, Raphidocelis, Raphidonema, Raphidophyta, Peimeria, Rhabdoderma, Rhabdomonas, Rhizoclonium, Rhodomonas, Rhodophyta, Rhoicosphenia, Rhopalodia, Rivularia, Rosenvingiella, Rossithidium, Roya, Scenedesmus, Scherffelia, Schizochlamydella, Schizochlamys, Schizomeris, Schizothrix, Schroederia, Scolioneis, Scotiella, Scotiellopsis, Scourfieldia, Scytonema, Selenastrum, Selenochloris, Sellaphora, Semiorbis, Siderocelis, Diderocystopsis, Dimonsenia, Siphononema, Sirocladium, Sirogonium, Skeletonema, Sorastrum, Spennatozopsis, Sphaerellocystis, Sphaerellopsis, Sphaerodinium, Sphaeroplea, Sphaerozosma, Spiniferomonas, Spirogyra, Spirotaenia, Spirulina, Spondylomorum, Spondylosium, Sporotetras, Spumella, Staurastrum, Stauerodesmus, Stauroneis, Staurosira, Staurosirella, Stenopterobia, Stephanocostis, Stephanodiscus, Stephanoporos, Stephanosphaera, Stichococcus, Stichogloea, Stigeoclonium, Stigonema, Stipitococcus, Stokesiella, Strombomonas, Stylochrysalis, Stylodinium, Styloyxis, Stylosphaeridium, Surirella, Sykidion, Symploca, Synechococcus, Synechocystis, Synedra, Synochromonas, Synura, Tabellaria, Tabularia, Teilingia, Temnogametum, Tetmemorus, Tetrachlorella, Tetracyclus, Tetradesmus, Tetraedriella, Tetraedron, Tetraselmis, Tetraspora, Tetrastrum, Thalassiosira, Thamniochaete, Thorakochloris, Thorea, Tolypella, Tolypothrix, Trachelomonas, Trachydiscus, Trebouxia, Trentepholia, Treubaria, Tribonema, Trichodesmium, Trichodiscus, Trochiscia, Tryblionella, Ulothrix, Uroglena, Uronema, Urosolenia, Urospora, Uva, Vacuolaria, Vaucheria, Volvox, Volvulina, Westella, Woloszynskia, Xanthidium, Xanthophyta, Xenococcus, Zygnema, Zygnemopsis, and Zygonium.

[0304] Additional cyanobacteria include members of the genus Chamaesiphon, Chroococcus, Cyanobacterium, Cyanobium, Cyanothece, Dactylococcopsis, Gloeobacter, Gloeocapsa, Gloeothece, Microcystis, Prochlorococcus, Prochloron, Synechococcus, Synechocystis, Cyanocystis, Dermocarpella, Stanieria, Xenococcus, Chroococcidiopsis, Myxosarcina, Arthrospira, Borzia, Crinalium, Geitlerinemia, Leptolyngbya, Limnothrix, Lyngbya, Microcoleus, Oscillatoria, Planktothrix, Prochiorothrix, Pseudanabaena, Spirulina, Starria, Symploca, Trichodesmium, Tychonema, Anabaena, Anabaenopsis, Aphanizomenon, Cyanospira, Cylindrospermopsis, Cylindrospermum, Nodularia, Nostoc, Scylonema, Calothrix, Rivularia, Tolypothrix, Chlorogloeopsis, Fischerella, Geitieria, Iyengariella, Nostochopsis, Stigonema and Thermosynechococcus.

[0305] Green non-sulfur bacteria include but are not limited to the following genera: Chloroflexus, Chloronema, Oscillochloris, Heliothrix, Herpetosiphon, Roseiflexus, and Thermomicrobium.

[0306] Green sulfur bacteria include but are not limited to the following genera: Chlorobium, Clathrochloris, and Prosthecochloris.

[0307] Purple sulfur bacteria include but are not limited to the following genera: Allochromatium, Chromatium, Halochromatium, Isochromatium, Marichromatium, Rhodovulum, Thermochromatium, Thiocapsa, Thiorhodococcus, and Thiocystis.

[0308] Purple non-sulfur bacteria include but are not limited to the following genera: Phaeospirillum, Rhodobaca, Rhodobacter, Rhodomicrobium, Rhodopila, Rhodopseudomonas, Rhodothalassium, Rhodospirillum, Rodovibrio, and Roseospira.

[0309] Aerobic chemolithotrophic bacteria include but are not limited to nitrifying bacteria such as Nitrobacteraceae sp., Nitrobacter sp., Nitrospina sp., Nitrococcus sp., Nitrospira sp., Nitrosomonas sp., Nitrosococcus sp., Nitrosospira sp., Nitrosolobus sp., Nitrosovibrio sp.; colorless sulfur bacteria such as, Thiovulum sp., Thiobacillus sp., Thiomicrospira sp., Thiosphaera sp., Thermothrix sp.; obligately chemolithotrophic hydrogen bacteria such as Hydrogenobacter sp., iron and manganese-oxidizing and/or depositing bacteria such as Siderococcus sp., and magnetotactic bacteria such as Aquaspirillum sp.

[0310] Archaeobacteria include but are not limited to methanogenic archaeobacteria such as Methanobacterium sp., Methanobrevibacter sp., Methanothermus sp., Methanococcus sp., Methanomicrobium sp., Methanospirillum sp., Methanogenium sp., Methanosarcina sp., Methanolobus sp., Methanothrix sp., Methanococcoides sp., Methanoplanus sp.; extremely thermophilic S-Metabolizers such as Thermoproteus sp., Pyrodictium sp., Sulfolobus sp., Acidianus sp. and other microorganisms such as, Bacillus subtilis, Saccharomyces cerevisiae, Streptomyces sp., Ralstonia sp., Rhodococcus sp., Corynebacteria sp., Brevibacteria sp., Mycobacteria sp., and oleaginous yeast.

[0311] Yet other suitable organisms include synthetic cells or cells produced by synthetic genomes as described in Venter et al. US Pat. Pub. No. 2007/0264688, and cell-like systems or synthetic cells as described in Glass et al. US Pat. Pub. No. 2007/0269862.

[0312] Still other suitable organisms include Escherichia coli, Acetobacter aceti, Bacillus subtilis, yeast and fungi such as Clostridium ljungdahlii, Clostridium thermocellum, Penicillium chrysogenum, Pichia pastoris, Saccharomyces cerevisiae, Schizosaccharomyces pombe, Pseudomonas fluorescens, or Zymomonas mobilis. In some embodiments those organisms are engineered to fix carbon dioxide while in other embodiments they are not.

[0313] E. Production of Recombinant Engineered Proteins

[0314] Skilled artisans are aware of many suitable methods available for culturing recombinant cells to produce (and optionally secrete) a recombinant engineered protein as disclosed herein, as well as for purification and/or isolation of expressed engineered proteins. The methods chosen for protein purification depend on many variables, including the properties of the protein of interest, its location and form within the cell, the vector, host strain background, and the intended application for the expressed protein. Culture conditions can also have an effect on solubility and localization of a given target protein. Many approaches can be used to purify target proteins expressed in recombinant microbial cells as disclosed herein, including without limitation ion exchange and gel filtration.

[0315] It is generally recognized that nearly all secreted bacterial proteins, and those proteins from other unicellular hosts, are synthesized as pre-proteins that contain N-terminal sequences known as signal peptides. These signal peptides influence the final destination of the protein and the mechanisms by which they are transported. Most signal peptides can be placed into one of four groups based on their translocation mechanism (e.g., Sec- or Tat-mediated) and the type of signal peptidase used to cleave the signal peptide from the preprotein. Also provided are N-terminal signal peptides containing a lipoprotein signal peptide. Although proteins carrying this type of signal are transported via the Sec translocase, their peptide signals tend to be shorter than normal Sec-signals and they contain a distinct sequence motif in the C-domain known as the lipo box (L(AS)(GA)C) at the −3 to +1 position. The cysteine at the +1 position is lipid modified following translocation whereupon the signal sequence is cleaved by a type II signal peptidase. Also provided are type IV or prepilin signal peptides, wherein type IV peptidase cleavage domains are localized between the N- and H-domain rather than in the C-domain common in other signal peptides.

[0316] As provided herein, the signal peptides can be attached to a heterologous polypeptide sequence (i.e., different than the protein the signal peptide is derived or obtained from) containing a nutritive polypeptide, in order to generate a recombinant nutritive polypeptide sequence. Alternatively, if a nutritive polypeptide is naturally secreted in the host organism, it can be sufficient to use the native signal sequence or a variety of signal sequences that directs secretion. In some embodiments of the nutritive polypeptides, the heterologous nutritive polypeptide sequence attached to the carboxyl terminus of the signal peptide is a naturally occurring eukaryotic protein, a mutein or derivative thereof, or a polypeptide nutritional domain. In other embodiments of the polypeptide, the heterologous nutritive polypeptide sequence attached to the carboxyl terminus of the signal peptide is a naturally occurring intracellular protein, a mutein or derivative thereof, or a polypeptide nutritional domain.

[0317] Purification of Nutritive Polypeptides.

[0318] Also provided are methods for recovering the secreted nutritive polypeptide from the culture medium. In some embodiments the secreted nutritive polypeptide is recovered from the culture medium during the exponential growth phase or after the exponential growth phase (e.g., in pre-stationary phase or stationary phase). In some embodiments the secreted nutritive polypeptide is recovered from the culture medium during the stationary phase. In some embodiments the secreted nutritive polypeptide is recovered from the culture medium at a first time point, the culture is continued under conditions sufficient for production and secretion of the recombinant nutritive polypeptide by the microorganism, and the recombinant nutritive polypeptide is recovered from the culture medium at a second time point. In some embodiments the secreted nutritive polypeptide is recovered from the culture medium by a continuous process. In some embodiments the secreted nutritive polypeptide is recovered from the culture medium by a batch process. In some embodiments the secreted nutritive polypeptide is recovered from the culture medium by a semi-continuous process. In some embodiments the secreted nutritive polypeptide is recovered from the culture medium by a fed-batch process. Those skilled in the art are aware of many suitable methods available for culturing recombinant cells to produce (and optionally secrete) a recombinant nutritive polypeptide as disclosed herein, as well as for purification and/or isolation of expressed recombinant polypeptides. The methods chosen for polypeptide purification depend on many variables, including the properties of the polypeptide of interest. Various methods of purification are known in the art including diafilitration, precipitation, and chromatography.

[0319] In some embodiments a peptide fusion tag is added to the recombinant protein making possible a variety of affinity purification methods that take advantage of the peptide fusion tag. In some embodiments, the use of an affinity method enables the purification of the target protein to near homogeneity in one step. Purification may include cleavage of part or all of the fusion tag with enterokinase, factor Xa, thrombin, or HRV 3C proteases, for example. In some embodiments, before purification or activity measurements of an expressed target protein, preliminary analysis of expression levels, cellular localization, and solubility of the target protein is performed. The target protein may be found in any or all of the following fractions: soluble or insoluble cytoplasmic fractions, periplasm, or medium. Depending on the intended application, preferential localization to inclusion bodies, medium, or the periplasmic space can be advantageous, in some embodiments, for rapid purification by relatively simple procedures.

[0320] While Escherichia coli is widely regarded as a robust host for heterologous protein expression, it is also widely known that over-expression of many proteins in this host is prone to aggregation in the form of insoluble inclusion bodies. One of the most commonly used methods for either rescuing inclusion body formation, or to improve the titer of the protein itself, is to include an amino-terminal maltose-binding protein (MBP) [Austin B P, Nallamsetty S, Waugh D S. Hexahistidine-tagged (SEQ ID NO: 22138) maltose-binding protein as a fusion partner for the production of soluble recombinant proteins in Escherichia coli. Methods Mol Biol. 2009; 498:157-72], or small ubiquitin-related modifier (SUMO) [Saitoh H, Uwada J, Azusa K. Strategies for the expression of SUMO-modified target proteins in Escherichia coli. Methods Mol Biol. 2009; 497:211-21; Malakhov M P, Mattern M R, Malakhova O A, Drinker M, Weeks S D, Butt T R. SUMO fusions and SUMO-specific protease for efficient expression and purification of proteins. J Struct Funct Genomics. 2004; 5(1-2):75-86; Panavas T, Sanders C, Butt T R. SUMO fusion technology for enhanced protein production in prokaryotic and eukaryotic expression systems. Methods Mol Biol. 2009; 497:303-17] fusion to the protein of interest. These two proteins are expressed extremely well, and in the soluble form, in Escherichia coli such that the protein of interest is also effectively produced in the soluble form. The protein of interest can be cleaved by designing a site specific protease recognition sequence (such as the tobacco etch virus (TEV) protease) in-between the protein of interest and the fusion protein [1].

[0321] In some embodiments the recombinant engineered protein is initially not folded correctly or is insoluble. A variety of methods are well known for refolding of insoluble proteins. Most protocols comprise the isolation of insoluble inclusion bodies by centrifugation followed by solubilization under denaturing conditions. The protein is then dialyzed or diluted into a non-denaturing buffer where refolding occurs. Because every protein possesses unique folding properties, the preferred refolding protocol for any given protein can be empirically determined by a skilled artisan. Preferred refolding conditions can, for example, be rapidly determined on a small scale by a matrix approach, in which variables such as protein concentration, reducing agent, redox treatment, divalent cations, etc., are tested. Once the preferred concentrations are found, they can be applied to a larger scale solubilization and refolding of the target protein.

[0322] In some embodiments a CAPS buffer at alkaline pH in combination with N-lauroylsarcosine is used to achieve solubility of the inclusion bodies, followed by dialysis in the presence of DTT to promote refolding. Depending on the target protein, expression conditions, and intended application, proteins solubilized from washed inclusion bodies may be >90% homogeneous and may not require further purification. Purification under fully denaturing conditions (before refolding) is possible using His•Tag® fusion proteins and His•Bind® immobilized metal affinity chromatography (Novogen®). In addition, S•TagTm, T7•Tag®, and Strep•Tag® II fusion proteins solubilized from inclusion bodies using 6 M urea can be purified under partially denaturing conditions by dilution to 2 M urea (S•Tag and T7•Tag) or 1 M urea (Strep•Tag II) prior to chromatography on the appropriate resin. Refolded fusion proteins can be affinity purified under native conditions using His•Tag, S•Tag, Strep•Tag II, and other appropriate affinity tags (e.g., GST•Tag™, and T7•Tag) (Novogen®).

[0323] In some embodiments proteins of this disclosure are synthsized chemically without the use of a recombinant production system. Protein synthesis can be carried out in a liquid-phase system or in a solid-phase system using techniques known in the art (see, e.g., Atherton, E., Sheppard, R. C. (1989). Solid Phase peptide synthesis: a practical approach. Oxford, England: IRL Press; Stewart, J. M., Young, J. D. (1984). Solid phase peptide synthesis (2nd ed.). Rockford: Pierce Chemical Company. Peptide chemistry and synthetic methods are well known in the art and a protein of this disclosure can be made using any method known in the art. A non-limiting example of such a method is the synthesis of a resin-bound peptide (including methods for de-protection of amino acids, methods for cleaving the peptide from the resin, and for its purification). For example, Fmoc-protected amino acid derivatives that can be used to synthesize the peptides are the standard recommended: Fmoc-Ala-OH, Fmoc-Arg(Pbf)-OH, Fmoc-Asn(Trt)-OH, Fmoc-Asp(OtBu)-OH, Fmoc-Cys(Trt)-OH, Fmoc-Gln(Trt)-OH, Fmoc-Glu(OtBu)-OH, Fmoc-Gly-OH, Fmoc-His(Trt)-OH, Fmoc-Ile-OH, Fmoc-Leu-OH, Fmoc-Lys(BOC)-OH, Fmoc-Met-OH, Fmoc-Phe-OH, Fmoc-Pro-OH, Fmoc-Ser(tBu)-OH, Fmoc-Thr(tBu)-OH, Fmoc-Trp(BOC)-OH, Fmoc-Tyr(tBu)-OH and Fmoc-Val-OH (supplied from, e.g., Anaspec, Bachem, Iris Biotech, or NovabioChem). Resin bound peptide synthesis is performed, for example, using Fmoc based chemistry on a Prelude Solid Phase Peptide Synthesizer from Protein Technologies (Tucson, Ariz. 85714 U.S.A.). A suitable resin for the preparation of C-terminal carboxylic acids is a pre-loaded, low-load Wang resin available from NovabioChem (e.g. low load fmoc-Thr(tBu)-Wang resin, LL, 0.27 mmol/g). A suitable resin for the synthesis of peptides with a C-terminal amide is PAL-ChemMatrix resin available from Matrix-Innovation. The N-terminal alpha amino group is protected with Boc. Fmoc-deprotection can be achieved with 20% piperidine in NMP for 2×3 min. The coupling chemistry is DIC/HOAt/collidine in NMP. Amino acid/HOAt solutions (0.3 M/0.3 M in NMP at a molar excess of 3-10 fold) are added to the resin followed by the same molar equivalent of DIC (3 M in NMP) followed by collidine (3 M in NMP). For example, the following amounts of 0.3 M amino acid/HOAt solution are used per coupling for the following scale reactions: Scale/ml, 0.05 mmol/1.5 mL, 0.10 mmol/3.0 mL, 0.25 mmol/7.5 mL. Coupling time is either 2×30 min or 1×240 min. After synthesis the resin is washed with DCM, and the peptide is cleaved from the resin by a 2-3 hour treatment with TFA/TIS/water (95/2.5/2.5) followed by precipitation with diethylether. The precipitate is washed with diethylether. The crude peptide is dissolved in a suitable mixture of water and MeCN such as water/MeCN (4:1) and purified by reversed-phase preparative HPLC (Waters Deltaprep 4000 or Gilson) on a column containing C18-silica gel. Elution is performed with an increasing gradient of MeCN in water containing 0.1% TFA. Relevant fractions are checked by analytical HPLC or UPLC. Fractions containing the pure target peptide are mixed and concentrated under reduced pressure. The resulting solution is analyzed (HPLC, LCMS) and the product is quantified using a chemiluminescent nitrogen specific HPLC detector (Antek 8060 HPLC-CLND) or by measuring UV-absorption at 280 nm. The product is dispensed into glass vials. The vials are capped with Millipore glassfibre prefilters. Freeze-drying affords the peptide trifluoroacetate as a white solid. The resulting peptides can be detected and characterized using LCMS and/or UPLC, for example, using standard methods known in the art. LCMS can be performed on a setup consisting of Waters Acquity UPLC system and LCT Premier XE mass spectrometer from Micromass. The UPLC pump is connected to two eluent reservoirs containing: A) 0.1% Formic acid in water; and B) 0.1% Formic acid in acetonitrile. The analysis is performed at RT by injecting an appropriate volume of the sample (preferably 2-100 onto the column which is eluted with a gradient of A and B. The UPLC conditions, detector settings and mass spectrometer settings are: Column: Waters Acquity UPLC BEH, C-18, 1.7 μm, 2.1 mm×50 mm. Gradient: Linear 5%-95% acetonitrile during 4.0 min (alternatively 8.0 min) at 0.4 ml/min. Detection: 214 nm (analogue output from TUV (Tunable UV detector)). MS ionisation mode: API-ES Scan: 100-2000 amu (alternatively 500-2000 amu), step 0.1 amu. UPLC methods are well known. Non-limiting examples of methods that can be used are described at pages 16-17 of US 2013/0053310 A1, published Feb. 28, 2013, for example.

[0324] F. Compositions

[0325] At least one engineered protein disclosed herein can be combined with at least one second component to form a nutritive composition. In some embodiments the only source of amino acid in the composition is the at least one engineered protein. In such embodiments the amino acid composition of the composition is the same as the amino acid composition of the at least one engineered protein. In some embodiments the composition comprises at least one engineered protein and at least one second protein. In some embodiments the at least one second protein is an engineered protein, while in other embodiments the at least one second protein is not an engineered protein. In some embodiments the composition comprises 1, 2, 3, 4, 5, 6, 7, 8, 9, 10, 11, 12, 13, 14, 15, 16, 17, 18, 19, 20 or more engineered proteins. In some embodiments the composition comprises 0, 1, 2, 3, 4, 5, 6, 7, 8, 9, 10, 11, 12, 13, 14, 15, 16, 17, 18, 19, 20 or more non-engineered proteins. In some embodiments the composition comprises 1, 2, 3, 4, 5, 6, 7, 8, 9, 10, 11, 12, 13, 14, 15, 16, 17, 18, 19, 20 or more engineered proteins and the composition comprises 0, 1, 2, 3, 4, 5, 6, 7, 8, 9, 10, 11, 12, 13, 14, 15, 16, 17, 18, 19, 20 or more non-engineered proteins.

[0326] In some embodiments the nutritive composition as described in the preceding paragraph, further comprises at least one of at least one polypeptide, at least one peptide, and at least one free amino acid. In some embodiments the nutritive composition comprises at least one polypeptide and at least one peptide. In some embodiments the nutritive composition comprises at least one polypeptide and at least one free amino acid. In some embodiments the nutritive composition comprises at least one peptide and at least one free amino acid. In some embodiments the at least one polypeptide, at least one peptide, and/or at least one free amino acid comprises amino acids selected from 1) branch chain amino acids, 2) leucine, and 3) essential amino acids. In some embodiments the at least one polypeptide, at least one peptide, and/or at least one free amino acid consists of amino acids selected from 1) branch chain amino acids, 2) leucine, and 3) essential amino acids.

[0327] By adding at least one of a polypeptide, a peptide, and a free amino acid to a nutritive composition the proportion of at least one of branch chain amino acids, leucine, and essential amino acids, to total amino acid, present in the composition can be increased.

[0328] In some embodiments the composition comprises at least one carbohydrate. A “carbohydrate” refers to a sugar or polymer of sugars. The terms “saccharide,” “polysaccharide,” “carbohydrate,” and “oligosaccharide” may be used interchangeably. Most carbohydrates are aldehydes or ketones with many hydroxyl groups, usually one on each carbon atom of the molecule. Carbohydrates generally have the molecular formula CₙH₂ₙOₙ. A carbohydrate may be a monosaccharide, a disaccharide, trisaccharide, oligosaccharide, or polysaccharide. The most basic carbohydrate is a monosaccharide, such as glucose, sucrose, galactose, mannose, ribose, arabinose, xylose, and fructose. Disaccharides are two joined monosaccharides. Exemplary disaccharides include sucrose, maltose, cellobiose, and lactose. Typically, an oligosaccharide includes between three and six monosaccharide units (e.g., raffinose, stachyose), and polysaccharides include six or more monosaccharide units. Exemplary polysaccharides include starch, glycogen, and cellulose. Carbohydrates may contain modified saccharide units such as 2′-deoxyribose wherein a hydroxyl group is removed, 2′-fluororibose wherein a hydroxyl group is replace with a fluorine, or N-acetylglucosamine, a nitrogen-containing form of glucose (e.g., 2′-fluororibose, deoxyribose, and hexose). Carbohydrates may exist in many different forms, for example, conformers, cyclic forms, acyclic forms, stereoisomers, tautomers, anomers, and isomers.

[0329] In some embodiments the composition comprises at least one lipid. As used herein a “lipid” includes fats, oils, triglycerides, cholesterol, phospholipids, fatty acids in any form including free fatty acids. Fats, oils and fatty acids can be saturated, unsaturated (cis or trans) or partially unsaturated (cis or trans). In some embodiments the lipid comprises at least one fatty acid selected from lauric acid (12:0), myristic acid (14:0), palmitic acid (16:0), palmitoleic acid (16:1), margaric acid (17:0), heptadecenoic acid (17:1), stearic acid (18:0), oleic acid (18:1), linoleic acid (18:2), linolenic acid (18:3), octadecatetraenoic acid (18:4), arachidic acid (20:0), eicosenoic acid (20:1), eicosadienoic acid (20:2), eicosatetraenoic acid (20:4), eicosapentaenoic acid (20:5) (EPA), docosanoic acid (22:0), docosenoic acid (22:1), docosapentaenoic acid (22:5), docosahexaenoic acid (22:6) (DHA), and tetracosanoic acid (24:0). In some embodiments the composition comprises at least one modified lipid, for example a lipid that has been modified by cooking.

[0330] In some embodiments the composition comprises at least one supplemental mineral or mineral source. Examples of minerals include, without limitation: chloride, sodium, calcium, iron, chromium, copper, iodine, zinc, magnesium, manganese, molybdenum, phosphorus, potassium, and selenium. Suitable forms of any of the foregoing minerals include soluble mineral salts, slightly soluble mineral salts, insoluble mineral salts, chelated minerals, mineral complexes, non-reactive minerals such as carbonyl minerals, and reduced minerals, and combinations thereof.

[0331] In some embodiments the composition comprises at least one supplemental vitamin. The at least one vitamin can be fat-soluble or water soluble vitamins. Suitable vitamins include but are not limited to vitamin C, vitamin A, vitamin E, vitamin B12, vitamin K, riboflavin, niacin, vitamin D, vitamin B6, folic acid, pyridoxine, thiamine, pantothenic acid, and biotin. Suitable forms of any of the foregoing are salts of the vitamin, derivatives of the vitamin, compounds having the same or similar activity of the vitamin, and metabolites of the vitamin.

[0332] In some embodiments the composition comprises an excipient. Non-limiting examples of suitable excipients include a buffering agent, a preservative, a stabilizer, a binder, a compaction agent, a lubricant, a dispersion enhancer, a disintegration agent, a flavoring agent, a sweetener, a coloring agent.

[0333] In some embodiments the excipient is a buffering agent. Non-limiting examples of suitable buffering agents include sodium citrate, magnesium carbonate, magnesium bicarbonate, calcium carbonate, and calcium bicarbonate.

[0334] In some embodiments the excipient comprises a preservative. Non-limiting examples of suitable preservatives include antioxidants, such as alpha-tocopherol and ascorbate, and antimicrobials, such as parabens, chlorobutanol, and phenol.

[0335] In some embodiments the composition comprises a binder as an excipient. Non-limiting examples of suitable binders include starches, pregelatinized starches, gelatin, polyvinylpyrolidone, cellulose, methylcellulose, sodium carboxymethylcellulose, ethylcellulose, polyacrylamides, polyvinyloxoazolidone, polyvinylalcohols, C₁₂-C₁₈ fatty acid alcohol, polyethylene glycol, polyols, saccharides, oligosaccharides, and combinations thereof.

[0336] In some embodiments the composition comprises a lubricant as an excipient. Non-limiting examples of suitable lubricants include magnesium stearate, calcium stearate, zinc stearate, hydrogenated vegetable oils, sterotex, polyoxyethylene monostearate, talc, polyethyleneglycol, sodium benzoate, sodium lauryl sulfate, magnesium lauryl sulfate, and light mineral oil.

[0337] In some embodiments the composition comprises a dispersion enhancer as an excipient. Non-limiting examples of suitable dispersants include starch, alginic acid, polyvinylpyrrolidones, guar gum, kaolin, bentonite, purified wood cellulose, sodium starch glycolate, isoamorphous silicate, and microcrystalline cellulose as high HLB emulsifier surfactants.

[0338] In some embodiments the composition comprises a disintegrant as an excipient. In some embodiments the disintegrant is a non-effervescent disintegrant. Non-limiting examples of suitable non-effervescent disintegrants include starches such as corn starch, potato starch, pregelatinized and modified starches thereof, sweeteners, clays, such as bentonite, micro-crystalline cellulose, alginates, sodium starch glycolate, gums such as agar, guar, locust bean, karaya, pecitin, and tragacanth. In some embodiments the disintegrant is an effervescent disintegrant. Non-limiting examples of suitable effervescent disintegrants include sodium bicarbonate in combination with citric acid, and sodium bicarbonate in combination with tartaric acid.

[0339] In some embodiments the excipient comprises a flavoring agent. Flavoring agents can be chosen from synthetic flavor oils and flavoring aromatics; natural oils; extracts from plants, leaves, flowers, and fruits; and combinations thereof. In some embodiments the flavoring agent is selected from cinnamon oils; oil of wintergreen; peppermint oils; clover oil; hay oil; anise oil; eucalyptus; vanilla; citrus oil such as lemon oil, orange oil, grape and grapefruit oil; and fruit essences including apple, peach, pear, strawberry, raspberry, cherry, plum, pineapple, and apricot.

[0340] In some embodiments the excipient comprises a sweetener. Non-limiting examples of suitable sweeteners include glucose (corn syrup), dextrose, invert sugar, fructose, and mixtures thereof (when not used as a carrier); saccharin and its various salts such as the sodium salt; dipeptide sweeteners such as aspartame; dihydrochalcone compounds, glycyrrhizin; Stevia Rebaudiana (Stevioside); chloro derivatives of sucrose such as sucralose; and sugar alcohols such as sorbitol, mannitol, sylitol, and the like. Also contemplated are hydrogenated starch hydrolysates and the synthetic sweetener 3,6-dihydro-6-methyl-1,2,3-oxathiazin-4-one-2,2-dioxide, particularly the potassium salt (acesulfame-K), and sodium and calcium salts thereof.

[0341] In some embodiments the composition comprises a coloring agent. Non-limiting examples of suitable color agents include food, drug and cosmetic colors (FD&C), drug and cosmetic colors (D&C), and external drug and cosmetic colors (Ext. D&C). The coloring agents can be used as dyes or their corresponding lakes.

[0342] The weight fraction of the excipient or combination of excipients in the formulation is usually about 50% or less, about 45% or less, about 40% or less, about 35% or less, about 30% or less, about 25% or less, about 20% or less, about 15% or less, about 10% or less, about 5% or less, about 2% or less, or about 1% or less of the total weight of the protein in the composition.

[0343] The engineered proteins and nutritive compositions disclosed herein can be formulated into a variety of forms and administered by a number of different means. The compositions can be administered orally, rectally, or parenterally, in formulations containing conventionally acceptable carriers, adjuvants, and vehicles as desired. The term “parenteral” as used herein includes subcutaneous, intravenous, intramuscular, or intrasternal injection and infusion techniques. In an exemplary embodiment, the engineered protein or nutritive composition is administered orally.

[0344] Solid dosage forms for oral administration include capsules, tablets, caplets, pills, troches, lozenges, powders, and granules. A capsule typically comprises a core material comprising an engineered protein or composition and a shell wall that encapsulates the core material. In some embodiments the core material comprises at least one of a solid, a liquid, and an emulsion. In some embodiments the shell wall material comprises at least one of a soft gelatin, a hard gelatin, and a polymer. Suitable polymers include, but are not limited to: cellulosic polymers such as hydroxypropyl cellulose, hydroxyethyl cellulose, hydroxypropyl methyl cellulose (HPMC), methyl cellulose, ethyl cellulose, cellulose acetate, cellulose acetate phthalate, cellulose acetate trimellitate, hydroxypropylmethyl cellulose phthalate, hydroxypropylmethyl cellulose succinate and carboxymethylcellulose sodium; acrylic acid polymers and copolymers, such as those formed from acrylic acid, methacrylic acid, methyl acrylate, ammonio methylacrylate, ethyl acrylate, methyl methacrylate and/or ethyl methacrylate (e.g., those copolymers sold under the trade name “Eudragit”); vinyl polymers and copolymers such as polyvinyl pyrrolidone, polyvinyl acetate, polyvinylacetate phthalate, vinylacetate crotonic acid copolymer, and ethylene-vinyl acetate copolymers; and shellac (purified lac). In some embodiments at least one polymer functions as taste-masking agents.

[0345] Tablets, pills, and the like can be compressed, multiply compressed, multiply layered, and/or coated. The coating can be single or multiple. In one embodiment, the coating material comprises at least one of a saccharide, a polysaccharide, and glycoproteins extracted from at least one of a plant, a fungus, and a microbe. Non-limiting examples include corn starch, wheat starch, potato starch, tapioca starch, cellulose, hemicellulose, dextrans, maltodextrin, cyclodextrins, inulins, pectin, mannans, gum arabic, locust bean gum, mesquite gum, guar gum, gum karaya, gum ghatti, tragacanth gum, funori, carrageenans, agar, alginates, chitosans, or gellan gum. In some embodiments the coating material comprises a protein. In some embodiments the coating material comprises at least one of a fat and an oil. In some embodiments the at least one of a fat and an oil is high temperature melting. In some embodiments the at least one of a fat and an oil is hydrogenated or partially hydrogenated. In some embodiments the at least one of a fat and an oil is derived from a plant. In some embodiments the at least one of a fat and an oil comprises at least one of glycerides, free fatty acids, and fatty acid esters. In some embodiments the coating material comprises at least one edible wax. The edible wax can be derived from animals, insects, or plants. Non-limiting examples include beeswax, lanolin, bayberry wax, carnauba wax, and rice bran wax. Tablets and pills can additionally be prepared with enteric coatings.

[0346] Alternatively, powders or granules embodying the engineered proteins and nutritive compositions disclosed herein can be incorporated into a food product. In some embodiments the food product is be a drink for oral administration. Non-limiting examples of a suitable drink include fruit juice, a fruit drink, an artificially flavored drink, an artificially sweetened drink, a carbonated beverage, a sports drink, a liquid diary product, a shake, an alcoholic beverage, a caffeinated beverage, infant formula and so forth. Other suitable means for oral administration include aqueous and nonaqueous solutions, emulsions, suspensions and solutions and/or suspensions reconstituted from non-effervescent granules, containing at least one of suitable solvents, preservatives, emulsifying agents, suspending agents, diluents, sweeteners, coloring agents, and flavoring agents.

[0347] In some embodiments the food product is a solid foodstuff. Suitable examples of a solid foodstuff include without limitation a food bar, a snack bar, a cookie, a brownie, a muffin, a cracker, an ice cream bar, a frozen yogurt bar, and the like.

[0348] In some embodiments, the proteins and compositions disclosed herein are incorporated into a therapeutic food. In some embodiments, the therapeutic food is a ready-to-use food that optionally contains some or all essential macronutrients and micronutrients. In some embodiments, the proteins and compositions disclosed herein are incorporated into a supplementary food that is designed to be blended into an existing meal. In some embodiments, the supplemental food contains some or all essential macronutrients and micronutrients. In some embodiments, the proteins and compositions disclosed herein are blended with or added to an existing food to fortify the food's protein nutrition. Examples include food staples (grain, salt, sugar, cooking oil, margarine), beverages (coffee, tea, soda, beer, liquor, sports drinks), snacks, sweets and other foods.

[0349] The compositions disclosed herein can be utilized in methods to increase at least one of muscle mass, strength and physical function, thermogenesis, metabolic expenditure, satiety, mitochondrial biogenesis, weight or fat loss, and lean body composition for example.

[0350] A formulation can contain a nutritive polypeptide up to about 25 g per 100 kilocalories (25 g/100 kcal) in the formulation, meaning that all or essentially all of the energy present in the formulation is in the form of the nutritive polypeptide. More typically, about 99%, 98%, 97%, 96%, 95%, 90%, 85%, 80%, 75%, 70%, 65%, 60%, 55%, 50%, 45%, 40%, 35%, 30%, 25%, 20%, 15%, 10%, 5% or less than 5% of the energy present in the formulation is in the form of the nutritive polypeptide. In other formulations, the nutritive polypeptide is present in an amount sufficient to provide a nutritional benefit equivalent to or greater than at least about 0.1% of a reference daily intake value of polypeptide. Suitable reference daily intake values for protein are well known in the art. See, e.g., Dietary Reference Intakes for Energy, Carbohydrate, Fiber, Fat, Fatty Acids, Cholesterol, Protein and Amino Acids, Institute of Medicine of the National Academies, 2005, National Academies Press, Washington D.C. A reference daily intake value for protein is a range wherein 10-35% of daily calories are provided by protein and isolated amino acids. Another reference daily intake value based on age is provided as grams of protein per day: children ages 1-3: 13 g, children ages 4-8: 19 g, children ages 9-13: 34 g, girls ages 14-18: 46, boys ages 14-18: 52, women ages 19-70+: 46, and men ages 19-70+: 56. In other formulations, the nutritive polypeptide is present in an amount sufficient to provide a nutritional benefit to a human subject suffering from protein malnutrition or a disease, disorder or condition characterized by protein malnutrition. Protein malnutrition is commonly a prenatal or childhood condition. Protein malnutrition with adequate energy intake is termed kwashiorkor or hypoalbuminemic malnutrition, while inadequate energy intake in all forms, including inadequate protein intake, is termed marasmus. Adequately nourished individuals can develop sarcopenia from consumption of too little protein or consumption of proteins deficient in nutritive amino acids. Prenatal protein malnutrition can be prevented, treated or reduced by administration of the nutritive polypeptides described herein to pregnant mothers, and neonatal protein malnutrition can be prevented, treated or reduced by administration of the nutritive polypeptides described herein to the lactation mother. In adults, protein malnutrition is commonly a secondary occurrence to cancer, chronic renal disease, and in the elderly. Additionally, protein malnutrition can be chronic or acute. Examples of acute protein malnutrition occur during an acute illness or disease such as sepsis, or during recovery from a traumatic injury, such as surgery, thermal injury such as a burn, or similar events resulting in substantial tissue remodeling. Other acute illnesses treatable by the methods and compositions described herein include sarcopenia, cachexia, diabetes, insulin resistance, and obesity.

[0351] A formulation can contain a nutritive polypeptide in an amount sufficient to provide a feeling of satiety when consumed by a human subject, meaning the subject feels a reduced sense or absence of hunger, or desire to eat. Such a formulation generally has a higher satiety index than carbohydrate-rich foods on an equivalent calorie basis.

[0352] A formulation can contain a nutritive polypeptide in an amount based on the concentration of the nutritive polypeptide (e.g., on a weight-to-weight basis), such that the nutritive polypeptide accounts for up to 100% of the weight of the formulation, meaning that all or essentially all of the matter present in the formulation is in the form of the nutritive polypeptide. More typically, about 99%, 98%, 97%, 96%, 95%, 90%, 85%, 80%, 75%, 70%, 65%, 60%, 55%, 50%, 45%, 40%, 35%, 30%, 25%, 20%, 15%, 10%, 5% or less than 5% of the weight present in the formulation is in the form of the nutritive polypeptide. In some embodiments, the formulation contains 10 mg, 100 mg, 500 mg, 750 mg, 1 g, 2 g, 3 g, 4 g, 5 g, 6 g, 7 g, 8 g, 9, 10 g, 15 g, 20 g, 25 g, 30 g, 35 g, 40 g, 45 g, 50 g, 60 g, 70 g, 80 g, 90 g, 100 g or over 100 g of nutritive polypeptide.

[0353] Preferably, the formulations provided herein are substantially free of non-comestible products. Non-comestible products are often found in preparations of recombinant proteins of the prior art, produced from yeast, bacteria, algae, insect, mammalian or other expression systems. Exemplary non-comestible products include surfactant, a polyvinyl alcohol, a propylene glycol, a polyvinyl acetate, a polyvinylpyrrolidone, a non-comestible polyacid or polyol, a fatty alcohol, an alkylbenzyl sulfonate, an alkyl glucoside, or a methyl paraben.

[0354] In aspects, the provided formulations contain other materials, such as a tastant, a nutritional carbohydrate and/or a nutritional lipid. In addition, formulations may include bulking agents, texturizers, and fillers.

[0355] In preferred embodiments, the nutritive polypeptides provided herein are isolated and/or substantially purified. The nutritive polypeptides and the compositions and formulations provided herein, are substantially free of non-protein components. Such non-protein components are generally present in protein preparations such as whey, casein, egg and soy preparations, which contain substantial amounts of carbohydrates and lipids that complex with the polypeptides and result in delayed and incomplete protein digestion in the gastrointestinal tract. Such non-protein components can also include DNA. Thus, the nutritive polypeptides, compositions and formulations are characterized by improved digestability and decreased allergenicity as compared to food-derived polypeptides and polypeptide mixtures. In some embodiments, improved digestability means a faster rate of digestion when consumed or otherwise administered into the gastrointestinal tract of a human subject. In an alternative embodiment, improved digestability means a slower rate of digestion when consumed or otherwise administered into the gastrointestinal tract of a human subject, for example in situations where the human suffers from impaired protein absorption ability. Furthermore, these formulations and compositions are characterized by more reproducible digestability from a time and/or a digestion product at a given unit time basis. In certain embodiments, a nutritive polypeptide is at least 10% reduced in lipids and/or carbohydrates, and optionally one or more other materials that decreases digestibility and/or increases allergenicity, relative to a reference polypeptide or reference polypeptide mixture, e.g., is reduced by 20%, 30%, 40%, 50%, 60%, 70%, 80%, 90%, 95%, 99% or greater than 99%. In certain embodiments, the nutritive formulations contain a nutritional carbohydrate and/or nutritional lipid, which are selected for digestibility and/or reduced allegenicity.

[0356] The compositions disclosed herein can be utilized in methods to increase at least one of muscle mass, strength and physical function, thermogenesis, metabolic expenditure, satiety, mitochondrial biogenesis, weight or fat loss, and lean body composition for example.

[0357] G. Methods of Use

[0358] In some embodiments the proteins and compositions disclosed herein are administered to a patient or a user (sometimes collectively referred to as a “subject”). As used herein “administer” and “administration” encompasses embodiments in which one person directs another to consume a protein or composition in a certain manner and/or for a certain purpose, and also situations in which a user uses a protein or composition in a certain manner and/or for a certain purpose independently of or in variance to any instructions received from a second person. Non-limiting examples of embodiments in which one person directs another to consume a protein or composition in a certain manner and/or for a certain purpose include when a physician prescribes a course of conduct and/or treatment to a patient, when a trainer advises a user (such as an athlete) to follow a particular course of conduct and/or treatment, and when a manufacturer, distributer, or marketer recommends conditions of use to an end user, for example through advertisements or labeling on packaging or on other materials provided in association with the sale or marketing of a product.

[0359] In some embodiments the proteins or compositions are provided in a dosage form. In some embodiments the dosage form is designed for administration of at least one protein disclosed herein, wherein the total amount of protein administered is selected from 0.1 g to 1 g, 1 g to 5 g, from 2 g to 10 g, from 5 g to 15 g, from 10 g to 20 g, from 15 g to 25 g, from 20 g to 40 g, from 25-50 g, and from 30-60 g. In some embodiments the dosage form is designed for administration of at least one protein disclosed herein, wherein the total amount of protein administered is selected from about 0.1 g, 0.1 g-1 g, 1 g, 2 g, 3 g, 4 g, 5 g, 6 g, 7 g, 8 g, 9 g, 10 g, 15 g, 20 g, 25 g, 30 g, 35 g, 40 g, 45 g, 50 g, 55 g, 60 g, 65 g, 70 g, 75 g, 80 g, 85 g, 90 g, 95 g, and 100 g.

[0360] In some embodiments the dosage form is designed for administration of at least one protein disclosed herein, wherein the total amount of essential amino acids administered is selected from 0.1 g to 1 g, from 1 g to 5 g, from 2 g to 10 g, from 5 g to 15 g, from 10 g to 20 g, and from 1-30 g. In some embodiments the dosage form is designed for administration of at least one protein disclosed herein, wherein the total amount of protein administered is selected from about 0.1 g, 0.1-1 g, 1 g, 2 g, 3 g, 4 g, 5 g, 6 g, 7 g, 8 g, 9 g, 10 g, 15 g, 20 g, 25 g, 30 g, 35 g, 40 g, 45 g, 50 g, 55 g, 60 g, 65 g, 70 g, 75 g, 80 g, 85 g, 90 g, 95 g, and 100 g.

[0361] In some embodiments the protein or composition is consumed at a rate of from 0.1 g to 1 g a day, 1 g to 5 g a day, from 2 g to 10 g a day, from 5 g to 15 g a day, from 10 g to 20 g a day, from 15 g to 30 g a day, from 20 g to 40 g a day, from 25 g to 50 g a day, from 40 g to 80 g a day, from 50 g to 100 g a day, or more.

[0362] In some embodiments, of the total protein intake by the subject, at least 5%, at least 10%, at least 15%, at least 20%, at least 25%, at least 30%, at least 35%, at least 40%, at least 45%, at least 50%, at least 55%, at least 60%, at least 65%, at least 70%, at least 75%, at least 80%, at least 85%, at least 90%, at least 95%, or about 100% of the total protein intake by the subject over a dietary period is made up of at least one protein according to this disclosure. In some embodiments, of the total protein intake by the subject, from 5% to 100% of the total protein intake by the subject, from 5% to 90% of the total protein intake by the subject, from 5% to 80% of the total protein intake by the subject, from 5% to 70% of the total protein intake by the subject, from 5% to 60% of the total protein intake by the subject, from 5% to 50% of the total protein intake by the subject, from 5% to 40% of the total protein intake by the subject, from 5% to 30% of the total protein intake by the subject, from 5% to 20% of the total protein intake by the subject, from 5% to 10% of the total protein intake by the subject, from 10% to 100% of the total protein intake by the subject, from 10% to 100% of the total protein intake by the subject, from 20% to 100% of the total protein intake by the subject, from 30% to 100% of the total protein intake by the subject, from 40% to 100% of the total protein intake by the subject, from 50% to 100% of the total protein intake by the subject, from 60% to 100% of the total protein intake by the subject, from 70% to 100% of the total protein intake by the subject, from 80% to 100% of the total protein intake by the subject, or from 90% to 100% of the total protein intake by the subject, over a dietary period, is made up of at least one protein according to this disclosure. In some embodiments the at least one protein of this disclosure accounts for at least 5%, at least 10%, at least 15%, at least 20%, at least 25%, at least 30%, at least 35%, at least 40%, at least 45%, or at least 50% of the subject's calorie intake over a dietary period.

[0363] In some embodiments the at least one protein according to this disclosure comprises at least 2 proteins of this disclosure, at least 3 proteins of this disclosure, at least 4 proteins of this disclosure, at least 5 proteins of this disclosure, at least 6 proteins of this disclosure, at least 7 proteins of this disclosure, at least 8 proteins of this disclosure, at least 9 proteins of this disclosure, at least 10 proteins of this disclosure, or more.

[0364] In some embodiments the dietary period is 1 meal, 2 meals, 3 meals, at least 1 day, at least 2 days, at least 3 days, at least 4 days, at least 5 days, at least 6 days, at least 1 week, at least 2 weeks, at least 3 weeks, at least 4 weeks, at least 1 month, at least 2 months, at least 3 months, at least 4 months, at least 5 months, at least 6 months, or at least 1 year. In some embodiments the dietary period is from 1 day to 1 week, from 1 week to 4 weeks, from 1 month, to 3 months, from 3 months to 6 months, or from 6 months to 1 year.

[0365] Clinical studies provide evidence that protein prevents muscle loss due to aging or bed rest. In particular, studies have shown that protein supplementation increases muscle fractional synthetic rate (FSR) during prolonged bed rest, maintains leg mass and strength during prolonged bed rest, increases lean body mass, improves functional measures of gait and balance, and may serve as a viable intervention for individuals at risk of sarcopenia due to immobility or prolonged bed rest. See, e.g., Paddon-Jones D, et al. J Clin Endocrinol Metab 2004, 89:4351-4358; Ferrando, A et al. Clinical Nutrition 2009 1-6; Katsanos C et al. Am J Physiol Endocrinol Metab. 2006, 291: 381-387.

[0366] Studies on increasing muscle protein anabolism in athletes have shown that protein provided following exercise promotes muscle hypertrophy to a greater extent than that achieved by exercise alone. It has also been shown that protein provided following exercise supports protein synthesis without any increase in protein breakdown, resulting in a net positive protein balance and muscle mass accretion. While muscle protein synthesis appears to respond in a dose-response fashion to essential amino acid supplementation, not all proteins are equal in building muscle. For example, the amino acid leucine is an important factor in stimulating muscle protein synthesis. See, e.g., Borscheim E et al. Am J Physiol Endocrinol Metab 2002, 283: E648-E657; Borsheim E et al. Clin Nutr. 2008, 27: 189-95; Esmarck B et al J Physiol 2001, 535: 301-311; Moore D et al. Am J Clin Nutr 2009, 89: 161-8).

[0367] In another aspect this disclosure provides methods of maintaining or increasing at least one of muscle mass, muscle strength, and functional performance in a subject. In some embodiments the methods comprise providing to the subject a sufficient amount of a protein of this disclosure, a composition of this disclosure, or a composition made by a method of this disclosure. In some embodiments the subject is at least one of elderly, critically-medically ill, and suffering from protein-energy malnutrition. In some embodiments the sufficient amount of a protein of this disclosure, a composition of this disclosure, or a composition made by a method of this disclosure is consumed by the subject in coordination with performance of exercise. In some embodiments the protein of this disclosure, composition of this disclosure, or composition made by a method of this disclosure is consumed by the subject by an oral, enteral, or parenteral route. In some embodiments the protein of this disclosure, composition of this disclosure, or composition made by a method of this disclosure is consumed by the subject by an oral route. In some embodiments the protein of this disclosure, composition of this disclosure, or composition made by a method of this disclosure is consumed by the subject by an enteral route.

[0368] In another aspect this disclosure provides methods of maintaining or achieving a desirable body mass index in a subject. In some embodiments the methods comprise providing to the subject a sufficient amount of a protein of this disclosure, a composition of this disclosure, or a composition made by a method of this disclosure. In some embodiments the subject is at least one of elderly, critically-medically ill, and suffering from protein-energy malnutrition. In some embodiments the sufficient amount of a protein of this disclosure, a composition of this disclosure, or a composition made by a method of this disclosure is consumed by the subject in coordination with performance of exercise. In some embodiments the protein of this disclosure, composition of this disclosure, or composition made by a method of this disclosure is consumed by the subject by an oral, enteral, or parenteral route.

[0369] In another aspect this disclosure provides methods of providing protein to a subject with protein-energy malnutrition. In some embodiments the methods comprise providing to the subject a sufficient amount of a protein of this disclosure, a composition of this disclosure, or a composition made by a method of this disclosure. In some embodiments the protein of this disclosure, composition of this disclosure, or composition made by a method of this disclosure is consumed by the subject by an oral, enteral, or parenteral route.

[0370] The need for essential amino acid supplementation has been suggested in cancer patients and other patients suffering from cachexia. Dietary studies in mice have shown survival and functional benefits to cachectic cancer-bearing mice through dietary intervention with essential amino acids. Beyond cancer, essential amino acid supplementation has also shown benefits, such as improved muscle function and muscle gain, in patients suffering from other diseases that have difficulty exercising and therefore suffer from muscular deterioration, such as chronic obstructive pulmonary disease, chronic heart failure, HIV, and other disease states.

[0371] Studies have shown that specific amino acids have advantages in managing cachexia. A relatively high content of BCAAs and Leu in diets are thought to have a positive effect in cachexia by promoting total protein synthesis by signaling an increase in translation, enhancing insulin release, and inhibiting protein degradation. Thus, consuming increased dietary BCAAs in general and/or Leu in particular will contribute positively to reduce or reverse the effects of cachexia. Because nitrogen balance is important in countering the underlying cause of cachexia it is thought that consuming increased dietary glutamine and/or arginine will contribute positively to reduce or reverse the effects of cachexia. See, e.g., Op den Kamp C, Langen R, Haegens A, Schols A. “Muscle atrophy in cachexia: can dietary protein tip the balance?” Current Opinion in Clinical Nutrition and Metabolic Care 2009, 12:611-616; Poon R T-P, Yu W-C, Fan S-T, et al. “Long-term oral branched chain amino acids in patients undergoing chemoembolization for hepatocellular carcinoma: a randomized trial.” Aliment Pharmacol Ther 2004; 19:779-788; Tayek J A, Bistrian B R, Hehir D J, Martin R, Moldawer L L, Blackburn G L. “Improved protein kinetics and albumin synthesis by branched chain amino acid-enriched total parenteral nutrition in cancer cachexia.” Cancer. 1986; 58:147-57; Xi P, Jiang Z, Zheng C, Lin Y, Wu G “Regulation of protein metabolism by glutamine: implications for nutrition and health.” Front Biosci. 2011 Jan. 1; 16:578-97.

[0372] Accordingly, also provided herein are methods of treating cachexia in a subject. In some embodiments a sufficient amound of a protein of this disclosure, a composition of this disclosure, or a composition made by a method of this disclosure for a subject with cachexia is an amount such that the amount of protein of this disclosure ingested by the person meets or exceeds the metabolic needs (which are often elevated). A protein intake of 1.5 g/kg of body weight per day or 15-20% of total caloric intake appears to be an appropriate target for persons with cachexia. In some embodiments all of the protein consumed by the subject is a protein according to this disclosure. In some embodiments protein according to this disclosure is combined with other sources of protein and/or free amino acids to provide the total protein intake of the subject. In some embodiments the subject is at least one of elderly, critically-medically ill, and suffering from protein-energy malnutrition. In some embodiments the subject suffers from a disease that makes exercise difficult and therefore causes muscular deterioration, such as chronic obstructive pulmonary disease, chronic heart failure, HIV, cancer, and other disease states. In some embodiments, the protein according to disclosure, the composition according to disclosure, or the composition made by a method according to disclosure is consumed by the subject in coordination with performance of exercise. In some embodiments, the protein according to this disclosure, the composition according to disclosure, or the composition made by a method according to disclosure is consumed by the subject by an oral, enteral, or parenteral route.

[0373] Sarcopenia is the degenerative loss of skeletal muscle mass (typically 0.5-1% loss per year after the age of 25), quality, and strength associated with aging. Sarcopenia is a component of the frailty syndrome. The European Working Group on Sarcopenia in Older People (EWGSOP) has developed a practical clinical definition and consensus diagnostic criteria for age-related sarcopenia. For the diagnosis of sarcopenia, the working group has proposed using the presence of both low muscle mass and low muscle function (strength or performance). Sarcopenia is characterized first by a muscle atrophy (a decrease in the size of the muscle), along with a reduction in muscle tissue “quality,” caused by such factors as replacement of muscle fibres with fat, an increase in fibrosis, changes in muscle metabolism, oxidative stress, and degeneration of the neuromuscular junction. Combined, these changes lead to progressive loss of muscle function and eventually to frailty. Frailty is a common geriatric syndrome that embodies an elevated risk of catastrophic declines in health and function among older adults. Contributors to frailty can include sarcopenia, osteoporosis, and muscle weakness. Muscle weakness, also known as muscle fatigue, (or “lack of strength”) refers to the inability to exert force with one's skeletal muscles. Weakness often follows muscle atrophy and a decrease in activity, such as after a long bout of bedrest as a result of an illness. There is also a gradual onset of muscle weakness as a result of sarcopenia.

[0374] The proteins of this disclosure are useful for treating sarcopenia or frailty once it develops in a subject or for preventing the onset of sarcopenia or frailty in a subject who is a member of an at risk groups. In some embodiments all of the protein consumed by the subject is a protein according to this disclosure. In some embodiments protein according to this disclosure is combined with other sources of protein and/or free amino acids to provide the total protein intake of the subject. In some embodiments the subject is at least one of elderly, critically-medically ill, and suffering from protein-energy malnutrition. In some embodiments, the protein according to disclosure, the composition according to disclosure, or the composition made by a method according to disclosure is consumed by the subject in coordination with performance of exercise. In some embodiments, the protein according to this disclosure, the composition according to disclosure, or the composition made by a method according to disclosure is consumed by the subject by an oral, enteral, or parenteral route.

[0375] Obesity is a multifactorial disorder associated with a host of comorbidities including hypertension, type 2 diabetes, dyslipidemia, coronary heart disease, stroke, cancer (eg, endometrial, breast, and colon), osteoarthritis, sleep apnea, and respiratory problems. The incidence of obesity, defined as a body mass index>30 kg/m2, has increased dramatically in the United States, from 15% (1976-1980) to 33% (2003-2004), and it continues to grow. Although the mechanisms contributing to obesity are complex and involve the interplay of behavioral components with hormonal, genetic, and metabolic processes, obesity is largely viewed as a lifestyle-dependent condition with 2 primary causes: excessive energy intake and insufficient physical activity. With respect to energy intake, there is evidence that modestly increasing the proportion of protein in the diet, while controlling total energy intake, may improve body composition, facilitate fat loss, and improve body weight maintenance after weight loss. Positive outcomes associated with increased dietary protein are thought to be due primarily to lower energy intake associated with increased satiety, reduced energy efficiency and/or increased thermogenesis, positive effects on body composition (specifically lean muscle mass), and enhanced glycemic control.

[0376] Dietary proteins are more effective in increasing post-prandial energy expenditure than isocaloric intakes of carbohydrates or fat (see, e.g., Dauncey M, Bingham S. “Dependence of 24 h energy expenditure in man on composition of the nutrient intake.” Br J Nutr 1983, 50: 1-13; Karst H et al. “Diet-induced thermogenesis in man: thermic effects of single proteins, carbohydrates and fats depending on their energy amount.” Ann Nutr Metab. 1984, 28: 245-52; Tappy L et al “Thermic effect of infused amino acids in healthy humans and in subjects with insulin resistance.” Am J Clin Nutr 1993, 57 (6): 912-6). This property along with other properties (satiety induction; preservation of lean body mass) make protein an attractive component of diets directed at weight management. The increase in energy expenditure caused by such diets may in part be due to the fact that the energy cost of digesting and metabolizing protein is higher than for other calorie sources. Protein turnover, including protein synthesis, is an energy consuming process. In addition, high protein diets may also up-regulate uncoupling protein in liver and brown adipose, which is positively correlated with increases in energy expenditure. It has been theorized that different proteins may have unique effects on energy expenditure.

[0377] Studies suggest that ingestion of protein, particularly proteins with high EAA and/or BCAA content, leads to distinct effects on thermogenesis and energy expenditure (see, e.g., Mikkelsen P. et al. “Effect of fat-reduced diets on 24 h energy expenditure: comparisons between animal protein, vegetable protein and carbohydrate.” Am J Clin Nutr 2000, 72:1135-41; Acheson K. et al. “Protein choices targeting thermogenesis and metabolism.” Am J Clin Nutr 2011, 93:525-34; Alfenas R. et al. “Effects of protein quality on appetite and energy metabolism in normal weight subjects” Arg Bras Endocrinol Metabol 2010, 54 (1): 45-51; Lorenzen J. et al. “The effect of milk proteins on appetite regulation and diet-induced thermogenesis.” J Clin Nutr 2012 66 (5): 622-7). Additionally, L-tyrosine has been identified as an amino acid that plays a role in thermogenesis (see, e.g., Belza A. et al. “The beta-adrenergic antagonist propranolol partly abolishes thermogenic response to bioactive food ingredients.” Metabolism 2009, 58 (8):1137-44). Further studies suggest that Leucine and Arginine supplementation appear to alter energy metabolism by directing substrate to lean body mass rather than adipose tissue (Dulloo A. “The search for compounds that stimulate thermogenesis in obesity management: from pharmaceuticals to functional food ingredients.” Obes Rev 2011 12: 866-83).

[0378] Collectively the literature suggests that different protein types leads to distinct effects on thermogenesis. Because proteins or peptides rich in EAAs, BCAA, and/or at least one of Tyr, Arg, and Leu are believed to have a stimulatory effect on thermogenesis, and because stimulation of thermogenesis is believed to lead to positive effects on weight management, this disclosure also provides products and methods useful to stimulation thermogenesis and/or to bring about positive effects on weight management in general.

[0379] More particularly, this disclosure provides methods of increasing thermogenesis in a subject. In some embodiments the methods comprise providing to the subject a sufficient amount of a protein of this disclosure, a composition of this disclosure, or a composition made by a method of this disclosure. In some embodiments the subject is obese. In some embodiments, the protein according to disclosure, the composition according to disclosure, or the composition made by a method according to disclosure is consumed by the subject in coordination with performance of exercise. In some embodiments, the protein according to disclosure, the composition according to disclosure, or the composition made by a method according to disclosure is consumed by the subject by an oral, enteral, or parenteral route.

[0380] At the basic level, the reason for the development of an overweight condition is due to an imbalance between energy intake and energy expenditure. Attempts to reduce food at any particular occasion (satiation) and across eating occasions (satiety) have been a major focus of recent research. Reduced caloric intake as a consequence of feeling satisfied during a meal and feeling full after a meal results from a complex interaction of internal and external signals. Various nutritional studies have demonstrated that variation in food properties such as energy density, content, texture and taste influence both satiation and satiety.

[0381] There are three macronutrients that deliver energy: fat, carbohydrates and proteins. A gram of protein or carbohydrate provides 4 calories while a gram of fat 9 calories. Protein generally increases satiety to a greater extent than carbohydrates or fat and therefore may facilitate a reduction in calorie intake. However, there is considerable evidence that indicates the type of protein matters in inducing satiety (see, e.g., W. L. Hall, et al. “Casein and whey exert different effects on plasma amino acid profiles, gastrointestinal hormone secretion and appetite.” Br J Nutr. 2003 February, 89(2):239-48; R. Abou-Samra, et al. “Effect of different protein sources on satiation and short-term satiety when consumed as a starter.” Nutr J. 2011 Dec. 23, 10:139; T. Akhavan, et al. “Effect of premeal consumption of whey protein and its hydrolysate on food intake and postmeal glycemia and insulin responses in young adults.” Am J Clin Nutr. 2010 April, 91(4):966-75, Epub 2010 Feb. 17; MA Veldhorst “Dose-dependent satiating effect of whey relative to casein or soy” Physiol Behav. 2009 Mar. 23, 96(4-5):675-82). Evidence indicates that protein rich in Leucine is particularly effective at inducing satiety (see, e.g., Fromentin G et al “Peripheral and central mechanisms involved in the control of food intake by dietary amino acids and proteins.” Nutr Res Rev 2012 25: 29-39).

[0382] Because of the role of dietary protein in inducing satiety, the engineered protein and nutritive compositions disclosed herein can be used to induce a satiety response in a mammal, such as a human. In some embodiments, the engineered protein comprises a ratio of branch chain amino acid residues to total amino acid residues that is equal to or greater than the ratio of branch chain amino acid residues to total amino acid residues present in at least one of whey protein, egg protein, and soy protein.

[0383] In some embodiments incorporating a least one engineered protein or nutritive composition of this disclosure into the diet of a subject has at least one effect selected from inducing postprandial satiety (including by suppressing hunger), inducing thermogenesis, reducing glycemic response, positively affecting energy expenditure and lean body mass, reducing the weight gain caused by overeating, and decreasing energy intake. In some embodiments incorporating a least one engineered protein or nutritive composition of this disclosure into the diet of a subject has at least one effect selected from greater loss of body fat, less lean tissue loss, a better lipid profile, and improved glucose tolerance and insulin sensitivity.

[0384] In some embodiments the subject consumes the engineered protein at a rate of from 0.1 g to 1 g a day, from 1 g to 5 g a day, from 2 g to 10 g a day, from 5 g to 15 g a day, from 10 g to 20 g a day, from 15 g to 30 g a day, from 20 g to 40 g a day, from 25 g to 50 g a day, from 40 g to 80 g a day, from 50 g to 100 g a day, or more. In some embodiments the engineered protein accounts for at least 5%, at least 10%, at least 15%, at least 20%, at least 25%, at least 30%, at least 35%, at least 40%, at least 45%, or at least 50% of the subjects calorie intake over a period of 1 meal, 1 day, 2 days, 3 days, 4 days, 5 days, 1 week, 2 weeks, 3 weeks, 1 month, 1-3 months, 2-6 months, 6-12 months, or longer.

### EXAMPLES

[0385] Examples of the techniques and protocols described herein can be found in Remington's Pharmaceutical Sciences, 16th edition, Osol, A. (ed), 1980.

[0386] Below are examples of specific embodiments for carrying out the present invention. The examples are offered for illustrative purposes only, and are not intended to limit the scope of the present invention in any way. Efforts have been made to ensure accuracy with respect to numbers used (e.g., amounts, temperatures, etc.), but some experimental error and deviation should, of course, be allowed for.

[0387] The practice of the present invention will employ, unless otherwise indicated, conventional methods of protein chemistry, biochemistry, recombinant DNA techniques and pharmacology, within the skill of the art. Such techniques are explained fully in the literature. See, e.g., T. E. Creighton, Proteins: Structures and Molecular Properties (W.H. Freeman and Company, 1993); A. L. Lehninger, Biochemistry (Worth Publishers, Inc., current addition); Sambrook, et al., Molecular Cloning: A Laboratory Manual (2nd Edition, 1989); Methods In Enzymology (S. Colowick and N. Kaplan eds., Academic Press, Inc.); Remington's Pharmaceutical Sciences, 18th Edition (Easton, Pa.: Mack Publishing Company, 1990); Carey and Sundberg Advanced Organic Chemistry 3^{rd} Ed. (Plenum Press) Vols A and B (1992).

### Example 1

### Construction of Protein Libraries

[0388] Reference secreted proteins were identified in the annotated proteome for selected microorganisms as defined by the UniProt database. Specifically, proteins that have been observed and/or annotated as being present outside the various cellular plasma membranes, were identified. This procedure was applied to all species of the genera Acremonium, Aspergillus, Chrysosporium, Corynebacterium, Fusarium, Penicillium, Pichia pastoris, Rhizopus, Synechocystis, Synechococcus, Trametes, and Trichoderma, as well as to Bacillus subtilis, Escherichia coli, and Saccharomyces cerevisiae, to build a protein library. The selected proteins from each genus (species) are listed using their UniProt IDs in Appendix A.

[0389] Non-limiting examples of proteins and fragments of proteins are provided in the following Examples.

### Example 2

### Selection of Reference Secreted Proteins for Engineering

[0390] The NCBI Conserved Domain Database (Marchler-Bauer A., and Bryant, S. H. “CD-Search: protein domain annotations on the fly”. Nuc. Acid. Res. (2004) 32: W327-W331) includes protein domains and/or folds used in previous studies to reengineer protein-protein binding interactions. (Binz, K H, and Pluckthun, A. “Engineered proteins as specific binding reagents”. Curr. Op. Biotech. (2005) 16: 459-469; Gebauer, M. and Skerra, A. “Engineered protein scaffolds as next-generation antibody therapeutics”. Curr. Op. Chem. Biol. (2009) 13: 245-255; Lehtio, J., Teeri T. T., and Nygren P. A. “Alpha-Amylase Inhibitors Selected From a Combinatorial Library of a Cellulose Binding Domain Scaffold”. Proteins: Struct., Func., Gene., (2000) 41: 316-322; and Olson C A and Roberts R W. “Design, expression, and stability of a diverse protein library based on the human fibronectin type III domain”. Prot. Sci. (2007) 16: 476-484.) As such, the database can be used to identify protein scaffolds that are expected to contain a robust, stable fold with known variable positions or regions, wherein such variable positions or regions can be tailored to match a desired overall amino acid distribution.

[0391] In this experiment, the folds/domains selected for this analysis were ankyrin repeats, Leucine rich repeats, tetratricopeptide repeats, armadillo repeats, fibronectine type III domains, lipocalin-like domains, knottins, cellulose binding domains, carbohydrate binding domains, protein Z folds, PDZ domains, SH3 domains, SH2 domains, WW domains, thioredoxins, Leucine zipper, plant homeodomain, tudor domain, and hydrophobins.

[0392] Representative proteins that include each type of fold/domain are presented in Appendix B.

[0393] To identify candidate folds/domains in proteins believed or known to be secreted by species belonging to the Aspergillus, Trichoderma, Penicillium, Chrysosporium, Trametes, and Rhizopus fungal genera, possible conserved domains were identified using the reverse position specific blast (rpsblast) algorithm, as implemented in the NCBI Blast toolkit v2.2.26+(Marchler-Bauer 2004, Altschul 1997). The following default parameters were used to screen the secretome proteins for those genera listed in Appendix A: a gap opening penalty of −11, gap extension penalty or −1, an e-value cutoff of 1 and the BLOSUM62 scoring matrix.

[0394] Using this procedure, proteins comprising at least one of the folds/domains of interest were identified. When the database of sequences was searched using the RPSblast algorithm, hits were defined by both a fold/domain as well as a sequence range that best matches that fold/domain. It was determined that these sequence bookends often don't cover the entire range of the fold, so the protein sequences were checked and the domains expanded or reduced by reference to the crystal structure, which usually provided a clearer picture of where a fold starts and/or ends.

[0395] The four tables list identified proteins that comprise cellulose binding domains, carbohydrate binding modules, fibronectin type III domains, and hydrophobins.

[0396] Cellulose Binding Domains:

| | UniProt Accessions |
|---|---|
| Hit Name | (binding domain locations start:end) |
| Acetylxylan esterase A | Q4WBW4 (339:371), Q99034 (270:302), |
| | A1DBP9 (335:368), Q8NJP6 (349:382) |
| 1,4-beta-D-glucan | A1CU44 (507:539), B0Y8K2 (500:532), |
| cellobiohydrolase B | Q4WM08 (500:532), Q0CMT2 (509:541), |
| | Q8NK02 (494:526), A1DNL0 (498:530) |
| 1,4-beta-D-glucan | A1CCN4 (24:54), B0XWL3 (22:55), |
| cellobiohydrolase C | Q4WFK4 (22:55), A2QYR9 (21:53), |
| | Q0CFP1 (23:54), Q5B2E8 (22:55), |
| | A1DJQ7 (22:55) |
| endo-beta-1,4-glucanase | A1C4H2 (318:351), B0Y9G4 (316:347), |
| D | B8MXJ7 (332:365), Q4WBU0 (316:347), |
| | Q96WQ9 (372:405), A2R5N0 (378:409), |
| | Q2US83 (332:365), Q0CEU4 (327:358), |
| | Q5BCX8 (324:355), A1DBS6 (315:346) |
| Feruloyl esterase B | Q9HE18 (320:353) |
| Endoglucanase-4 | O14405 (311:343) |
| Exoglucanase 1 and 2 | P62694 (481:513), Q06886 (506:537), |
| | P13860 (485:516), Q9P8P3 (472:505), |
| | P62695 (481:513), P07987 (30:62) |
| Mannan endo-1,4-beta- | A1C8U0 (21:54), B0Y9E7 (21:54), |
| mannosidase F | B8NIV9 (21:54), Q4WBS1 (21:54), |
| | Q2U2I3 (21:54), Q5AR04 (20:53), |
| | A1DBV1 (21:54) |

[0397] Carbohydrate Binding Modules:

| | UniProt Accessions |
|---|---|
| Hit Name | (binding module locations start:end) |
| Alpha-galactosidase | B0YEK2 (497:646), B8N7Z0 (505:654), |
| D (CBM35) | A4DA70 (497:646), A2R2S6 (508:658), |
| | Q2UI87 (507:656), Q0CVX4 (504:653), |
| | Q5AX28 (506:657), A1D9S3 (497:646) |
| Alpha-glucuronidase | A1CC12 (698:833), B0Y2K1 (698:833), |
| A (CBM6) | Q4WW45 (698:833), Q5AQZ4 (705:840), |
| | Q99024 (709:840) |
| Chitinase 1 and 2 | P29026 (353:398), P29027 (355:400) |
| (CBD19) | |
| Glucoamylase | P69328 (547:639), P69327 (543:634), |
| (CBM20) | P36914 (513:603), P23176 (542:638), |
| | P22832 (542:638), A2QHE1 (543:639) |

[0398] Fibronectin Type III Domains:

| | UniProt Accessions |
|---|---|
| Hit Name | (domain locations start:end) |
| beta-glucosidase A | A1CR85(786:854), B0XPE1(792:860), |
| | B8NRX2 (780:848), Q4WJJ3 (792:860), |
| | P87076 (779:847), A2RAL4 (779:847), |
| | Q2UUD6 (780:848), D0VKF5 (780:848), |
| | Q0CTD7 (780:848), Q5B5S8 (782:850), |
| | A1D451 (792:860) |
| beta-glucosidase D | B8NJF4 (668:737), A2QPK4 (670:739), |
| | Q2UNR0 (668:737), Q5AUW5 (728:797) |
| beta-glucosidase F | B0Y7Q8 (781:853), B8NP65 (777:850), |
| | Q4WMU3 (781:853), Q2UN12 (777:850), |
| | Q0CI67 (778:851), Q5B6C6 (779:852), |
| | A1DMR8 (781:853) |
| beta-glucosidase G | B8NMR5 (731:801), Q2U325 (731:801), |
| | Q0CUC1 (731:801), Q5B0F4 (735:805), |
| | A1DC16 (731:801) |
| beta-glucosidase | A1CUR8 (742:809), B0XM94 (742:809), |
| H, I, J | B8NPL7 (738:807), Q4WL79 (742:809), |
| | Q2U9M7 (738:807), Q5B6C7 (742:811), |
| | A1DPG0 (742:809), A1CA51 (748:815), |
| | B0Y3M6 (748:815), B8NDE2 (749:809), |
| | Q4WU49 (748:815), A2R989 (728:795), |
| | Q2U8Y5 (749:816), Q0CAF5 (749:816), |
| | Q5BB53 (749:816), A1DFA8 (748:815), |
| | B0Y8M8 (772:844), Q4WLY1 (772:844), |
| | Q5AV15 (758:826), A1DNN8 (771:843) |
| beta-glucosidase K | Q5BA18 (746:818) |
| beta-glucosidase | B0YB65 (654:724), Q4WGT3 (654:724), |
| L, M, N, O | Q0CEF3 (655:725), Q5B9F2 (656:726), |
| | A1DCV5 (654:724), B0XPB8 (692:758), |
| | B8N5S6 (691:757), Q4WR62 (692:758), |
| | A5ABF5 (688:754), Q2UDK7 (691:757), |
| | Q0C7L4 (705:771), Q5AWD4 (695:761), |
| | A1D122 (692:758), Q5B681 (587:656), |
| | Q5BG51 (477:516) |
| exo-1,4-beta-xylosidase | A1CCL9 (674:740), Q0CB82 (666:732), |
| bxlB | Q5ATH9 (666:732) |
| exo-1,4-beta-xylosidase | Q4AEG8 (728:776), B0XP71 (695:758), |
| bxlD | B8MYV0 (700:763), Q4WRB0 (695:758), |
| | A2QA27 (728:776), O00089 (728:776), |
| | Q2UR38 (701:764), Q0CMH8 (695:758), |
| | Q5BAS1 (692:755) |
| Chitinase 1 and 2 | P29026 (34:304), P29027 (34:299) |
| 42 kDa endochitinase | P48827 (43:291) |
| Alkaline protease 1 | A1CIA7 (186:363), B0Y708 (153:363), |
| | P35211 (187:364), B8N106 (153:360), |
| | P28296 (153:363), P12547 (153:360), |
| | Q00208 (152:359), A1CWF3 (153:363) |

[0399] Hydrophobins:

| | UniProt Accessions |
|---|---|
| Hit Name | (hydrophobin location start:end) |
| Hydrophobin dewA | P52750 |
| Hydrophobin-1,2 | P52754 (29:94), P79073 (18:82) |
| Cell wall protein qid3 | P52755 (73:123) |
| Hydrophobin | P41746 (58:156) |
| Rodlet Protein | P28346 (59:154) |

### Example 3

### Identification of Amino Acid Positions in Reference Secreted Proteins for Substitution—Methods

[0400] Positions in reference secreted proteins for substitution with nutritive amino acids were identified by analyzing position amino acid likelihood, position entropy, mutation effect on relative folding free energy, and secondary structure type.

[0401] Position Amino Acid Likelihood

[0402] For a given query protein sequence, homologous proteins were identified by performing local sequence alignments of the query with NCBI's library of non-redundant proteins. The initial local alignments were performed using the blastp program from the NCBI toolkit v.2.2.26+(Altschul S. F., Gish W., Miller W., Myers E. W., and Lipman D. J. “Basic Local Alignment Search Tool”. J. Mol. Biol. (1990) 215: 403-410) with an e-value cutoff of 1, a gap opening penalty of −11, a gap extension penalty of −1, and the BLOSUM62 scoring matrix. The multiple sequence alignment of the resulting library was performed using the Align123 algorithm as implemented in Discovery Studio v3.1 (Accelrys Software Inc., Discovery Studio Modeling Environment, Release 3.1, San Diego: Accelrys Software Inc., 2012). Residue secondary structure was assigned using the DSC algorithm (King R. D., Sternberg M. J. E. “Identification and application of the concepts important for accurate and reliable protein secondary structure prediction”. Prot. Sci. (1996) 5: 2298-2310) with a weight of 1. Pairwise alignments were performed using the Smith and Waterman algorithm with a Gap opening penalty of −10 and gap extension penalty of −0.1, and the BLOSUM30 scoring matrix. Higher order alignments used the BLOSUM scoring matrix set, a gap opening penalty of −10, a gap extension penalty of −0.5, and an alignment delay identity cutoff (delay divergent parameter) of 40%.

[0403] All proteins with a local alignment expectation value less than 1 (from 75 to 1000 unique hits) were identified and aligned to generate a multiple sequence alignment (MSA). The proteins used for each MSA are presented in Appendix C.

[0404] From this MSA, the probability of observing each amino acid (or member of a group of amino acids) at each position in the protein sequence was computed using MATLAB 2012a software. For a given position, the likelihood of any given amino acid (or group of amino acids) is equal to the probability of observing that amino acid (or group of amino acids) across all sequences in the MSA. From this data, a rank ordered list of positions that are expected to be tolerant to each given amino acid substitution was generated for the protein. The rank ordered tables were then analyzed to assess the number of substitutions necessary to achieve a given increase in nutritive amino acid content.

[0405] In the examples disclosed herein, substitutions of Leu for non-Leu amino acids in reference protein sequences were examined That is, non-Leu amino acids in reference proteins were replaced with Leu amino acids. As one of skill in the art will appreciate, this approach can be broadly applied to any amino acid or group of amino acids (e.g., essential amino acids or branched chain amino acids, or the specific branch chain amino acids Ile or Val).

[0406] The rank ordered tables can be used to generate engineered versions of a reference protein in which one or more non-Leu residue that appears at a position with a Leu-likelihood score of at least a given threshold is substituted with a Leu amino acid. In the examples presented below all possible thresholds were examined and the results are presented graphically. To generate an engineered version of a reference protein corresponding to a Leu likelihood threshold of 0.6, for example, the non-Leu amino acids in the reference protein with Leu likelihood scores of at least 0.6 were identified and replaced with Leu to generate an engineered protein sequence comprising an increased number of Leu amino acids.

[0407] Without wishing to be bound to any particular theory, it is believed that positions in the reference protein that do not have a Leu amino acid but that correspond to Leu amino acids in homologous proteins are likely to tolerate replacement of the non-Leu amino acid with a Leu amino acid. Alternatively, the branched chain amino acid (BCAA) likelihood score of each amino acid position in the reference protein can be calculated as described above, then the positions in the reference protein that do not have a Leu amino acid but correspond to a particular frequency of occurrence of any BCAA in homologous proteins can be identified and replaced with Leu. Another strategy is to calculate the hydrophobic amino acid likelihood score (wherein the hydrophobic amino acids consist of Ala, Met, Ile, Leu, and Val) of each amino acid position in the reference protein as described above, then the positions in the reference protein that do not have a Leu amino acid but correspond to a particular frequency of occurrence of any hydrophobic amino acid in homologous proteins can be identified and replaced with Leu.

[0408] Position Entropy

[0409] The multiple sequence alignments were also used to compute the entropy of each amino acid position in a given reference amino acid sequence using the full amino acid alphabet, AA=[A, R, N, D, C, Q, E, G, H, I, L, K, M, F, P, S, T, W, Y, V]:

S=−Σ_{jεAA}pⱼ ln pⱼ

[0410] where pⱼ is the probability of seeing the amino acid j at that position. The entropy of each position was computed using the equation shown above using in-house code implemented in MATLAB2012a. This is a measure of the spread of the amino acid distribution. Highly variable positions will have large entropies (the maximum entropy at a position corresponds to each amino acid being equally likely, which yields an entropy of 2.996) and highly conserved positions will have an entropy close to 0.

[0411] Each amino acid residue in the protein was then rank ordered based on the calculated entropy to find positions that were likely tolerant to a variety of substitutions. For a desired amino acid enrichment, the number of mutations needed was determined as well as the probability of the least likely mutation to achieve a given amino acid fraction or nutritive content (e.g., essential amino acid content or branched chain amino acid content) by weight.

[0412] In a variation on this method, the same analysis was repeated, but instead of using the full amino acid alphabet to calculate the position entropy, amino acids were grouped based on physiochemical properties as follows: hydrophobic [A, V, I, L, M], aromatic [F, Y, W], polar [S, T, N, Q], charged [R, H, K, D, E], and non-classified [G, P, C]. As described above, each amino acid residue in the protein was then rank ordered based on the calculated entropy to find positions that were likely tolerant to a variety of substitutions. For a desired amino acid enrichment, the number of mutations needed was determined as well as the probability of the least likely mutation to achieve a given amino acid fraction or nutritive content (e.g., essential amino acid content or branched chain amino acid content) by weight. Using this physiochemical alphabet, pⱼ now corresponds to the probability of seeing each amino acid type (hydrophobic, aromatic, polar, charged, or non-classified) at position j. These amino acid type (AAType) probabilities are the sum of the probabilities of seeing each amino acid of that type. The equation for the position entropy stays the same, although the theoretical maximum is now ln(5)≈1.6.

[0413] Relative Folding Free Energy

[0414] Without wishing to be bound to any particular theory, it is believed that a given secreted protein that is engineered according to the methods described herein will continue to be secreted as long as it has a functional secretion leader sequence and maintains a stable, similar structural fold upon mutation. Accordingly, to analyze the effect on relative folding free energy of making amino acid substitutions to a reference secreted protein to modify its nutritive properties, an all atom structural model of the protein was constructed based on the structure of known structural homologues. All structural models and free energy calculations were performed using Discovery Studio v3.1 (Accelrys Software Inc., Discovery Studio Modeling Environment, Release 3.1, San Diego: Accelrys Software Inc., 2012). When possible, protein structural models were obtained from the protein databank (H. M. Berman, K. Henrick, H. Nakamura. “Announcing the worldwide Protein Data Bank Nature Structural Biology”. Nat. Struct. Biol. (2003) 10: 98). If a protein model was not available in the protein database, a model was constructed using the closest available structural homologue using the homology modeling software MODELLER (Eswar, N.; Eramian, D.; Webb, B.; Shen, M. Y.; Sali, A. “Protein structure modeling with MODELLER”. Methods Mol. Biol. (2008) 426: 145-159) as implemented in Discovery Studio v3.1 (Accelrys Software Inc., Discovery Studio Modeling Environment, Release 3.1, San Diego: Accelrys Software Inc., 2012). All energies were computed with the CHARMM software package (Brooks, B. R.; Brooks, C. L. 3rd; Mackerell, A. D. Jr.; Nilsson, L.; Petrella, R. J.; Roux, B.; Won, Y.; Archontis, G.; Bartels, C.; Boresch, S.; Caflisch, A.; Caves, L.; Cui, Q.; Dinner, A. R.; Feig, M.; Fischer, S.; Gao, J.; Hodoscek, M.; Im, W.; Kuczera, K.; Lazaridis, T.; Ma, J.; Ovchinnikov, V.; Paci, E.; Pastor, R. W.; Post, C. B.; Pu, J. Z.; Schaefer, M.; Tidor, B.; Venable, R. M.; Woodcock, H. L.; Wu, X.; Yang, W.; York, D. M.; Karplus, M. “CHARMM: the biomolecular simulation program”. J. Comput. Chem. (2009) 30: 1545-1614) and CHARMm polar hydrogen forcefield, as implemented in Discovery Studio v3.1 (Accelrys 2012), using a generalized born electrostatic model (Spassov V. Z., Yan L., and Szalma S. “Introducing an Implicit Membrane in Generalized Born/Solvent Accessibility Continuum Solvent Models”. J. Phys. Chem. B. (2002) 106: 8726-8738.) and empirical configurational entropy model (Abagyan R. and Totrov M. “Biased Probability Monte Carlo Conformational Searches and Electrostatic Calculations for Peptides and Proteins”. J. Mol. Biol. (1994) 235: 983-1002).

[0415] For each position, the free energy of folding (ΔΔG_{fold}) for all possible single amino acid mutations relative to the wild type folding free energy was computed. Each amino acid substitution was then rank ordered based on its predicted effect on folding stability. We also decomposed each ΔΔG_{fold} into contributions from van der Waals, electrostatic, and thermodynamic entropic free energy changes. In the absence of having the ΔΔG_{fold} for all possible mutation combinations, knowing how each mutation affects each free energy component offers a way of reducing possible errors with using in silico predictions. When selecting a number of mutations to make to a single protein, one consideration is minimizing ΔΔG_{fold}, however in some cases multiple mutations with comparable changes to ΔΔG_{fold} are available. Given possible imperfections in the in silico model, it is possible that for a given protein, one component of the calculated energy change is more predictive than another. As such, the likelihood of finding a successful combination of mutants is increased by selecting a combination that affects the free energy change in different ways.

[0416] Secondary Structure Type

[0417] Given a structural model for a given protein, loop residues were identified using the DSC algorithm (King R. D., Sternberg M. J. E. “Identification and application of the concepts important for accurate and reliable protein secondary structure prediction”. Prot. Sci. (1996) 5: 2298-2310), as these residues are not a part of any specific backbone hydrogen bonding pattern (i.e. devoid of secondary structure) and often show significant structural variability (Shehu, A.; Kavraki, L. E. Modeling Structures and Motions of Loops in Protein Molecules. Entropy 2012, 14, 252-290.). Additionally, these sites are often the source of functional variability in protein-protein or protein-ligand interactions (Lehtio, J., Teeri T. T., and Nygren P. A. “Alpha-Amylase Inhibitors Selected From a Combinatorial Library of a Cellulose Binding Domain Scaffold”. Proteins: Struct., Func., Gene., (2000) 41: 316-322; Bloom L. and Calabro V. “FN3: a new protein scaffold reaches the clinic”. Drug Disc. Today (14): 949:955; Hackel B. J., Kapila A., and Wittrup K. D. “Picomolar Affinity Fibronectin Domains Engineered Utilizing Loop Length Diversity, Recursive Mutagenesis, and Loop Shuffling”. J. Mol. Biol. (2008) 381: 1238-1252; and Olson C A and Roberts R W. “Design, expression, and stability of a diverse protein library based on the human fibronectin type III domain”. Prot. Sci. (2007) 16: 476-484), and site directed mutagenesis of these residues can cause changes in binding specificity without significantly affecting stability. As such, the primary and tertiary structural plasticity of these positions make them high priority positions for sequence variation to improve nutritional content.

### Example 4

### Identification of Amino Acid Positions for Substitution in the A. niger Glucoamylase Protein (SEQ ID NO: 1)

[0418] Glucoamylase from A. niger (SEQ ID NO: 1) contains 7.4% by weight Leu, 17.4% by weight branch chain amino acids, and 42.2% by weight essential amino acids.

[0419] FIG. 1A analyzes the amino acid content (by weight) of engineered proteins generated by replacing all non-Leu amino acids that occur at amino acid positions identified using different Leu likelihood thresholds from 0 to 1. Specifically, the weight fraction of Leu, BCAAs, and EAAs in SEQ ID NO: 1 are shown. In the top panel, the likelihood threshold for making amino acid replacements is presented on the X-axis. Thus the value 0.6 on the X-axis, for example, represents an engineered protein sequence created by identifying every amino acid position in SEQ ID NO: 1 having a Leu-likelihood score of at least 0.6 and replacing all non-Leu amino acids appearing at one of those positions with a Leu amino acid. In the top panel, the fraction by weight of Leu, BCAA, and EAA in the protein following any necessary Leu replacements is shown on the Y-axis. In the bottom panel the Y-axis indicates the total of number of Leu replacements made to a protein when every amino acid position that has a given Leu likelihood score on the X-axis is occupied by a Leu amino acid in the engineered protein. The top and bottom panels of FIG. 1B present a close-up view of the data for Leu likelihood scores of 0 to 0.3 (i.e., the left portion of the graphs shown in FIG. 1A).

[0420] This analysis was repeated, but instead of calculating Leu likelihood to identify amino acid positions for mutation, BCAA likelihood (FIG. 1C) and hydrophobic amino acid likelihood (FIG. 1D) were calculated and every non-Leu amino acid at the identified positions was replaced with a Leu amino acid. As expected, these two less stringent screens lead to replacement of more non-Leu amino acids with Leu at each likelihood cut off.

[0421] The analysis was then repeated using position entropy instead of amino acid likelihood to rank amino acid positions for substitution by Leu. Results obtained when position entropy was calculated using the frequency of each amino acid at each position are presented in FIG. 2A and when position entropy was calculated using the frequency of amino acid type at each position in FIG. 2B.

[0422] The free energy of folding (ΔΔG_{fold}) for all possible single amino acid mutations of non-Leu amino acids in SEQ ID NO: 1 to Leu, relative to the wild type free energy of folding in SEQ ID NO: 1, was calculatede. Each amino acid substitution was then rank ordered based on its predicted effect on folding stability. The results are shown in FIG. 3A, top panel. We also decomposed each ΔΔG_{fold} into contributions from van der Waals, electrostatic, and thermodynamic entropic free energy changes. (FIG. 3A, lower three panels.) Given all mutations that are predicted to result in a favorable free energy of folding (ΔΔG_{fold}<0), 21% are driven by VDW energy changes, 76% by electrostatic energy changes, and 3% by entropic free energy changes. As such, while the majority of mutations are predicted to improve stability through favorable vdw changes, many are driven by electrostatic changes, and a balanced, hedged approach would involve selecting mutants that improve both vdw as well as electrostatics.

[0423] For each amino acid in SEQ ID NO: 1, the loop ID (1=loop; 0=non-loop), Leu likelihood, BCAA likelihood, EAA likelihood, hydrophobic amino acid likelihood, amino acid position entropy, amino acid type position entropy, total free energy of folding (ΔΔG_{fold}) (for substitution by Leu), the van der Waals free energy change contribution to total free energy of folding (ΔΔGfold VDW) (for substitution by Leu), the electrostatic free energy change contribution to total free energy of folding (ΔΔGfold Elec) (for substitution by Leu), and the thermodynamic entropic free energy change contribution to total free energy of folding (ΔΔGfold Entropy) (for substitution by Leu) was calculated. The results are shown in Table 1 in Appendix D.

### Example 5

### Identification of Amino Acid Positions for Substitution in the A. niger Endo-Beta-1,4-Glucanase Protein (SEQ ID NO: 2)

[0424] Endo-beta-1,4-glucanase from A. niger (SEQ ID NO: 2) contains 6.2% by weight Leu, 16.5% by weight branch chain amino acids, and 45.6% by weight essential amino acids.

[0425] FIG. 4A analyzes the amino acid content (by weight) of engineered proteins generated by replacing all non-Leu amino acids that occur at amino acid positions identified using different Leu likelihood thresholds from 0 to 1. Specifically, the weight fraction of Leu, BCAAs, and EAAs in SEQ ID NO: 2 are shown. In the top panel, the likelihood threshold for making amino acid replacements is presented on the X-axis. So the value 0.6 on the X-axis, for example, represents an engineered protein sequence created by identifying every amino acid position in SEQ ID NO: 2 having a Leu-likelihood score of at least 0.6 and replacing all non-Leu amino acids appearing at one of those positions with a Leu amino acid. In the top panel, the fraction by weight of Leu, BCAA, and EAA in the protein following the making of any necessary Leu replacements is shown on the Y-axis. In the bottom panel the Y-axis indicates the total of number of Leu replacements made to a protein when every amino acid position that has a given Leu likelihood score on the X-axis is occupied by a Leu amino acid in the engineered protein. The top and bottom panels of FIG. 4B present a close-up view of the left end of the graphs (for Leu likelihood scores of 0 to 0.3) shown in FIG. 4A.

[0426] This analysis was repeated, but instead of assessing Leu likelihood to identify amino acid positions for mutation the BCAA likelihood and hydrophobic amino acid likelihood in the MSA data was used to identify amino acid positions, and then replaced every non-Leu amino acid at an identified position replaced with a Leu amino acid. The results are presented in FIG. 4C (BCAA probability) and FIG. 4D (position entropy). As expected, these two less stringent screens lead to replacement of more non-Leu amino acids with Leu at each likelihood cut off.

[0427] The same analysis was repeated, using position entropy instead of raw amino acid likelihood to rank amino acid positions for substitution by Leu. Results obtained when position entropy was calculated using the frequency of each amino acid at each position are presented in FIG. 5A and when position entropy was calculated using the frequency of amino acid type at each position in FIG. 5B.

[0428] The free energy of folding (ΔΔG_{fold}) was also calculated for all possible single amino acid mutations of non-Leu amino acids in SEQ ID NO: 2 to Leu, relative to the wild type free energy of folding in SEQ ID NO: 2. For each amino acid substitution, the positions were then rank ordered based on their predicted effect on folding stability. The results are shown in FIG. 6.

[0429] For each amino acid in SEQ ID NO: 2, the loop ID (1=loop; 0=non-loop), Leu likelihood, BCAA likelihood, EAA likelihood, hydrophobic amino acid likelihood, amino acid position entropy, amino acid type position entropy, total free energy of folding (ΔΔG_{fold}) (for substitution by Leu), the van der Waals free energy change contribution to total free energy of folding (ΔΔGfold VDW) (for substitution by Leu), the electrostatic free energy change contribution to total free energy of folding (ΔΔGfold Elec) (for substitution by Leu), and the thermodynamic entropic free energy change contribution to total free energy of folding (ΔΔGfold Entropy) (for substitution by Leu) was calculated. The results are shown in Table 2 in Appendix D.

### Example 5

### Identification of Amino Acid Positions for Substitution in the A. niger 1,4-beta-D-glucan cellobiohydrolase Protein (SEQ ID NO: 3)

[0430] 1,4-beta-D-glucan cellobiohydrolase from A. niger (SEQ ID NO: 3) contains 5.5% by weight Leu, 13.1% by weight branch chain amino acids, and 37.7% by weight essential amino acids.

[0431] FIG. 7A analyzes the amino acid content (by weight) of engineered proteins generated by replacing all non-Leu amino acids that occur at amino acid positions identified using different Leu likelihood thresholds from 0 to 1. Specifically, the weight fraction of Leu, BCAAs, and EAAs in SEQ ID NO: 3 are shown. In the top panel, the likelihood threshold for making amino acid replacements is presented on the X-axis. So the value 0.6 on the X-axis, for example, represents an engineered protein sequence created by identifying every amino acid position in SEQ ID NO: 3 having a Leu-likelihood score of at least 0.6 and replacing all non-Leu amino acids appearing at one of those positions with a Leu amino acid. In the top panel, the fraction by weight of Leu, BCAA, and EAA in the protein following the making of any necessary Leu replacements is shown on the Y-axis. In the bottom panel the Y-axis indicates the total of number of Leu replacements made to a protein when every amino acid position that has a given Leu likelihood score on the X-axis is occupied by a Leu amino acid in the engineered protein. The top and bottom panels of FIG. 7B present a close-up view of the left end of the graphs (for Leu likelihood scores of 0 to 0.3) shown in FIG. 7A.

[0432] This analysis was repeated, but instead of assessing Leu likelihood to identify amino acid positions for mutation the BCAA likelihood and hydrophobic amino acid likelihood in the MSA data was measured to identify amino acid positions, and then every non-Leu amino acid at identified positions was replaced with a Leu amino acid. The results are presented in FIG. 7C (BCAA likelihood) and FIG. 7D (hydrophobic amino acid likelihood). As expected, these two less stringent screens lead to replacement of more non-Leu amino acids with Leu at each likelihood cut off.

[0433] The same analysis was repeated, using position entropy instead of raw amino acid likelihood to rank amino acid positions for substitution by Leu. Results obtained when position entropy was calculated using the frequency of each amino acid at each position are presented in FIG. 8A and when position entropy was calculated using the frequency of amino acid type at each position in FIG. 8B.

[0434] The free energy of folding (ΔΔG_{fold}) for all possible single amino acid mutations of non-Leu amino acids in SEQ ID NO: 3 to Leu, relative to the wild type free energy of folding in SEQ ID NO: 3, was also calculated. For each amino acid substitution, the positions were rank ordered based on their predicted effect on folding stability. The results are shown in FIG. 9.

[0435] For each amino acid in SEQ ID NO: 3, the loop ID (1=loop; 0=non-loop), Leu likelihood, BCAA likelihood, EAA likelihood, hydrophobic amino acid likelihood, amino acid position entropy, amino acid type position entropy, total free energy of folding (ΔΔG_{fold}) (for substitution by Leu), the van der Waals free energy change contribution to total free energy of folding (ΔΔGfold VDW) (for substitution by Leu), the electrostatic free energy change contribution to total free energy of folding (ΔΔGfold Elec) (for substitution by Leu), and the thermodynamic entropic free energy change contribution to total free energy of folding (ΔΔGfold Entropy) (for substitution by Leu) were calculated. The results are shown in Table 3 in Appendix D.

### Example 6

### Identification of Amino Acid Positions for Substitution in the A. niger Endo-1,4-beta-xylanase Protein (SEQ ID NO: 4)

[0436] Endo-1,4-beta-xylanase from A. niger (SEQ ID NO: 4) contains 2.2% by weight Leu, 12.6% by weight branch chain amino acids, and 37.4% by weight essential amino acids.

[0437] FIG. 10A analyzes the amino acid content (by weight) of engineered proteins generated by replacing all non-Leu amino acids that occur at amino acid positions identified using different Leu likelihood thresholds from 0 to 1. Specifically, the weight fraction of Leu, BCAAs, and EAAs in SEQ ID NO: 4 are shown. In the top panel, the likelihood threshold for making amino acid replacements is presented on the X-axis. So the value 0.6 on the X-axis, for example, represents an engineered protein sequence created by identifying every amino acid position in SEQ ID NO: 4 having a Leu-likelihood score of at least 0.6 and replacing all non-Leu amino acids appearing at one of those positions with a Leu amino acid. In the top panel, the fraction by weight of Leu, BCAA, and EAA in the protein following the making of any necessary Leu replacements is shown on the Y-axis. In the bottom panel the Y-axis indicates the total of number of Leu replacements made to a protein when every amino acid position that has a given Leu likelihood score on the X-axis is occupied by a Leu amino acid in the engineered protein. The top and bottom panels of FIG. 10B present a close-up view of the left end of the graphs (for Leu likelihood scores of 0 to 0.3) shown in FIG. 10A.

[0438] This analysis was repeated, but instead of assessing Leu likelihood to identify amino acid positions for mutation BCAA likelihood and hydrophobic amino acid likelihood was measured in the MSA data to identify amino acid positions, and then very non-Leu amino acid at identified positions was replaced with a Leu amino acid. The results are presented in FIG. 10C (BCAA likelihood) and FIG. 10D (hydrophobic amino acid likelihood). As expected, these two less stringent screens lead to replacement of more non-Leu amino acids with Leu at each likelihood cut off.

[0439] The same analysis was repeated, using position entropy instead of raw amino acid likelihood to rank amino acid positions for substitution by Leu. Results obtained when position entropy was calculated using the frequency of each amino acid at each position are presented in FIG. 11A and when position entropy was calculated using the frequency of amino acid type at each position in FIG. 11B.

[0440] The free energy of folding (ΔΔG_{fold}) for all possible single amino acid mutations of non-Leu amino acids in SEQ ID NO: 4 to Leu, relative to the wild type free energy of folding in SEQ ID NO: 4 was also calculated. For each amino acid substitution, the positions were rank ordered based on their predicted effect on folding stability. The results are shown in FIG. 12.

[0441] For each amino acid in SEQ ID NO: 4, the loop ID (1=loop; 0=non-loop), Leu likelihood, BCAA likelihood, EAA likelihood, hydrophobic amino acid likelihood, amino acid position entropy, amino acid type position entropy, total free energy of folding (ΔΔG_{fold}) (for substitution by Leu), the van der Waals free energy change contribution to total free energy of folding (ΔΔGfold VDW) (for substitution by Leu), the electrostatic free energy change contribution to total free energy of folding (ΔΔGfold Elec) (for substitution by Leu), and the thermodynamic entropic free energy change contribution to total free energy of folding (ΔΔGfold Entropy) (for substitution by Leu) were calculated. The results are shown in Table 4 in Appendix D.

### Example 7

### Identification of Amino Acid Positions for Substitution in the A. niger Cellulose Binding Domain 1 Protein (SEQ ID NO: 5)

[0442] Cellulose binding domain 1 from A. niger (SEQ ID NO: 5) contains 3.0% by weight Leu, 5.6% by weight branch chain amino acids, and 23.8% by weight essential amino acids.

[0443] FIG. 13A analyzes the amino acid content (by weight) of engineered proteins generated by replacing all non-Leu amino acids that occur at amino acid positions identified using different Leu likelihood thresholds from 0 to 1. Specifically, the weight fraction of Leu, BCAAs, and EAAs in SEQ ID NO: 5 are shown. In the top panel, the likelihood threshold for making amino acid replacements is presented on the X-axis. So the value 0.6 on the X-axis, for example, represents an engineered protein sequence created by identifying every amino acid position in SEQ ID NO: 5 having a Leu-likelihood score of at least 0.6 and replacing all non-Leu amino acids appearing at one of those positions with a Leu amino acid. In the top panel, the fraction by weight of Leu, BCAA, and EAA in the protein following the making of any necessary Leu replacements is shown on the Y-axis. In the bottom panel the Y-axis indicates the total of number of Leu replacements made to a protein when every amino acid position that has a given Leu likelihood score on the X-axis is occupied by a Leu amino acid in the engineered protein. The top and bottom panels of FIG. 13B present a close-up view of the left end of the graphs (for Leu likelihood scores of 0 to 0.3) shown in FIG. 13A.

[0444] This analysis was repeated, but instead of assessing Leu likelihood to identify amino acid positions for mutation BCAA likelihood and hydrophobic amino acid likelihood were measured in the MSA data to identify amino acid positions, and every non-Leu amino acid at identified positions was replaced with a Leu amino acid. The results are presented in FIG. 13C (BCAA likelihood) and FIG. 13D (hydrophobic amino acid likelihood). As expected, these two less stringent screens lead to replacement of more non-Leu amino acids with Leu at each likelihood cut off.

[0445] The same analysis was repeated, using position entropy instead of raw amino acid likelihood to rank amino acid positions for substitution by Leu. Results obtained when position entropy was calculated using the frequency of each amino acid at each position are presented in FIG. 14A and when position entropy was calculated using the frequency of amino acid type at each position in FIG. 14B.

[0446] The free energy of folding (ΔΔG_{fold}) for all possible single amino acid mutations of non-Leu amino acids in SEQ ID NO: 5 to Leu, relative to the wild type free energy of folding in SEQ ID NO: 5 was also computed. For each amino acid substitution, the positions were rank ordered based on their predicted effect on folding stability. The results are shown in FIG. 15.

[0447] For each amino acid in SEQ ID NO: 5, the loop ID (1=loop; 0=non-loop), Leu likelihood, BCAA likelihood, EAA likelihood, hydrophobic amino acid likelihood, amino acid position entropy, amino acid type position entropy, total free energy of folding (ΔΔG_{fold}) (for substitution by Leu), the van der Waals free energy change contribution to total free energy of folding (ΔΔGfold VDW) (for substitution by Leu), the electrostatic free energy change contribution to total free energy of folding (ΔΔGfold Elec) (for substitution by Leu), and the thermodynamic entropic free energy change contribution to total free energy of folding (ΔΔGfold Entropy) (for substitution by Leu) were calculated. The results are shown in Table 5 in Appendix D.

### Example 8

### Identification of Amino Acid Positions for Substitution in the A. niger Carbohydrate Binding Module 20 Protein (SEQ ID NO: 6)

[0448] Carbohydrate binding module 20 protein from A. niger (SEQ ID NO: 6) contains 5.7% by weight Leu, 17.2% by weight branch chain amino acids, and 44.6% by weight essential amino acids.

[0449] FIG. 16A analyzes the amino acid content (by weight) of engineered proteins generated by replacing all non-Leu amino acids that occur at amino acid positions identified using different Leu likelihood thresholds from 0 to 1. Specifically, the weight fraction of Leu, BCAAs, and EAAs in SEQ ID NO: 6 are shown. In the top panel, the likelihood threshold for making amino acid replacements is presented on the X-axis. So the value 0.6 on the X-axis, for example, represents an engineered protein sequence created by identifying every amino acid position in SEQ ID NO: 6 having a Leu-likelihood score of at least 0.6 and replacing all non-Leu amino acids appearing at one of those positions with a Leu amino acid. In the top panel, the fraction by weight of Leu, BCAA, and EAA in the protein following the making of any necessary Leu replacements is shown on the Y-axis. In the bottom panel the Y-axis indicates the total of number of Leu replacements made to a protein when every amino acid position that has a given Leu likelihood score on the X-axis is occupied by a Leu amino acid in the engineered protein. The top and bottom panels of FIG. 16B present a close-up view of the left end of the graphs (for Leu likelihood scores of 0 to 0.3) shown in FIG. 16A.

[0450] This analysis was repeated, but instead of assessing Leu likelihood to identify amino acid positions for mutation BCAA likelihood and hydrophobic amino acid likelihood were measured in the MSA data to identify amino acid positions, and every non-Leu amino acid at identified positions was replaced with a Leu amino acid. The results are presented in FIG. 16C (BCAA likelihood) and FIG. 16D (hydrophobic amino acid likelihood). As expected, these two less stringent screens lead to replacement of more non-Leu amino acids with Leu at each likelihood cut off.

[0451] Replacing non-Leu residues with Leu residues increases the Leu content of a reference secreted protein, as well as the BCAA and EAA content. An alternative way to increase the BCAA and EAA content simultaneously is to increase the Val or Ile content of the reference secreted protein. To generate engineered proteins comprising increased Val or Ile content amino acid positions in Carbohydrate binding module 20 protein were identified based on Val likelihood or Ile likelihood. FIG. 17A analyzes the amino acid content (by weight) of engineered proteins generated by replacing all non-Ile amino acids that occur at amino acid positions identified using different Ile likelihood thresholds from 0 to 1. Specifically, the weight fraction of Ile, BCAAs, and EAAs in SEQ ID NO: 6 are shown. In the top panel, the likelihood threshold for making amino acid replacements is presented on the X-axis. So the value 0.6 on the X-axis, for example, represents an engineered protein sequence created by identifying every amino acid position in SEQ ID NO: 6 having an Ile-likelihood score of at least 0.6 and replacing all non-Ile amino acids appearing at one of those positions with an Ile amino acid. In the top panel, the fraction by weight of Ile, BCAA, and EAA in the protein following the making of any necessary Ile replacements is shown on the Y-axis. In the bottom panel the Y-axis indicates the total of number of Ile replacements made to a protein when every amino acid position that has a given Ile likelihood score on the X-axis is occupied by an Ile amino acid in the engineered protein. The top and bottom panels of FIG. 17B present a close-up view of the left end of the graphs (for Ile likelihood scores of 0 to 0.3) shown in FIG. 17A.

[0452] FIGS. 17C and 17D present a corresponding analysis for Val replacement. FIG. 17C analyzes the amino acid content (by weight) of engineered proteins generated by replacing all non-Val amino acids that occur at amino acid positions identified using different Val likelihood thresholds from 0 to 1. Specifically, the weight fraction of Val, BCAAs, and EAAs in SEQ ID NO: 6 are shown. In the top panel, the likelihood threshold for making amino acid replacements is presented on the X-axis. So the value 0.6 on the X-axis, for example, represents an engineered protein sequence created by identifying every amino acid position in SEQ ID NO: X having a Val-likelihood score of at least 0.6 and replacing all non-Val amino acids appearing at one of those positions with a Val amino acid. In the top panel, the fraction by weight of Val, BCAA, and EAA in the protein following the making of any necessary Val replacements is shown on the Y-axis. In the bottom panel the Y-axis indicates the total of number of Val replacements made to a protein when every amino acid position that has a given Val likelihood score on the X-axis is occupied by a Val amino acid in the engineered protein. The top and bottom panels of FIG. 17D present a close-up view of the left end of the graphs (for Ile likelihood scores of 0 to 0.3) shown in FIG. 17C.

[0453] For some uses it may be desirable to increase the proportion of a non-BCAA and in some cases of a non-EAA in an engineered secreted protein. Arginine is a conditionally nonessential amino acid, meaning most of the time it can be manufactured by the human body, and does not need to be obtained directly through the diet. The amino acid arginine is known to have a large number of health benefits. See Wu et al. “Arginine metabolism and nutrition in growth health, and disease”. Amino Acids (2009) 37:153-168. AND Wu, G. “Functional Amino Acids in Growth, Reproduction, and Health” Adv. Nutr. (2010) 1: 31-37. A similar approach was applied to increasing the Arg content of Carbohydrate binding module 20 protein. FIG. 18A analyzes the amino acid content (by weight) of engineered proteins generated by replacing all non-Arg amino acids that occur at amino acid positions identified using different Arg likelihood thresholds from 0 to 1. Specifically, the weight fraction of Arg, BCAAs, and EAAs in SEQ ID NO: 6 are shown. In the top panel, the likelihood threshold for making amino acid replacements is presented on the X-axis. So the value 0.6 on the X-axis, for example, represents an engineered protein sequence created by identifying every amino acid position in SEQ ID NO: 6 having an Arg-likelihood score of at least 0.6 and replacing all non-Arg amino acids appearing at one of those positions with an Arg amino acid. In the top panel, the fraction by weight of Arg, BCAA, and EAA in the protein following the making of any necessary Arg replacements is shown on the Y-axis. In the bottom panel the Y-axis indicates the total of number of Arg replacements made to a protein when every amino acid position that has a given Arg likelihood score on the X-axis is occupied by an Arg amino acid in the engineered protein. The top and bottom panels of FIG. 18B present a close-up view of the left end of the graphs (for Arg likelihood scores of 0 to 0.3) shown in FIG. 18A.

[0454] This analysis was repeated, but instead of assessing Arg likelihood to identify amino acid positions for mutation positive amino acid (R, K, H) likelihood and charged amino acid (R, K, H, D, E) likelihood were measured in the MSA data to identify amino acid positions, and then every non-Arg amino acid at identified positions was replaced with an Arg amino acid. The results are presented in FIG. 18C (positive amino acid likelihood) and FIG. 18D (charged amino acid likelihood). As expected, these two less stringent screens lead to replacement of more non-Arg amino acids with Arg at each likelihood cut off.

[0455] The Leu replacement analysis was repeated, using position entropy instead of raw amino acid likelihood to rank amino acid positions for substitution by Leu. Results obtained when position entropy was calculated using the frequency of each amino acid at each position are presented in FIG. 19A and when position entropy was calculated using the frequency of amino acid type at each position in FIG. 19B.

[0456] The free energy of folding (ΔΔG_{fold}) for all possible single amino acid mutations of non-Leu amino acids in SEQ ID NO: 6 to Leu, relative to the wild type free energy of folding in SEQ ID NO: 6 was also computed. For each amino acid substitution, the positions were rank ordered based on their predicted effect on folding stability. The results are shown in FIG. 20.

[0457] The following list presents the percentage of the mutations to Leucine, Valine, Isoleucine, or Arginine that are predicted to have a favorable effect on the relative free energy of folding, that are driven by van der Waals (vdw), electrostatic (elec), and entropic free energy changes:

Leu: 75.0% vdw, 11.3% elec, 13.7% entropic free energy;
Val: 45.1% vdw, 21.0% elec, 33.9% entropic free energy;
Ile: 72.0% vdw, 12.0% elec, 16.0% entropic free energy; and
Arg: 86.3% vdw, 10.0% elec, 3.7% entropic free energy.

[0458] It is interesting to note that there is a significant degree of variability in the major free energy component for any given amino acid mutation, as well as between mutations to different amino acids. Most mutations are favorable due to improved vdw folding energies, but a nontrivial number of mutations are predicted to be favorable due to favorable changes in electrostatic and entropic free energies, especially in the case of Valine. This suggests that there are more strategies available when trying to optimize for higher valine concentrations by differentially affecting the relative free energy of folding components. In this case, the importance of the entropic free energy contributions to the overall relative free energy of folding is consistant with what is expected given the number of rotatable bonds present in each amino acid side chain (Leu=2, Val=1, Ile=2, Arg=4). Replacement of a highly flexible amino acid with a less flexible one results in a favorable relative change in the entropic free energy of folding.

[0459] The free energy of folding (ΔΔG_{fold}) for all possible single amino acid mutations of non-Ile amino acids in SEQ ID NO: 6 to Ile, relative to the wild type free energy of folding in SEQ ID NO: 6 was also computed. For each amino acid substitution, we then rank ordered the positions based on their predicted effect on folding stability. The results are shown in FIG. 21.

[0460] The free energy of folding (ΔΔG_{fold}) for all possible single amino acid mutations of non-Val amino acids in SEQ ID NO: 6 to Val, relative to the wild type free energy of folding in SEQ ID NO: 6 was also computed. For each amino acid substitution, we then rank ordered the positions based on their predicted effect on folding stability. The results are shown in FIG. 22.

[0461] The free energy of folding (ΔΔG_{fold}) for all possible single amino acid mutations of non-Arg amino acids in SEQ ID NO: 6 to Arg, relative to the wild type free energy of folding in SEQ ID NO: 6 was also computed. For each amino acid substitution, we then rank ordered the positions based on their predicted effect on folding stability. The results are shown in FIG. 23.

[0462] For each amino acid in SEQ ID NO: 6, the loop ID (1=loop; 0=non-loop), Leu likelihood, BCAA likelihood, EAA likelihood, hydrophobic amino acid likelihood, amino acid position entropy, amino acid type position entropy, total free energy of folding (ΔΔG_{fold}) (for substitution by Leu), the van der Waals free energy change contribution to total free energy of folding (ΔΔGfold VDW) (for substitution by Leu), the electrostatic free energy change contribution to total free energy of folding (ΔΔGfold Elec) (for substitution by Leu), and the thermodynamic entropic free energy change contribution to total free energy of folding (ΔΔGfold Entropy) (for substitution by Leu) was calculated. The results are shown in Table 6A in Appendix D.

[0463] For each amino acid in SEQ ID NO: 6, the loop ID (1=loop; 0=non-loop), Ile likelihood, BCAA likelihood, EAA likelihood, hydrophobic amino acid likelihood, amino acid position entropy, amino acid type position entropy, total free energy of folding (ΔΔG_{fold}) (for substitution by Ile), the van der Waals free energy change contribution to total free energy of folding (ΔΔGfold VDW) (for substitution by Ile), the electrostatic free energy change contribution to total free energy of folding (ΔΔGfold Elec) (for substitution by Ile), and the thermodynamic entropic free energy change contribution to total free energy of folding (ΔΔGfold Entropy) (for substitution by Ile) was calculated. The results are shown in Table 6B in Appendix D.

[0464] For each amino acid in SEQ ID NO: 6, the loop ID (1=loop; 0=non-loop), Val likelihood, BCAA likelihood, EAA likelihood, hydrophobic amino acid likelihood, amino acid position entropy, amino acid type position entropy, total free energy of folding (ΔΔG_{fold}) (for substitution by Val), the van der Waals free energy change contribution to total free energy of folding (ΔΔGfold VDW) (for substitution by Val), the electrostatic free energy change contribution to total free energy of folding (ΔΔGfold Elec) (for substitution by Val), and the thermodynamic entropic free energy change contribution to total free energy of folding (ΔΔGfold Entropy) (for substitution by Val) was calculated. The results are shown in Table 6C in Appendix D.

[0465] For each amino acid in SEQ ID NO: 6, the loop ID (1=loop; 0=non-loop), Arg likelihood, positive AA likelihood, charged AA likelihood, amino acid position entropy, amino acid type position entropy, total free energy of folding (ΔΔG_{fold}) (for substitution by Arg), the van der Waals free energy change contribution to total free energy of folding (ΔΔGfold VDW) (for substitution by Arg), the electrostatic free energy change contribution to total free energy of folding (ΔΔGfold Elec) (for substitution by Arg), and the thermodynamic entropic free energy change contribution to total free energy of folding (ΔΔGfold Entropy) (for substitution by Arg) was calculated. The results are shown in Table 6D in Appendix D.

### Example 9

### Identification of Amino Acid Positions for Substitution in the A. niger Glucosidase Fibronectin Type III Domain Protein (SEQ ID NO: 7)

[0466] Glucosidase fibronectin type III domain from A. niger (SEQ ID NO: 7) contains 9.9% by weight Leu, 21.5% by weight branch chain amino acids, and 44.5% by weight essential amino acids.

[0467] FIG. 24A analyzes the amino acid content (by weight) of engineered proteins generated by replacing all non-Leu amino acids that occur at amino acid positions identified using different Leu likelihood thresholds from 0 to 1. Specifically, the weight fraction of Leu, BCAAs, and EAAs in SEQ ID NO: 7 are shown. In the top panel, the likelihood threshold for making amino acid replacements is presented on the X-axis. So the value 0.6 on the X-axis, for example, represents an engineered protein sequence created by identifying every amino acid position in SEQ ID NO: 7 having a Leu-likelihood score of at least 0.6 and replacing all non-Leu amino acids appearing at one of those positions with a Leu amino acid. In the top panel, the fraction by weight of Leu, BCAA, and EAA in the protein following the making of any necessary Leu replacements is shown on the Y-axis. In the bottom panel the Y-axis indicates the total of number of Leu replacements made to a protein when every amino acid position that has a given Leu likelihood score on the X-axis is occupied by a Leu amino acid in the engineered protein. The top and bottom panels of FIG. 24B present a close-up view of the left end of the graphs (for Leu likelihood scores of 0 to 0.3) shown in FIG. 24A.

[0468] This analysis was repeated, but instead of assessing Leu likelihood to identify amino acid positions for mutation BCAA likelihood and hydrophobic amino acid likelihood was measured in the MSA data to identify amino acid positions, and every non-Leu amino acid at identified positions was replaced with a Leu amino acid. The results are presented in FIG. 24C (BCAA likelihood) and FIG. 24D (hydrophobic amino acid likelihood). As expected, these two less stringent screens lead to replacement of more non-Leu amino acids with Leu at each likelihood cut off.

[0469] The same analysis was repeated, using position entropy instead of raw amino acid likelihood to rank amino acid positions for substitution by Leu. Results obtained when position entropy was calculated using the frequency of each amino acid at each position are presented in FIG. 25A and when position entropy was calculated using the frequency of amino acid type at each position in FIG. 25B.

[0470] The free energy of folding (ΔΔG_{fold}) for all possible single amino acid mutations of non-Leu amino acids in SEQ ID NO: 7 to Leu, relative to the wild type free energy of folding in SEQ ID NO: 7 was also calculated. For each amino acid substitution, the positions were rank ordered based on their predicted effect on folding stability. The results are shown in FIG. 26.

[0471] For each amino acid in SEQ ID NO: 7, the loop ID (1=loop; 0=non-loop), Leu likelihood, BCAA likelihood, EAA likelihood, hydrophobic amino acid likelihood, amino acid position entropy, amino acid type position entropy, total free energy of folding (ΔΔG_{fold}) (for substitution by Leu), the van der Waals free energy change contribution to total free energy of folding (ΔΔGfold VDW) (for substitution by Leu), the electrostatic free energy change contribution to total free energy of folding (ΔΔGfold Elec) (for substitution by Leu), and the thermodynamic entropic free energy change contribution to total free energy of folding (ΔΔGfold Entropy) (for substitution by Leu) was calculated. The results are shown in Table 7 in Appendix D.

### Example 10

### Identification of Amino Acid Positions for Substitution in the T. Reesei Hydrophobin I Protein (SEQ ID NO: 8)

[0472] Hydrophobin I protein from T. Reesei (SEQ ID NO: 8) contains 10.5% by weight Leu, 22.5% by weight branch chain amino acids, and 35.2% by weight essential amino acids.

[0473] FIG. 27A analyzes the amino acid content (by weight) of engineered proteins generated by replacing all non-Leu amino acids that occur at amino acid positions identified using different Leu likelihood thresholds from 0 to 1. Specifically, the weight fraction of Leu, BCAAs, and EAAs in SEQ ID NO: 8 are shown. In the top panel, the likelihood threshold for making amino acid replacements is presented on the X-axis. So the value 0.6 on the X-axis, for example, represents an engineered protein sequence created by identifying every amino acid position in SEQ ID NO: 8 having a Leu-likelihood score of at least 0.6 and replacing all non-Leu amino acids appearing at one of those positions with a Leu amino acid. In the top panel, the fraction by weight of Leu, BCAA, and EAA in the protein following the making of any necessary Leu replacements is shown on the Y-axis. In the bottom panel the Y-axis indicates the total of number of Leu replacements made to a protein when every amino acid position that has a given Leu likelihood score on the X-axis is occupied by a Leu amino acid in the engineered protein. The top and bottom panels of FIG. 27B present a close-up view of the left end of the graphs (for Leu likelihood scores of 0 to 0.3) shown in FIG. 27A.

[0474] This analysis was repeated, but instead of assessing Leu likelihood to identify amino acid positions for mutation BCAA likelihood and hydrophobic amino acid likelihood was measured in the MSA data to identify amino acid positions, and then every non-Leu amino acid at identified positions was replaced with a Leu amino acid. The results are presented in FIG. 27C (BCAA likelihood) and FIG. 27D (hydrophobic amino acid likelihood). As expected, these two less stringent screens lead to replacement of more non-Leu amino acids with Leu at each likelihood cut off.

[0475] The same analysis was repeated, using position entropy instead of raw amino acid likelihood to rank amino acid positions for substitution by Leu. Results obtained when position entropy was calculated using the frequency of each amino acid at each position are presented in FIG. 28A and when position entropy was calculated using the frequency of amino acid type at each position in FIG. 28B.

[0476] The free energy of folding (ΔΔG_{fold}) for all possible single amino acid mutations of non-Leu amino acids in SEQ ID NO: X to Leu, relative to the wild type free energy of folding in SEQ ID NO: 8 was also computed. For each amino acid substitution, we then rank ordered the positions based on their predicted effect on folding stability. The results are shown in FIG. 29.

[0477] For each amino acid in SEQ ID NO: 8, the loop ID (1=loop; 0=non-loop), Leu likelihood, BCAA likelihood, EAA likelihood, hydrophobic amino acid likelihood, amino acid position entropy, amino acid type position entropy, total free energy of folding (ΔΔG_{fold}) (for substitution by Leu), the van der Waals free energy change contribution to total free energy of folding (ΔΔGfold VDW) (for substitution by Leu), the electrostatic free energy change contribution to total free energy of folding (ΔΔGfold Elec) (for substitution by Leu), and the thermodynamic entropic free energy change contribution to total free energy of folding (ΔΔGfold Entropy) (for substitution by Leu) were calculated. The results are shown in Table 8 in Appendix D.

### Example 11

### Identification of Amino Acid Positions for Substitution in the T. Reesei Hydrophobin II Protein (SEQ ID NO: 9)

[0478] Hydrophobin II protein from T. Reesei (SEQ ID NO: 9) contains 11.0% by weight Leu, 25.6% by weight branch chain amino acids, and 49.2% by weight essential amino acids.

[0479] FIG. 30A analyzes the amino acid content (by weight) of engineered proteins generated by replacing all non-Leu amino acids that occur at amino acid positions identified using different Leu likelihood thresholds from 0 to 1. Specifically, the weight fraction of Leu, BCAAs, and EAAs in SEQ ID NO: 9 are shown. In the top panel, the likelihood threshold for making amino acid replacements is presented on the X-axis. So the value 0.6 on the X-axis, for example, represents an engineered protein sequence created by identifying every amino acid position in SEQ ID NO: 9 having a Leu-likelihood score of at least 0.6 and replacing all non-Leu amino acids appearing at one of those positions with a Leu amino acid. In the top panel, the fraction by weight of Leu, BCAA, and EAA in the protein following the making of any necessary Leu replacements is shown on the Y-axis. In the bottom panel the Y-axis indicates the total of number of Leu replacements made to a protein when every amino acid position that has a given Leu likelihood score on the X-axis is occupied by a Leu amino acid in the engineered protein. The top and bottom panels of FIG. 30B present a close-up view of the left end of the graphs (for Leu likelihood scores of 0 to 0.3) shown in FIG. 30A.

[0480] This analysis was repeated, but instead of assessing Leu likelihood to identify amino acid positions for mutation BCAA likelihood and hydrophobic amino acid likelihood were measured in the MSA data to identify amino acid positions, and then every non-Leu amino acid at identified positions was replaced with a Leu amino acid. The results are presented in FIG. 30C (BCAA likelihood) and FIG. 30D (position entropy). As expected, these two less stringent screens lead to replacement of more non-Leu amino acids with Leu at each likelihood cut off.

[0481] The same analysis was repeated, using position entropy instead of raw amino acid likelihood to rank amino acid positions for substitution by Leu. Results obtained when position entropy was calculated using the frequency of each amino acid at each position are presented in FIG. 31A and when position entropy was calculated using the frequency of amino acid type at each position in FIG. 31B.

[0482] The free energy of folding (ΔΔG_{fold}) for all possible single amino acid mutations of non-Leu amino acids in SEQ ID NO: 9 to Leu, relative to the wild type free energy of folding in SEQ ID NO: 9 was also computed. For each amino acid substitution, the positions were rank ordered based on their predicted effect on folding stability. The results are shown in FIG. 32.

[0483] For each amino acid in SEQ ID NO: 9, the loop ID (1=loop; 0=non-loop), Leu likelihood, BCAA likelihood, EAA likelihood, hydrophobic amino acid likelihood, amino acid position entropy, amino acid type position entropy, total free energy of folding (ΔΔG_{fold}) (for substitution by Leu), the van der Waals free energy change contribution to total free energy of folding (ΔΔGfold VDW) (for substitution by Leu), the electrostatic free energy change contribution to total free energy of folding (ΔΔGfold Elec) (for substitution by Leu), and the thermodynamic entropic free energy change contribution to total free energy of folding (ΔΔGfold Entropy) (for substitution by Leu) was calculated. The results are shown in Table 9 in Appendix D.

### Example 12

### Amino Acid Selection Algorithm

[0484] The analyses of position amino acid likelihood, position entropy, mutation effect on relative folding free energy, and secondary structure type can be combined to screen for and identify amino acids in reference secreted proteins to mutate to more nutritive amino acid types, such as Leu. In effect, the selection and ranking procedure is a multiobjective optimization problem. Multiple different objectives can be attained by designing engineered proteins using these factors: high amino acid likelihood (AALike), high amino acid type likelihood (AATLike), high position entropy (Sₚₒₛ), high amino acid type position entropy (S_{AATpos}), low relative free energy of folding (ΔΔG_{fold}), and secondary structure identity (LoopID). It is also possible to select positions that maximize all or a subset of objectives simultaneously. To this end, aggregate objective functions that score each mutation based on their individual objective scores were constructed. When ranking possible mutation sites for a given protein, in order to directly compare two objective functions and/or add them together with controlled weighting, the distribution of values was mapped onto the range [0-1] by shifting the minimum value to 0 and normalizing all values by the maximum value. Note that in the case of ΔΔG_{fold}, the minimum value was mapped onto 1 (as negative values are favorable) and the maximum value defined to be 1, as a cutoff to limit consideration to positions with ΔΔG_{fold}<1. In addition to all the single objective functions, eleven exemplary aggregate objective functions are:

$$\begin{matrix}\frac{1}{2} AAlike + \frac{1}{2} ΔΔ {G}_{fold} & ( 1 ) \\ \frac{1}{2} AATlike + \frac{1}{2} ΔΔ {G}_{fold} & ( 2 ) \\ \frac{1}{3} AAlike + \frac{1}{3} AATlike + \frac{1}{3} ΔΔ {G}_{fold} & ( 3 ) \\ \frac{1}{2} {S}_{pos} + \frac{1}{2} ΔΔ {G}_{fold} & ( 4 ) \\ \frac{1}{2} {S}_{AATpos} + \frac{1}{2} ΔΔ {G}_{fold} & ( 5 ) \\ \frac{1}{2} LoopID + \frac{1}{2} ΔΔ {G}_{fold} & ( 6 ) \\ \frac{1}{3} AAlike + \frac{1}{3} ΔΔ {G}_{fold} + \frac{1}{3} LoopID & ( 7 ) \\ \frac{1}{4} AAlike + \frac{1}{4} AATlike + \frac{1}{4} ΔΔ {G}_{fold} + \frac{1}{4} LoopID & ( 8 ) \\ \frac{1}{3} AATlike + \frac{1}{3} ΔΔ {G}_{fold} + \frac{1}{3} LoopID & ( 9 ) \\ \frac{1}{3} {S}_{pos} + \frac{1}{3} ΔΔ {G}_{fold} + \frac{1}{3} LoopID & ( 10 ) \\ \frac{1}{3} {S}_{AATpos} + \frac{1}{3} ΔΔ {G}_{fold} + \frac{1}{3} LoopID & ( 11 )\end{matrix}$$

[0485] The first six functions select for positions that have favorable effects on folding stability and either high amino acid likelihoods [(1), (2), and (3)], high position entropies [(4) and (5)], or are structurally plastic loop positions (6). The seventh through eleventh objective functions select for loop positions with favorable, relative folding energies and either high amino acid likelihoods [(7), (8), and (9)] or position entropies [(10) and (11)]. In order to enrich a secreted protein for a particular amino acid, the top set of positions that rank highly according to the desired objective function 1-11 are selected and those amino acids mutated to generate an engineered protein.

[0486] Below are example sequences for cellulose binding domain 1 (CBD1) (SEQ ID NO: 5) mutations ranking all 36 positions according to objective function 3 using Leucine as the target amino acid and branched chain amino acids as the amino acid type:

$$\frac{1}{3} Leulike + \frac{1}{3} BCAAlike + \frac{1}{3} ΔΔ {G}_{fold} .$$

[0487] Remapping all values onto a common range, [0, 1], as described above, and ranking according to the aggregate objective function gives the rank ordered list (excluding all those positions with ΔΔG_{fold}>1 kcal/mol or cysteine residues involved in intramolecular disulfide bonds) presented in Table 10.

TABLE 10

| Position | Score 3 |
|---|---|
| 36 | 0.773 |
| 28 | 0.443 |
| 4 | 0.421 |
| 6 | 0.333 |
| 20 | 0.268 |
| 30 | 0.223 |
| 27 | 0.221 |
| 26 | 0.202 |
| 29 | 0.194 |
| 24 | 0.192 |
| 18 | 0.186 |
| 7 | 0.176 |
| 1 | 0.174 |
| 31 | 0.173 |
| 32 | 0.168 |
| 11 | 0.161 |
| 5 | 0.147 |
| 17 | 0.118 |
| 3 | 0.118 |
| 16 | 0.117 |
| 14 | 0.107 |
| 23 | 0.107 |
| 33 | 0.102 |
| 9 | 0.101 |
| 21 | 0.101 |
| 34 | 0.042 |

[0488] Note that the top hit, position 36, is already a Leucine, so no mutation need be performed at this site. Thus, in order to increase the Leucine concentration to ˜11% (the native sequence is approximately 3% Leucine) 3 mutations are required, and this analysis suggests positions E28, A4, and G6. The resulting engineered protein has the sequence of SEQ ID NO: 10.

[0489] To increase the Leucine concentration to ˜22%, 7 mutations are required, and this analysis suggests positions E28, A4, G6, V20, A30, Y27, and T26. The resulting engineered protein has the sequence of SEQ ID NO: 11.

[0490] To increase the Leucine concentration to ˜31%, 10 mutations are required, and this analysis suggests positions E28, A4, G6, V20, A30, Y27, T26, N29, T24, and T18. The resulting engineered protein has the sequence of SEQ ID NO: 12.

[0491] Finally, to increase the Leucine concentration to ˜42%, 14 mutations are required, and this analysis suggests positions E28, A4, G6, V20, A30, Y27, T26, N29, T24, T18, Q7, A1, Y31, and Y32. The resulting engineered protein has the sequence of SEQ ID NO: 13.

[0492] Tables 11, 12, and 13 show the equivalent rank ordered lists found when using Leucine as the target amino acid, branched chain amino acids as the amino acid type, and objective functions 1 through 11, as defined above. To increase the Leucine concentration to ˜11%, the top 3 positions from the position lists in Tables 11, 12, and 13, that are not already Leucine in CBD1 (SEQ ID NO: 5), may be selected. Thus, to select for positions with favorable relative free energies of folding and high amino acid likelihoods, using the objective function 1, 2, or 3 rankings is appropriate. To select for positions with favorable relative free energies of folding and high position entropies or loop positions, using objective function 4, 5, or 6 rankings would be appropriate. To select for positions with favorable, relative folding energies and either high amino acid likelihoods or position entropies, using objective function 7, 8, or 9 rankings or objective function 10 or 11 rankings, respectively, would be appropriate.

TABLE 11
Additional Objective Function Rankings (1-4) for CBD1

| Posi- | Score | Posi- | Score | Posi- | Score | Posi- | Score |
|---|---|---|---|---|---|---|---|
| tion | 1 | tion | 2 | tion | 3 | tion | 4 |
| 36 | 0.660 | 36 | 0.660 | 36 | 0.773 | 4 | 0.866 |
| 6 | 0.500 | 4 | 0.513 | 28 | 0.443 | 28 | 0.788 |
| 4 | 0.485 | 28 | 0.512 | 4 | 0.421 | 6 | 0.712 |
| 28 | 0.456 | 6 | 0.500 | 6 | 0.333 | 30 | 0.711 |
| 30 | 0.331 | 20 | 0.402 | 20 | 0.268 | 18 | 0.654 |
| 29 | 0.291 | 30 | 0.335 | 30 | 0.223 | 27 | 0.647 |
| 7 | 0.265 | 27 | 0.319 | 27 | 0.221 | 20 | 0.637 |
| 20 | 0.261 | 26 | 0.301 | 26 | 0.202 | 26 | 0.620 |
| 31 | 0.259 | 29 | 0.291 | 29 | 0.194 | 3 | 0.588 |
| 32 | 0.249 | 24 | 0.287 | 24 | 0.192 | 11 | 0.553 |
| 24 | 0.246 | 18 | 0.269 | 18 | 0.186 | 24 | 0.552 |
| 5 | 0.220 | 7 | 0.265 | 7 | 0.176 | 16 | 0.521 |
| 18 | 0.215 | 1 | 0.262 | 1 | 0.174 | 23 | 0.487 |
| 27 | 0.196 | 31 | 0.260 | 31 | 0.173 | 31 | 0.475 |
| 26 | 0.194 | 32 | 0.250 | 32 | 0.168 | 21 | 0.447 |
| 17 | 0.176 | 11 | 0.225 | 11 | 0.161 | 14 | 0.415 |
| 16 | 0.174 | 5 | 0.221 | 5 | 0.147 | 29 | 0.407 |
| 3 | 0.172 | 17 | 0.177 | 17 | 0.118 | 5 | 0.400 |
| 14 | 0.158 | 3 | 0.174 | 3 | 0.118 | 1 | 0.370 |
| 33 | 0.152 | 16 | 0.173 | 16 | 0.117 | 36 | 0.361 |
| 9 | 0.152 | 14 | 0.160 | 14 | 0.107 | 33 | 0.328 |
| 21 | 0.148 | 33 | 0.152 | 23 | 0.107 | 17 | 0.322 |
| 23 | 0.132 | 9 | 0.152 | 33 | 0.102 | 32 | 0.316 |
| 11 | 0.119 | 21 | 0.150 | 9 | 0.101 | 7 | 0.291 |
| 1 | 0.113 | 23 | 0.114 | 21 | 0.101 | 9 | 0.159 |
| 34 | 0.062 | 34 | 0.061 | 34 | 0.042 | 12 | 0.141 |

TABLE 12
Additional Objective Function Rankings (5-8) for CBD1

| Posi- | Score | Posi- | Score | Posi- | Score | Posi- | Score |
|---|---|---|---|---|---|---|---|
| tion | 5 | tion | 6 | tion | 7 | tion | 8 |
| 30 | 0.803 | 6 | 1.000 | 36 | 0.773 | 36 | 0.830 |
| 6 | 0.797 | 4 | 0.866 | 6 | 0.667 | 28 | 0.582 |
| 4 | 0.784 | 30 | 0.831 | 4 | 0.657 | 4 | 0.566 |
| 3 | 0.669 | 28 | 0.804 | 28 | 0.637 | 6 | 0.500 |
| 18 | 0.651 | 7 | 0.765 | 30 | 0.554 | 20 | 0.451 |
| 28 | 0.646 | 20 | 0.761 | 7 | 0.510 | 30 | 0.417 |
| 20 | 0.618 | 31 | 0.759 | 20 | 0.507 | 27 | 0.416 |
| 16 | 0.605 | 32 | 0.748 | 31 | 0.506 | 26 | 0.401 |
| 26 | 0.578 | 24 | 0.744 | 32 | 0.500 | 24 | 0.394 |
| 27 | 0.565 | 5 | 0.720 | 24 | 0.497 | 18 | 0.390 |
| 24 | 0.560 | 18 | 0.706 | 5 | 0.480 | 7 | 0.382 |
| 21 | 0.502 | 26 | 0.691 | 18 | 0.477 | 1 | 0.381 |
| 11 | 0.483 | 27 | 0.684 | 27 | 0.464 | 31 | 0.380 |
| 29 | 0.385 | 3 | 0.669 | 26 | 0.462 | 32 | 0.376 |
| 23 | 0.376 | 36 | 0.660 | 3 | 0.448 | 5 | 0.361 |
| 33 | 0.365 | 33 | 0.652 | 33 | 0.435 | 3 | 0.338 |
| 1 | 0.330 | 21 | 0.647 | 21 | 0.432 | 23 | 0.330 |
| 17 | 0.321 | 1 | 0.613 | 23 | 0.421 | 33 | 0.326 |
| 31 | 0.311 | 23 | 0.586 | 1 | 0.409 | 21 | 0.325 |
| 7 | 0.308 | 34 | 0.560 | 34 | 0.375 | 34 | 0.282 |
| 32 | 0.283 | 22 | 0.436 | 22 | 0.292 | 22 | 0.220 |
| 14 | 0.263 | 29 | 0.291 | 29 | 0.194 | 29 | 0.146 |
| 5 | 0.237 | 17 | 0.176 | 17 | 0.117 | 11 | 0.120 |
| 12 | 0.200 | 16 | 0.171 | 16 | 0.116 | 17 | 0.089 |
| 9 | 0.164 | 14 | 0.158 | 14 | 0.105 | 16 | 0.087 |
| 36 | 0.161 | 9 | 0.152 | 9 | 0.101 | 14 | 0.080 |

TABLE 13
Additional Objective Function Rankings (9-11) for CBD1

| Position | Score 9 | Position | Score 10 | Position | Score 11 |
|---|---|---|---|---|---|
| 36 | 0.773 | 4 | 0.911 | 30 | 0.868 |
| 4 | 0.675 | 28 | 0.859 | 6 | 0.865 |
| 28 | 0.675 | 6 | 0.808 | 4 | 0.856 |
| 6 | 0.667 | 30 | 0.807 | 3 | 0.779 |
| 20 | 0.601 | 18 | 0.770 | 18 | 0.767 |
| 30 | 0.556 | 27 | 0.765 | 28 | 0.764 |
| 27 | 0.546 | 20 | 0.758 | 20 | 0.746 |
| 26 | 0.534 | 26 | 0.746 | 26 | 0.718 |
| 24 | 0.525 | 3 | 0.725 | 27 | 0.710 |
| 18 | 0.513 | 24 | 0.701 | 24 | 0.706 |
| 7 | 0.510 | 23 | 0.658 | 21 | 0.668 |
| 1 | 0.508 | 31 | 0.650 | 23 | 0.584 |
| 31 | 0.506 | 21 | 0.631 | 33 | 0.576 |
| 32 | 0.500 | 5 | 0.600 | 1 | 0.553 |
| 5 | 0.481 | 1 | 0.580 | 31 | 0.541 |
| 3 | 0.449 | 36 | 0.574 | 7 | 0.538 |
| 33 | 0.435 | 33 | 0.552 | 32 | 0.522 |
| 21 | 0.433 | 32 | 0.544 | 5 | 0.491 |
| 23 | 0.410 | 7 | 0.527 | 36 | 0.441 |
| 34 | 0.374 | 34 | 0.417 | 16 | 0.403 |
| 22 | 0.291 | 22 | 0.393 | 34 | 0.402 |
| 29 | 0.194 | 11 | 0.369 | 22 | 0.328 |
| 11 | 0.150 | 16 | 0.348 | 11 | 0.322 |
| 17 | 0.118 | 14 | 0.277 | 29 | 0.257 |
| 16 | 0.115 | 29 | 0.271 | 17 | 0.214 |
| 14 | 0.107 | 17 | 0.215 | 14 | 0.175 |

### Example 13

### Selection and Design of Engineered Secreted Protein from Bacillus subtilis

[0493] To demonstrate the engineering of secreted polypeptides for enriched amino acid content, we chose a microorganism known to secrete protein at high levels Bacillus subtilis. SEQID-45001 was identified a major secreted protein in Bacillus subtilis. Using sequence conservation and crystal structure data for SEQID-45001, we identified contiguous regions within each protein that were predicted to be tolerant to mutations without negatively affecting the structural stability of the protein and/or the ability of the host organism to secrete the protein.

[0494] We analyzed the secondary structure of SEQID-45001 reported in the structural protein databank entry 1UA7. We identified 19 loop regions within the sequence of the protein that are not part of an α-helix or β-sheet. These loop regions are defined by the following amino acid residues: 73-76, 130-133, 147-152, 157-161, 189-192, 222-227, 239-244, 283-286, 291-298, 305-308, 318-323, 336-340, 356-360, 365-368, 387-392, 417-421, 428-432, 437-442, and 464-466. Loop regions less than 4 amino acids in length were not considered for mutation.

[0495] Conservation of sequence over evolutionary space was also considered for identifying positions amenable for engineering while maintaining structural stability and secretion competency. Positions that are less conserved within a family of homologous sequences are inherently variable and likely more amenable to mutation without affecting activity, which is intrinsically tied to structure. To find positions that are less conserved, we downloaded the alignment of the pfam00128 from the NCBI Conserved Domain Database, which contains 31 protein sequences including the SEQID-45001 catalytic domain (Marchler-Bauer A., Zheng C., Chitsaz F., Derbyshire M. K., Geer L. Y., Geer R. C., Gonzales N. R., Gwadz M., Hurwitz D. I., Lanczycki C. J., Lu F., Lu S., Marchler G. H., Song J. S., Thanki N., Yamashita R. A., Zhang D., and S. H. Bryant. Nucleic Acids Res. (2013) 41:D348-52). We also performed a PSI-BLAST search of the NCBI protein reference sequence database (Pruitt K. D., Tatusova T., and D. R. Maglott. Nucleic Acids Res. (2005) 33:D501-504) using SEQID-45001 and obtained 500 sequences homologous to SEQID-45001. In both cases, a single iteration was performed using the BLOSUM62 position specific scoring matrix, a gap penalty of −11, a gap extension penalty of −1, and an alignment inclusion e-value cutoff of 0.005 (Altschul S. F., Nucleic Acids Res. (1997) 25:3389-3402). All protein sequence alignments were used to generate position-specific scoring matrices (PSSM) specific to each query sequence as part of the PSI-BLAST search. From the PSSMs, we identified regions hypothesized to be tolerant to mutation by counting the number of different amino acids associated with a positive PSSM score at each position within each loop as well as the sum and average of the PSSM scores for essential amino acid substitutions at each position Furthermore, from the multiple sequence alignments obtained from each PSI-BLAST search, we calculated the amino acid entropy at each position, as defined by

$${S}_{j} = - {\sum }_{i ∈ AA} {p}_{i} ln {p}_{i}$$

where Sⱼ is the entropy at position j and pⱼ is the probability of observing amino acid i at position j.

[0496] Using these measures of mutation tolerance, we identified four loop regions expected to be tolerant to mutations into essential amino acids. To enrich the identified regions in essential amino acids we used a combinatorial codon library where any selected position could be either a F, I, L, V, or M (denoted Z) or a R, K, T, I, or M (denoted X). In each of the loop regions selected for mutation into an essential amino acid, each variable position was assigned as a Z or X depending upon its relative tolerance of hydrophobic residues (based upon their respective PSSM values). Positions that were tolerant of hydrophobic residues were assigned as Z and genetically encoded using the codon NTN. Positions more tolerant of hydrophilic residues were assigned as an X and genetically encoded using the codon ANR. We note that in one of the identified variable regions of SEQID-45001 (147-153), a glycine residue was inserted into the center of the loop in an attempt to enhance the conformational flexibility of this region. For SEQID-45001 the sequences of the identified regions are summarized in the following table:

| Start residue # | original | degenerate |
|---|---|---|
| 148 | YAAI | XXGXX |
| | (SEQ ID NO: 22139) | |
| 240 | NTSA | ZXXZ |
| | (SEQ ID NO: 22140) | |
| 291 | SHYASD | XZYXXZ |
| | (SEQ ID NO: 22141) | |
| 389 | QPEE | XPZZ |
| | (SEQ ID NO: 22142) | |

X = NTN, codes for F, L, I, M, V
Z = ANR, codes for I, M, T, K, R

### Library Design and Construction

[0497] Based on identification of variable regions, we designed primers that can amplify each variable region as explained in FIG. 33. For example if there are four variable regions, we need four pair of primers to generate four variable fragments. In step 1 we used pES1205 as the template which contains SEQID-45001 fused with N-terminal AmyQ signal peptide and downstream of pGrac promoter. pES1205 is a derivative of the vector, pHT43 (MoBiTec), containing a 1905-bp DNA fragment encoding the amyE gene from B. subtilis (minus the initial 93-bp encoding the AmyE signal peptide) plus a C-terminal 1×FLAG tag. The amyE::1×FL:AG sequence is cloned, in-frame with the SamyQ sequence encoded on pHT43. For fragment 1,2,3,4, the forward PRIMERID-45053, PRIMERID-45054, PRIMERID-45055, and PRIMERID-45056 contain 25 bases of constant sequence before the variable region followed by degenerate sequences to represent the variable region and 25 bases of constant sequence downstream of the variable region. For fragment 1, 2, 3, the reverse primers PRIMERID-45061, PRIMERID-45062, and PRIMERID-45063 contain 25 bases of reverse complementary sequence upstream of next variable region respectively. For fragment 4, the reverse primer PRIMERID-45064 contains 25 bases of reverse complementary sequence at an arbitrary distance from variable region 4. Four separate PCR amplifications were run using Phusion DNA polymerase (New England Biolabs, Beverly, Mass.) and reaction parameters recommended by the manufacturer. As separate reactions, four wild type fragments, WT-frag-1, WT-frag-2, WT-frag-3 and WT-frag-4 were generated using PES1205 as template and primer pairs PRIMERID-45057 & PRIMERID-45061, PRIMERID-45058 & PRIMERID-45062, PRIMERID-45059 & PRIMERID-45063, and PRIMERID-45060 & PRIMERID-45064, respectively. All PCR fragments were gel purified. In step 2, two separate PCR reactions were set. The first PCR reaction contain fragment 1 and 2 in equimolar ratio as template and PRIMERID-45057 and PRIMERID-45062 as primers. The second PCR reaction contain fragment 3 and 4 in equimolar ratio and PRIMERID-45059 and PRIMERID-45064 as primers. In both the reactions, respective wild type fragments were added in a molar ratio of library members present in each variable fragments. Fragment 5 and 6 are gel purified and used as templates in equimolar ratio in step 3. The primers used in the PCR reaction include PRIMERID-45057 and PRIMERID-45064. The vector PCR product was generated using pES1205 and primer pairs, PRIMERID-45065 and PRIMERID-45066. Both fragment 7 and vector PCR product were gel purified and cloned together using the Gibson Assembly Master Mix (New England Biolabs, Beverly, Mass.) and transformed into the cloning host E. coli Turbo (New England Biolabs) according to manufacturer's instructions. 50 colonies were sequenced to determine the diversity of the library. The colonies on the agar plate were then suspended in LB media and harvested for plasmid purification. In a similar fashion, we generated 9 specific variants of SEQID-45001 which were altered with 9 specific amino acids, F, L, I, M, V, T, K, R, W at every variable position identified in the mutant design. Specific variant primers are denoted by the single letter amino acid abbreviation in the name. All primers are listed in table PRIMERID below.

| TABLE PRIMERID | Primer sequence (SEQ ID NOS 45053-45102, respectively, in order of appearance) |
|---|---|
| PRIMERID-45053 | GGTCATCAATCATACCACCAGTGATNTNNTNGGCNTNNTNTCCAATGAGGTTAAGAGTATTCCAAACTGG |
| PRIMERID-45054 | CAGTCAATTTTGGCCGAATATCACAANRNTNNTNANRGAGTTCCAATACGGAGAAATCCTGC |
| PRIMERID-45055 | TCGTAATCTGGGCGTGTCGAATATCNTNANRTATNTNNTNANRGTGTCTGCGGACAAGCTAGTGAC |
| PRIMERID-45056 | GATTTCACAATGTGATGGCTGGANTNCCTANRANRCTCTCGAACCCGAATGGAAAC |
| PRIMERID-45057 | GGTCATCAATCATACCACCAGTG |
| PRIMERID-45058 | CAGTCAATTTTGGCCGAATATCAC |
| PRIMERID-45059 | TCGTAATCTGGGCGTGTCG |
| PRIMERID-45060 | GATTTCACAATGTGATGGCTGG |
| PRIMERID-45061 | TGTGATATTCGGCCAAAATTGACTG |
| PRIMERID-45062 | GATATTCGACACGCCCAGATTACG |
| PRIMERID-45063 | TCCAGCCATCACATTGTGAAATC |
| PRIMERID-45064 | ATCTGCACGCAAGGTAATCGTCAG |
| PRIMERID-45065 | CTGACGATTACCTTGCGTGCAG |
| PRIMERID-45066 | CACTGGTGGTATGATTGATGACC |
| PRIMERID-45067 | GGTCATCAATCATACCACCAGTGATCTTCTGGGCCTTCTGTCCAATGAGGTTAAGAGTATTCCAAACTGG |
| PRIMERID-45068 | GGTCATCAATCATACCACCAGTGATATTATCGGCATTATCTCCAATGAGGTTAAGAGTATTCCAAACTGG |
| PRIMERID-45069 | GGTCATCAATCATACCACCAGTGATGTTGTGGGCGTTGTGTCCAATGAGGTTAAGAGTATTCCAAACTGG |
| PRIMERID-45070 | GGTCATCAATCATACCACCAGTGATTTTTTCGGCTTTTTCTCCAATGAGGTTAAGAGTATTCCAAACTGG |
| PRIMERID-45071 | GGTCATCAATCATACCACCAGTGATTGGTGGGGATGGTGGTCCAATGAGGTTAAGAGTATTCCAAACTGG |
| PRIMERID-45072 | GGTCATCAATCATACCACCAGTGATATGATGGGCATGATGTCCAATGAGGTTAAGAGTATTCCAAACTGG |
| PRIMERID-45073 | GGTCATCAATCATACCACCAGTGATACAACGGGCACAACGTCCAATGAGGTTAAGAGTATTCCAAACTGG |
| PRIMERID-45074 | GGTCATCAATCATACCACCAGTGATTATAAGAAAGGCAAGAAAAATGAGGTTAAGAGTATTCCAAACTGG |
| PRIMERID-45075 | GGTCATCAATCATACCACCAGTGATTATCATCATGGCCATCACAATGAGGTTAAGAGTATTCCAAACTGG |
| PRIMERID-45076 | CAGTCAATTTTGGCCGAATATCACAAAGCTTCTGGGCGAGTTCCAATACGGAGAAATCCTGC |
| PRIMERID-45077 | CAGTCAATTTTGGCCGAATATCACAAAGATTATCGGCGAGTTCCAATACGGAGAAATCCTGC |
| PRIMERID-45078 | CAGTCAATTTTGGCCGAATATCACAAAGGTTGTGGGCGAGTTCCAATACGGAGAAATCCTGC |
| PRIMERID-45079 | CAGTCAATTTTGGCCGAATATCACAAAGTTCTTTGGCGAGTTCCAATACGGAGAAATCCTGC |
| PRIMERID-45080 | CAGTCAATTTTGGCCGAATATCACAAAGTGGTGGGGCGAGTTCCAATACGGAGAAATCCTGC |
| PRIMERID-45081 | CAGTCAATTTTGGCCGAATATCACAAAGATGATGGGCGAGTTCCAATACGGAGAAATCCTGC |
| PRIMERID-45082 | CAGTCAATTTTGGCCGAATATCACAAAGACGACAGGCGAGTTCCAATACGGAGAAATCCTGC |
| PRIMERID-45083 | CAGTCAATTTTGGCCGAATATCACAAAGAAAGGAGCAGAGTTCCAATACGGAGAAATCCTGC |
| PRIMERID-45084 | CAGTCAATTTTGGCCGAATATCACACATCATGGAGCAGAGTTCCAATACGGAGAAATCCTGC |
| PRIMERID-45085 | TCGTAATCTGGGCGTGTCGAATATCCTTCACTATCTTCTGGATGTGTCTGCGGACAAGCTAGTGAC |
| PRIMERID-45086 | TCGTAATCTGGGCGTGTCGAATATCATTCACTATATCATTGATGTGTCTGCGGACAAGCTAGTGAC |
| PRIMERID-45087 | TCGTAATCTGGGCGTGTCGAATATCGTTCACTATGTTGTGGATGTGTCTGCGGACAAGCTAGTGAC |
| PRIMERID-45088 | TCGTAATCTGGGCGTGTCGAATATCTTCCACTATTTCTTTGATGTGTCTGCGGACAAGCTAGTGAC |
| PRIMERID-45089 | TCGTAATCTGGGCGTGTCGAATATCTGGCACTATTGGTGGGATGTGTCTGCGGACAAGCTAGTGAC |
| PRIMERID-45090 | TCGTAATCTGGGCGTGTCGAATATCATGCACTATATGATGGATGTGTCTGCGGACAAGCTAGTGAC |
| PRIMERID-45091 | TCGTAATCTGGGCGTGTCGAATATCACACACTATACAACGGATGTGTCTGCGGACAAGCTAGTGAC |
| PRIMERID-45092 | TCGTAATCTGGGCGTGTCGAATATCTCCAAGTATAAAGCAAAGGTGTCTGCGGACAAGCTAGTGAC |
| PRIMERID-45093 | TCGTAATCTGGGCGTGTCGAATATCTCCCATTATCACGCACATGTGTCTGCGGACAAGCTAGTGAC |
| PRIMERID-45094 | GATTTCACAATGTGATGGCTGGACTTCCTGAGGAACTCTCGAACCCGAATGGAAAC |
| PRIMERID-45095 | GATTTCACAATGTGATGGCTGGAATTCCTGAGGAACTCTCGAACCCGAATGGAAAC |
| PRIMERID-45096 | GATTTCACAATGTGATGGCTGGAGTTCCTGAGGAACTCTCGAACCCGAATGGAAAC |
| PRIMERID-45097 | GATTTCACAATGTGATGGCTGGATTCCCTGAGGAACTCTCGAACCCGAATGGAAAC |
| PRIMERID-45098 | GATTTCACAATGTGATGGCTGGATGGCCTGAGGAACTCTCGAACCCGAATGGAAAC |
| PRIMERID-45099 | GATTTCACAATGTGATGGCTGGAATGCCTGAGGAACTCTCGAACCCGAATGGAAAC |
| PRIMERID-45100 | GATTTCACAATGTGATGGCTGGAACACCTGAGGAACTCTCGAACCCGAATGGAAAC |
| PRIMERID-45101 | GATTTCACAATGTGATGGCTGGAAAGCCTGAGGAACTCTCGAACCCGAATGGAAAC |
| PRIMERID-45102 | GATTTCACAATGTGATGGCTGGACATCCTGAGGAACTCTCGAACCCGAATGGAAAC |

Bacillus subtilis Strain Construction

[0498] B. subtilis strain WB800N (MoBiTec, Gottingen, Germany) and used as the expression host for this study. WB800N is a derivative of a well-studied strain (B. subtilis 168) and it has been engineered to reduce protease degradation of secreted proteins by deletion of genes encoding 8 extracellular proteases (nprE, aprE, epr, bpr, mpr, nprB, vpr and wprA). B. subtilis transformations were performed according to the manufacturer's instructions. Approximately 5 μg of library for SEQID-45001 variant constructs was transformed into WB800N and single colonies were selected at 37° C. by plating on LB agar containing 5.0 μg/ml chloramphenicol (Cm5). For 9 specific variants, 1 μg of specific SEQID-45001 variant was transformed into WB800N and single colonies were selected at 37° C. by plating on LB agar containing 5.0 μg/ml chloramphenicol (Cm5).

Bacillus subtilis Library Screening

[0499] ˜800 individual transformants of the B. subtilis SEQID-45001 library were used to inoculate individual, 1-ml cultures of 2×-MAL medium (20 g/l NaCl, 20 g/l tryptone, and 10 g/l yeast extract, 75 g/l maltose) with Cm5, in deep well blocks (96-square wells). In addition to the library strains, a strain containing plasmid with AmyE and the SamyQ leader peptide was inoculated as a positive control and a strain containing plasmid with no gene of interest was inoculated as negative control. Culture blocks were covered with porous adhesive plate seals and incubated overnight in a micro-expression chamber (Glas-Col, Terre Haute, Ind.) at 37° C. and 880 rpm. Overnight cultures were used to inoculate fresh, 2×-MAL, Cm5 cultures, in deep well blocks, to a starting OD600=0.1.

[0500] Expression cultures were incubated at 37° C., 880 rpm until the OD600=1.0 (approx. 4 hrs) at which time they were induced by adding isopropyl β-D-1-thiogalactopyranoside (IPTG) at a final concentration of 1 mM and continuing incubation for 4 hrs. After 4 hrs, the cell densities of each culture was measured (OD600) and cells were harvested by centrifugation (3000 rpm, 10 min, RT). After centrifugation, culture supernatant was carefully removed and transferred to a new block and cell pellets were frozen at −80° C. To determine the levels of secreted protein, 0.5-ml aliquots of the culture supernatants were filtered first through a 0.45-μm filter followed by a 0.22 μm filter. The filtrates were then assayed to determine the levels of secreted protein of interest (POI) by chip electrophoresis system and compared with the level of secretion of base construct. Briefly, samples were prepared by adding 2 μl of sample to 7 μl sample buffer, heating at 95 C for 5 minutes, and then adding 35 μl of water. Analysis was completed using HT Low MW Protein Express LabChip® Kit or HT Protein Express LabChip® Kit (following the manufacturer's protocol). A protein ladder ran every 12 samples for molecular weight determination (kDa) and quantification (ng/μl). An example of electropherogram demonstrating hit#3 secretion is shown in FIG. 34(A) along with negative control and ladder. An example of secretion of 23 different variants of SEQID-45001 screened from the library using this method is shown in FIG. 34(B).

[0501] Hit number 11 and 27 were confirmed by LC/MS/MS of the gel band of interest. Selected hits were mixed with Invitrogen LDS Sample Buffer containing 5% β-mercaptoethanol, boiled and loaded on a Novex® NuPAGE® 10% Bis-Tris gel (Life Technologies). After running, the gels were stained using SimplyBlue™ SafeStain (Life Technologies) and desired bands were excised and submitted for analysis. Gel bands were washed, reduced and alkylated, and then digested with Trypsin for 4 hours followed by quenching with formic acid. Digests were then analyzed by nano LC/MS/MS with a Waters NanoAcquity HPLC system interfaced to a ThermoFisher Q Exactive. Peptides were loaded on a trapping column and eluted over a 75 μm analytical column at 350 nL/min; both columns were packed with Jupiter Proteo resin (Phenomenex). The mass spectrometer was operated in data-dependent mode, with MS and MS/MS performed in the Orbitrap at 70,000 FWHM resolution and 17,500 FWHM resolution, respectively. The fifteen most abundant ions were selected for MS/MS. The resulting peptide data were searched using Mascot against the relevant host database with relevant variant protein sequence appended.

[0502] Diluted overnight cultures were used as inoculum for LB broth cultures containing Cm5. These cultures were grown at 37 C until they reached log phase. Aliquots of these cultures were mixed with glycerol (20% final concentration) and frozen at −80° C. The top 30 hits are then purified using Instagene matrix (Biorad, USA) and amplified using PRIMERID-45103 CTTGAAATTGGAAGGGAGATTC (SEQ ID NO: 45103) and PRIMERID-45104 GTATAAACTTTTCAGTTGCAGAC (SEQ ID NO: 45104), and sequenced using the same primers to identify the SEQID-45001 variant sequence.

Bacillus subtilis Secretion Library Analysis

[0503] All the secreted variants of SEQID-45001 (SEQIDs 45002-45028) were analyzed to determine if there were any position specific biases in the amino acids present in the secreted variants, relative to the expected position specific biases present in the initial genetic library. To this end, an exact binomial test was performed for each amino acid at each position to determine the likelihood that the observed number of each amino acid was significantly (p<0.05) more or less than expected by chance. Table 13a shows the p-values of this single tailed test, where those highlighted elements have p values<0.05. Note that aside from wild type values, which were all significantly higher than expected, all other significant different amino acid frequencies were less than expected. The expected position specific amino acid biases are shown in Table 13b, and were found by sequencing 47 randomly selected variants after the library had been constructed and transformed into e. coli. It was assumed that all positions designed to be an X effectively sampled from the same distribution of L, I, V, F, and M codons (i.e., for all X positions, there were no position specific amino acid biases). As such, the observed counts of each amino acid were aggregated across positions to determine the expected amino acid likelihoods for all X positions. A similar assumption was made for all positions designed to be a Z. As can be seen in Table 13a, in addition to the strong bias toward the wild type sequence at each position, there are a number of different amino acids that were observed significantly less than expected, indicating a bias away from those amino acids at that position in the secreted library. This data provides additional information for the design of specific, rationally designed variants with specific mutations at each position. As an example, to enrich a secreted variant in leucine, positions 241 and 291 may be less desired choices. Alternatively, to enrich a secreted variant in valine, positions 149, 241, 242, 291, 294, 295, and 389 may be less desired choices.

a: Single Tailed Binomial Test p-Values Assessing Position Specific Amino Acid Biases in Secreted Variants of SEQID-450001

[chemical structure]

### b: Position Specific, Expected Amino Acid Likelihoods in the Constructed SEQID-450001 Library

| X | Z |
|---|---|
| 30.2% | — |
| 12.3% | 9.7% |
| 36.4% | — |
| 6.7% | — |
| 10.7% | 12.2% |
| — | 18.3% |
| — | 17.9% |
| — | 36.2% |
| 3.7% | 5.7% |

Bacillus subtilis Expression Testing of Specific Variants

[0505] Three separate colonies of B. subtilis expression strains were used to inoculate 1-ml of 2×-MAL medium (20 g/l NaCl, 20 g/l tryptone, and 10 g/l yeast extract, 75 g/l maltose) with Cm5, in deep well blocks (96-square wells). Culture blocks were covered with porous adhesive plate seals and incubated overnight in a micro-expression chamber (Glas-Col, Terre Haute, Ind.) at 37° C. and 880 rpm. Overnight cultures were used to inoculate fresh, 2×-MAL, Cm5 cultures, in deep well blocks, to a starting OD600=0.1. These expression cultures were incubated at 37° C., 880 rpm until the OD600=1.0 (approx. 4 hrs) at which time they were induced by adding isopropyl β-D-1-thiogalactopyranoside (IPTG) at a final concentration of 0.1 M and continuing incubation for 4 hrs. After 4 hrs, the cell densities of each culture was measured (0D600) and cells were harvested by centrifugation (3000 rpm, 10 min, RT). After centrifugation, culture supernatant was carefully removed and transferred to a new block and cell pellets were frozen at −80° C. To determine the levels of secreted protein, 0.5-ml aliquots of the culture supernatants were filtered first through a 0.45-μm filter followed by a 0.22 μm filter. The filtrates were then assayed to determine the levels of secreted protein of interest (POI) by chip electrophoresis. Briefly, samples were prepared by adding 2 μl of sample to 7 μl sample buffer, heating at 95 C for 5 minutes, and then adding 35 μl of water. Analysis was completed using HT Low MW Protein Express LabChip® Kit or HT Protein Express LabChip® Kit (following the manufacturer's protocol). A protein ladder ran every 12 samples for molecular weight determination (kDa) and quantification (ng/μl). An example of secretion of variants of SEQID-45001 that were enriched with methionine, threonine, lysine and histidine respectively were shown in FIG. 34(B).

[0506] SEQID-45025, SEQID-45026, SEQID-45027, and SEQID-45028 were confirmed by LC/MS/MS of the gel band of interest. Selected hits were mixed with Invitrogen LDS Sample Buffer containing 5% β-mercaptoethanol, boiled and loaded on a Novex® NuPAGE® 10% Bis-Tris gel (Life Technologies). After running, the gels were stained using SimplyBlue™ SafeStain (Life Technologies) and desired bands were excised and submitted for analysis. Gel bands were washed, reduced and alkylated, and then digested with Trypsin for 4 hours followed by quenching with formic acid. Digests were then analyzed by nano LC/MS/MS with a Waters NanoAcquity HPLC system interfaced to a ThermoFisher Q Exactive. Peptides were loaded on a trapping column and eluted over a 75 μm analytical column at 350 nL/min; both columns were packed with Jupiter Proteo resin (Phenomenex). The mass spectrometer was operated in data-dependent mode, with MS and MS/MS performed in the Orbitrap at 70,000 FWHM resolution and 17,500 FWHM resolution, respectively. The fifteen most abundant ions were selected for MS/MS. The resulting peptide data were searched using Mascot against the relevant host database with relevant variant protein sequence appended.

### Example 14

### Selection and Design of Engineered Secreted Protein from Aspergillus niger

[0507] To demonstrate the engineering of secreted polypeptides for enriched amino acid content, we chose a microorganism known to secrete protein at industrial scales, namely Aspergillus niger. The secreted polypeptide SEQID-45029 was identified as the major secreted protein in wild-type Aspergillus niger. Using sequence conservation and crystal structure data for SEQID-45029, we identified contiguous regions within each protein that were predicted to be amenable to mutation without negatively affecting the structural stability of the protein and/or the ability of the host organism to secrete the protein.

[0508] We analyzed the secondary structure of SEQID-45029 as reported in the structural protein databank 3EQA. We identified 13 loop regions within the sequence of the protein that are not part of an α-helix or a β-sheet. These loop regions are defined by the following amino acid residues: 48-76, 114-125, 131-148, 195-209, 253-268, 280-286, 309-312, 318-333, 364-370, 380-390, 417-438, 455-461, 467-486. Loop regions less than 4 amino acids in length were not considered for mutation.

[0509] Conservation of sequence over evolutionary space was also considered for identifying positions amenable for engineering while maintaining secretion competency. Positions that are less conserved within a family of homologous sequences are inherently variable and likely more amenable to mutation without affecting activity, which is intrinsically tied to structure. To find positions that are less conserved, we performed a PSI-BLAST search of the NCBI protein reference sequence database (Pruitt K. D., Tatusova T., and D. R. Maglott. Nucleic Acids Res. (2005) 33:D501-504) using SEQID-45029 and obtained 500 sequences homologous to SEQID-45029. In both cases, a single iteration was performed using the BLOSUM62 position specific scoring matrix, a gap penalty of −11, a gap extension penalty of −1, and an alignment inclusion e-value cutoff of 0.005 (Altschul S. F., Gish W., Miller W., Myers E. W., and D. J. Lipman. J. Mol. Biol. (1990) 215:403-410; Madden T L., Tatusov R. L., and Zhang, J., Meth. Enzymol. (1996) 266:131-141; Altschul S. F., Madden T. L., Schäffer A. A., Zhang J., Zhang Z., Miller W., and Lipman D. J. Nucleic Acids Res. (1997) 25:3389-3402). All protein sequence alignments were used to generate position-specific scoring matrices (PSSM) specific to each query sequence as part of the PSI-BLAST search. From the PSSMs, we identified regions hypothesized to be tolerant to mutation by counting the number of different amino acids associated with a positive PSSM score at each position within each loop as well as the sum and average of the PSSM scores for essential amino acid substitutions at each position Furthermore, from the multiple sequence alignments obtained from each PSI-BLAST search, we calculated the amino acid entropy at each position, as defined by

$${S}_{j} = - {\sum }_{i ∈ AA} {p}_{i} ln {p}_{i}$$

where Sⱼ is the entropy at position j and pⱼ is the probability of observing amino acid i at position j.

[0510] Using these measures of mutation tolerance we identified four loop regions expected to be tolerant to mutations into essential amino acids. To enrich the identified regions in essential amino acids we used a combinatorial codon library where any selected position could be either a F, I, L, V, or M (denoted Z) or a R, K, T, I, or M (denoted X). In each of the loop regions selected for mutation into an essential amino acid, each variable position was assigned as a Z or X depending upon its relative tolerance of hydrophobic residues (based upon their respective PSSM values). Positions that were tolerant of hydrophobic residues were assigned as Z and genetically encoded using the codon NTN. Positions more tolerant of hydrophilic residues were assigned as an X and genetically encoded using the codon ANR. For SEQID-45029 the sequences of the identified regions are summarized in the following table.

| Start residue # | original | degenerate |
|---|---|---|
| 121 | DLSSGA | ZLZZGZ |
| | (SEQ ID NO: 22143) | |
| 320 | SDSE | ZZXZ |
| | (SEQ ID NO: 22144) | |
| 429 | SDGEQ | XZGXX |
| | (SEQ ID NO: 22145) | |
| 474 | AATSA | XXTSX |
| | (SEQ ID NO: 22146) | |

X = NTN, codes for F, L, I, M, V
Z = ANR, codes for I, M, T, K, R

### Library Design and Construction

[0511] Based on identification of variable regions, we designed primers that can amplify each variable region as explained in FIG. 33. For example if there are four variable regions, we need four pair of primers to generate four variable fragments. In step 1 we used pES1962 (a derivative of LMBP2236 obtained from BCCM/LMBP, Ghent University with HIL6 replaced with a 3×FLAG tag) as the template which contains SEQID-45029 under glaA promoter with a C terminal 3×FLAG tag followed by the Aspergillus nidulans TrpC terminator. For fragment 1,2,3,4, the forward PRIMERID-45105, PRIMERID-45106, PRIMERID-45107, and PRIMERID-45108 contain 25 bases of constant sequence before the variable region followed by degenerate sequences to represent the variable region and 25 bases of constant sequence downstream of the variable region. For fragment 1, 2, 3, the reverse primers PRIMERID-45113, PRIMERID-45114, and PRIMERID-45115 contain 25 bases of reverse complementary sequence upstream of next variable region respectively. For fragment 4, the reverse primer PRIMERID-45116 contains 25 bases of reverse complementary sequence at an arbitrary distance from variable region 4. Four separate PCR amplifications were done using Phusion DNA polymerase (New England Biolabs, Beverly, Mass.) using the recommended manufacturer's protocol. As separate reactions, four wild type fragments, WT-frag-1, WT-frag-2, WT-frag-3 and WT-frag-4 were generated using PES1205 PES1962 as template and primer pairs PRIMERID-45109 & PRIMERID-45113, PRIMERID-45110 & PRIMERID-45114, PRIMERID-45111 & PRIMERID-45115, and PRIMERID-45112 & PRIMERID-45116, respectively. All fragments were gel purified. In step 2, two separate PCR reactions were set. The first PCR reaction contain fragment 1 and 2 in equimolar ratio as template and PRIMERID-45109 and PRIMERID-45114 as primers. The second PCR reaction contain fragment 3 and 4 in equimolar ratio and PRIMERID-45111 and PRIMERID-45116 as primers. In both the reactions, respective wild type fragments were added in a molar ratio of library members present in each variable fragments. Fragment 5 and 6 are gel purified and used as templates in equimolar ratio in step 3. The primers used in the PCR reaction include PRIMERID-45109 and PRIMERID-45116. The vector PCR product i was generated using pES1205 pES1962 and primer pairs, PRIMERID-45117 and PRIMERID-45118. Both fragment 7 and vector PCR product were gel purified and cloned together using the Gibson Assembly Master Mix (New England Biolabs, Beverly, Mass.) and transformed into the cloning host E. coli Turbo (New England Biolabs) according to manufacturer's instructions. 50 colonies were sequenced to determine the diversity of the library. The colonies on the agar plate were then suspended in LB media and harvested for plasmid purification. In a similar fashion, we generated 9 specific variants of SEQID-45029 which were altered with 9 specific amino acids, F, L, I, M, V, T, K, R, W at every variable position identified in the mutant design. Specific variant primers are denoted by the single letter amino acid abbreviation in the name. All primers are listed in table PRIMERID1 below.

| TABLE PRIMERID1 | Primer Sequence (SEQ ID NOS 45105-45154, respectively, in order of appearance) |
|---|---|
| PRIMERID-45105 | CCAGGGTATCAGTAACCCCTCTGGTANRCTGANRANRGGCANRGGTCTCGGTGAACCCAAGTTC |
| PRIMERID-45106 | CTCAATCTATACCCTCAACGATGGTCTCANRANRNTNANRGCTGTTGCGGTGGGTCGG |
| PRIMERID-45107 | CTCCATGTCCGAGCAATACGACAAGNTNANRGGCNTNNTNCTTTCCGCTCGCGACCTG |
| PRIMERID-45108 | TGCCAGCAGCGTGCCCGGCACCTGTNTNNTNACATCTNTNATTGGTACCTACAGCAGTGTGACTGTCAC |
| PRIMERID-45109 | CCAGGGTATCAGTAACCCCTCTGG |
| PRIMERID-45110 | CTCAATCTATACCCTCAACGATGGTCTC |
| PRIMERID-45111 | CTCCATGTCCGAGCAATACGAC |
| PRIMERID-45112 | TGCCAGCAGCGTGCCCG |
| PRIMERID-45113 | GAGACCATCGTTGAGGGTATAGATTGAG |
| PRIMERID-45114 | CTTGTCGTATTGCTCGGACATGG |
| PRIMERID-45115 | ACAGGTGCCGGGCACGC |
| PRIMERID-45116 | GATCGATCCGACCAGGTAGATGTTC |
| PRIMERID-45117 | GAACATCTACCTGGTCGGATCGATC |
| PRIMERID-45118 | ACCAGAGGGGTTACTGATACCCTG |
| PRIMERID-45119 | CCAGGGTATCAGTAACCCCTCTGGTCTCCTGCTCCTGGGCCTCGGTCTCGGTGAACCCAAGTTC |
| PRIMERID-45120 | CCAGGGTATCAGTAACCCCTCTGGTateCTGattatcGGCattGGTCTCGGTGAACCCAAGTTC |
| PRIMERID-45121 | CCAGGGTATCAGTAACCCCTCTGGTgtcCTGgtggtcGGCgtgGGTCTCGGTGAACCCAAGTTC |
| PRIMERID-45122 | CCAGGGTATCAGTAACCCCTCTGGTttcCTGttcttcGGCttcGGTCTCGGTGAACCCAAGTTC |
| PRIMERID-45123 | CCAGGGTATCAGTAACCCCTCTGGTtggCTGtggtggGGCtggGGTCTCGGTGAACCCAAGTTC |
| PRIMERID-45124 | CCAGGGTATCAGTAACCCCTCTGGTatgCTGatgatgGGCatgGGTCTCGGTGAACCCAAGTTC |
| PRIMERID-45125 | CCAGGGTATCAGTAACCCCTCTGGTaccCTGactaccGGCactGGTCTCGGTGAACCCAAGTTC |
| PRIMERID-45126 | CCAGGGTATCAGTAACCCCTCTGGTaagCTGaagaagGGCaagGGTCTCGGTGAACCCAAGTTC |
| PRIMERID-45127 | CCAGGGTATCAGTAACCCCTCTGGTcacCTGcaccacGGCcacGGTCTCGGTGAACCCAAGTTC |
| PRIMERID-45128 | CTCAATCTATACCCTCAACGATGGTCTCCTCCTGCTCCTGGCTGTTGCGGTGGGTCGG |
| PRIMERID-45129 | CTCAATCTATACCCTCAACGATGGTCTCatcattatcattGCTGTTGCGGTGGGTCGG |
| PRIMERID-45130 | CTCAATCTATACCCTCAACGATGGTCTCgtcgtggtcgtgGCTGTTGCGGTGGGTCGG |
| PRIMERID-45131 | CTCAATCTATACCCTCAACGATGGTCTCttcttcttcttcGCTGTTGCGGTGGGTCGG |
| PRIMERID-45132 | CTCAATCTATACCCTCAACGATGGTCTCtggtggtggtggGCTGTTGCGGTGGGTCGG |
| PRIMERID-45133 | CTCAATCTATACCCTCAACGATGGTCTCatgatgatgatgGCTGTTGCGGTGGGTCGG |
| PRIMERID-45134 | CTCAATCTATACCCTCAACGATGGTCTCaccactaccactGCTGTTGCGGTGGGTCGG |
| PRIMERID-45135 | CTCAATCTATACCCTCAACGATGGTCTCaagaagaagaagGCTGTTGCGGTGGGTCGG |
| PRIMERID-45136 | CTCAATCTATACCCTCAACGATGGTCTCcaccaccaccacGCTGTTGCGGTGGGTCGG |
| PRIMERID-45137 | CTCCATGTCCGAGCAATACGACAAGctcctgGGCctcctgCTTTCCGCTCGCGACCTG |
| PRIMERID-45138 | CTCCATGTCCGAGCAATACGACAAGatcattGGCatcattCTTTCCGCTCGCGACCTG |
| PRIMERID-45139 | CTCCATGTCCGAGCAATACGACAAGgtcgtgGGCgtcgtgCTTTCCGCTCGCGACCTG |
| PRIMERID-45140 | CTCCATGTCCGAGCAATACGACAAGttcttcGGCttcttcCTTTCCGCTCGCGACCTG |
| PRIMERID-45141 | CTCCATGTCCGAGCAATACGACAAGtggtggGGCtggtggCTTTCCGCTCGCGACCTG |
| PRIMERID-45142 | CTCCATGTCCGAGCAATACGACAAGatgatgGGCatgatgCTTTCCGCTCGCGACCTG |
| PRIMERID-45143 | CTCCATGTCCGAGCAATACGACAAGaccactGGCaccactCTTTCCGCTCGCGACCTG |
| PRIMERID-45144 | CTCCATGTCCGAGCAATACGACAAGaagaagGGCaagaagCTTTCCGCTCGCGACCTG |
| PRIMERID-45145 | CTCCATGTCCGAGCAATACGACAAGcaccacGGCcaccacCTTTCCGCTCGCGACCTG |
| PRIMERID-45146 | TGCCAGCAGCGTGCCCGGCACCTGTCTCCTGACATCTCTCATTGGTACCTACAGCAGTGTGACTGTCAC |
| PRIMERID-45147 | TGCCAGCAGCGTGCCCGGCACCTGTatcattACATCTatcATTGGTACCTACAGCAGTGTGACTGTCAC |
| PRIMERID-45148 | TGCCAGCAGCGTGCCCGGCACCTGTgtcgtgACATCTgtcATTGGTACCTACAGCAGTGTGACTGTCAC |
| PRIMERID-45149 | TGCCAGCAGCGTGCCCGGCACCTGTttettcACATCTttcATTGGTACCTACAGCAGTGTGACTGTCAC |
| PRIMERID-45150 | TGCCAGCAGCGTGCCCGGCACCTGTtggtggACATCTtggATTGGTACCTACAGCAGTGTGACTGTCAC |
| PRIMERID-45151 | TGCCAGCAGCGTGCCCGGCACCTGTatgatgACATCTatgATTGGTACCTACAGCAGTGTGACTGTCAC |
| PRIMERID-45152 | TGCCAGCAGCGTGCCCGGCACCTGTaccactACATCTaccATTGGTACCTACAGCAGTGTGACTGTCAC |
| PRIMERID-45153 | TGCCAGCAGCGTGCCCGGCACCTGTaagaagACATCTaagATTGGTACCTACAGCAGTGTGACTGTCAC |
| PRIMERID-45154 | TGCCAGCAGCGTGCCCGGCACCTGTcaccacACATCTcacATTGGTACCTACAGCAGTGTGACTGTCAC |

Aspergillus niger Strain Construction

[0512] An ΔaamA, pyrE derivative of Aspergillus niger MGG029 (Conesa et al., Applied and Environmental Microbiology, 2000) was used in the study. Expression vectors were co-transformed with a vector encoding the marker pyrE from Aspergillus niger using a standard protoplast transformation method (Punt et al., Methods in Enzymology, 1992). Protoplasts were transformed with 5 μg of expression vector and 1 μg vector encoding pyrE. Transformants were selected on minimal media supplemented with 1.2 M sorbitol (1.5% bacto agar, 10 g/l glucose, 4 g/l sodium nitrate, 20 ml/l salts solution (containing 26.2 g/l potassium chloride and 74.8 g/l Potassium phosphate monobasic at pH 5.5), and 1 ml/l of metals solution (containing 20 g/l Zinc sulfate heptahydrate (ZnSO4-7H2O), 11 g/l Boric acid (H3B03), 5 g/l Manganese (II) chloride tetrahydrate (MnCl2-4H2O), 5 g/l Iron (II) sulfate heptahydrate (FeSO4-7H2O), 1.7 g/l Cobalt(II) chloride hexahydrate (CoCl2-6H2O), 1.6 g/l Copper(II) sulfate pentahydrate (CuSO4-5H2O), 1.5 g/l Sodium molybdate dihydrate (NaMoO4-2H2O), and 5.0 g/l EDTA disodium salt dihydrate (Na2EDTA-2H2O) at pH 6.5). Plates were incubated at 30 C for 4 days until the majority of colonies had visible conidiophores.

Aspergillus niger Expression Testing

[0513] Conidia were picked from individual colonies using a sterile toothpick and inoculated directly in 800 μL of complete media (5.0 g/l yeast extract, 2.0 g/l casamino acids, 10 g/l maltose, 4 g/l sodium nitrate, 20 ml/l salts solution (containing 26.2 g/l potassium chloride and 74.8 g/l Potassium phosphate monobasic at pH 5.5), and 1 ml/l of metals solution (containing 20 g/l Zinc sulfate heptahydrate (ZnSO4-7H2O), 11 g/l Boric acid (H3BO3), 5 g/l Manganese (II) chloride tetrahydrate (MnCl2-4H2O), 5 g/l Iron (II) sulfate heptahydrate (FeSO4-7H2O), 1.7 g/l Cobalt(II) chloride hexahydrate (CoCl2-6H2O), 1.6 g/l Copper(II) sulfate pentahydrate (CuSO4-5H2O), 1.5 g/l Sodium moly′bdate dihydrate (NaMoO4-2H2O), and 5.0 g/l EDTA disodium salt dihydrate (Na2EDTA-2H2O) at pH 6.51), 1 ml/l vitamin solution (containing 100 mg/l Pyridoxine hydrochloride, 150 mg/l Thiamine hydrochloride, 750 mg/l 4-Aminobenzoic acid, 2.5 g/l Nicotinic acid, 2.5 g/l riboflavin, 20 g/l choline chloride, and 30 mg/l biotin), adjusted to pH 7 with 40 mM MES and supplemented with SigmaFast Protease Inhibitor Cocktail EDTA-Free (1 tab/100 mL, SigmaAldrich) in 96 well square bottom deep well blocks. Culture blocks were covered with porous adhesive plate seals and incubated for 48 hrs in a micro-expression chamber (Glas-Col, Terre Haute, Ind.) at 30° C. and shaking at 1000 rpm. After the growth period, 500 μL aliquots of the culture supernatants were filtered first through a 25 μm/0.45-μm dual stage filter followed by a 0.22 μm filter. The filtrates were then assayed to determine the levels of secreted protein of interest.

Aspergillus niger Sequencing Analysis

[0514] Fungal tissues were harvested from individual wells of the 96 deep well block and remaining supernatant was aspirated with a fine-tipped gel loading pipette tip. DNA was extracted using the ZRFungal/Bacterial DNA Miniprep kit (Zymo Research). Approximately 5 ng of genomic DNA was used as a template for PCR with PRIMERID-45155 (GAGAGCCTGAGCTTCATC) (SEQ ID NO: 45155) and PRIMERID-45156 (CACCAACGATCTTATATCCAGATTC) (SEQ ID NO: 45156) to amplify the entire expression cassette. The PCR reaction was purified using a Zymoclean Gel DNA recovery kit (Zymo Research) and sequenced PRIMERID-45155, PRIMERID-45156, and PRIMERID-45157 (AGCAGAGCTAACCCGC) (SEQ ID NO: 45157). Genomic DNA preps exhibiting polymorphisms at randomized loci were subcloned into pCRBluntII TOPO (Life Technologies) and 15 colonies were sequenced with PRIMERID-45155, PRIMERID-45156, and PRIMERID-45157.

### Anti-FLAG Dot Blot Analysis

[0515] Extracellular protein was quantified using a dot blot method. 110 μl of 0.2 μm filtered sample was mixed with 110 μl 8.0M Guanidine Hydrochloride, 0.1M Sodium Phosphate (Denaturing Buffer) to allow for normalized protein binding and to ensure exposure of the tag. A standard curve of Amino-terminal FLAG-BAP™ Fusion Protein (Sigma) was prepared in the same matrix as the samples, starting at 2 μg, diluting 2× serially to 0.0313 μg. Invitrogen 0.45 μm nitrocellulose membrane was pre-wet in 1×PBS buffer for 5 minutes and then loaded onto Bio-Rad Dot Blot Apparatus. 300 μl of PBS was vacuumed through to further wet the membrane. Next, 200 μl the 1:1 Sample:Denaturing Buffer mixture was loaded into each well and allowed to drain through the dot blot apparatus by gravity for 30 minutes. Next, a 300 μl PBS wash was performed on all wells by vacuum followed by loading 300 μl of Millipore Blok CH Noise Cancelling reagent and incubating for 60 minutes. After blocking, the membrane was washed with 300 μl of 1×PBS+0.1% Tween 20. Next, antibody solution was prepared by adding 2.4 μl of Sigma Monoclonal ANTI-FLAG® M2-Peroxidase (HRP) antibody to 12 ml of Millipore Blok CH Noise Cancelling reagent (1:5000 dilution). 100 μl of the resulting antibody solution was added to each well and allowed to incubate for 30 minutes by gravity. After antibody incubation, three final washes are performed with 300 μl 1×PBS+0.1% Tween 20 by vacuum. After washes, the nitrocellulose membrane was removed and placed into a reagent tray. 20 ml of Millipore Luminata Classico Western HRP substrate was added and allowed to incubate for 1 minute. After incubation, membrane was placed into imaging tray of Gel Doc™ XR+System (Bio-rad) and imaged using a chemiluminescent protocol. FIG. 35 shows an example of an anti-FLAG dot-blot demonstrating secretion of SEQID-45029 variants in Aspergillus niger.

### Protein Identification by LC/MS/MS

[0516] The protein sequence of secreted variants is further confirmed by LC/MS/MS of the gel band of interest. Selected hits are mixed with Invitrogen LDS Sample Buffer containing 5% β-mercaptoethanol, boiled and loaded on a Novex® NuPAGE® 10% Bis-Tris gel (Life Technologies). After running, the gels are stained using SimplyBlue™ SafeStain (Life Technologies) and desired bands are excised and submitted for analysis. Gel bands are washed, reduced and alkylated, and then digested with Trypsin for 4 hours followed by quenching with formic acid. Digests will then analyzed by nano LC/MS/MS with a Waters NanoAcquity HPLC system interfaced to a ThermoFisher Q Exactive. Peptides are loaded on a trapping column and eluted over a 75 μm analytical column at 350 nL/min; both columns are packed with Jupiter Proteo resin (Phenomenex). The mass spectrometer is operated in data-dependent mode, with MS and MS/MS performed in the Orbitrap at 70,000 FWHM resolution and 17,500 FWHM resolution, respectively. The fifteen most abundant ions are selected for MS/MS. The resulting peptide data are searched using Mascot against the relevant host database with relevant variant protein sequence appended.

### Results

[0517] An Aspergillus niger strain was transformed with eight specific SEQID-45029 variants (pES2009, pES2010, pES2012, pES2013, pES2014, pES2015, pES2016, pES2017, pES1962). Primary transformants were selected on minimal media plates and conidia from approximately ten individual colonies were inoculated into 96 deep well blocks containing complete media. Cultures were incubated for 48 hrs after which period supernatants were assayed for the protein of interest with anti-FLAG dotblot analysis. For specific variants, only transformation with pES1962 encoding wild type SEQID-45029 and pES2016 encoding a poly-lysine substituted SEQID-45029 sequence gave FLAG signal in the supernatant (FIG. 35A, B).

[0518] An Aspergillus niger strain (see methods) was transformed with the SEQID-45029 expression vector library (see Table 1). Primary transformants were selected on minimal media plates and conidia from 43 individual colonies were inoculated (in duplicate) into a 96 deep well block containing complete media. Cultures were incubated for 48 hrs after which period supernatants were assayed for the protein of interest with anti-FLAG dotblot analysis. Supernatant analysis of solates 18 and 27 gave above background FLAG signal in the supernatant (FIG. 35C,D).

[0519] We isolated DNA form isolates 18 and 27 and amplified the SEQID-45029 expression cassette. The PCR product was fully sequenced to identify the specific DNA sequences found in the cells. The DNA sequences of isolates 18 and 27 showed polymorphisms at all four variable positions indicating that each isolate harbored multiple, distinct expression vectors. The PCR product were subcloned into pCRBlutII TOPO vector, transformed into E. coli, and 15 subclones were sequenced to determine the diversity of expression vectors (FIG. 36). For isolate 18, we identified 11 unique expression cassettes with no variable region identical to the wild-type sequence. Isolates 18-1 and 18-3 contained identical 247 base pair deletions spanning exon 3 and exon 4. For isolate 27, we identified 12 unique expression cassettes, one of which, 27-14 which was identical to the wild-type sequence in variable position 2, 3, and 4 but different than the wild-type sequence in variable position 1. The large number of unique expression cassettes among 15 isolates suggests that each primary isolate had multiple (e.g., more than 1, such as 2, 3, 4, 5, 6, 7, 8, 9, 10, 11, 12, 13, 14, 15 or more than 15) integration events or that each isolate was not a clonal colony and contained multiple primary transformants. It is possible that one or more of these expression cassettes contributes to the positive FLAG signal on the dot-blot. Mass spectrometric analyses of the supernatant or retransformation of all identified expression cassettes are used to identify which amino acid enhanced mutants are readily secreted.

### Example 15

### 15A. Secreted Protein from Bacillus Engineered for Increased Digestive Protease Cleavage Sites

[0520] The engineered secreted variants SEQID-45009, SEQID-45014, and SEQID-45027 are all enriched in a recognition site for a digestive protease. By adding sites for proteolysis the polypeptide will breakdown further into more small peptides for continued proteolysis until they are absorbed by the intestine. The three key proteases in protein digestion are Pepsin, Trypsin, and Chymotrypsin. Pepsin recognition sites are any site in a polypeptide sequence after (i.e., downstream of) an amino acid residue selected from Phe, Trp, Tyr, Leu, Ala, Glu, and Gln, provided that the following residue is not an amino acid residue selected from Ala, Gly, and Val. Trypsin recognition sites are any site in a polypeptide sequence after an amino acid residue selected from Lys or Arg, provided that the following residue is not a proline. Chymotrypsin recognition sites are any site in a polypeptide sequence after an amino acid residue selected from Phe, Trp, Tyr, and Leu.

[0521] SEQID-45009 is enriched in Arginine from 4.7% to 5.3%, a 13.8% increase in arginine content, thus enriching the polypeptide in cleavage sites for trypsin. SEQID-45014 is enriched in Leucine from 5.5% to 6.3%, a 14.3% increase in Leucine content, thus enriching the polypeptide in cleavage sites for both pepsin and chymotrypsin. SEQID-45027, is enriched in Lysine from 6.2% to 8.0%, a 28.9% increase in Lysine content, thus enriching the polypeptide in cleavage sites for trypsin. The amino acid content and PDCAAS score of the wild-type SEQID-45001 and variants are listed in Table 15A.

[0522] The digestibility of engineered secreted variants can be measure via an in vitro simulated digestion assay combined with analysis by electrophoresis, HPLC, and LC-MS/MS. In vitro digestion systems have history of being used to simulate the breakdown of polypeptides into bioaccessible peptides and amino acids while passing through the stomach and intestine (Kopf-Bolanz, K. A. et al., The Journal of nutrition 2012; 142: 245-250, Hur, S. J. et al., Food Chemistry 2011; 125: 1-12). Digestibility is also predictive of potentially allergenic sequences since polypeptide resistance to digestive proteases can lead to intestinal absorption and sensitization (Astwood et al., Nature Biotechnology 1996; 14: 1269-1273).

[0523] To measure digestibility the polypeptide is first treated at a concentration of 2 g/L with simulated gastric fluid (0.03 M NaCl, titrated with HCl to pH 1.5 with a final pepsin:polypeptide ratio of 1:20 w/w) at 37° C. Time points are sampled from the reaction and quenched by addition of 0.2 M Na2CO3. After 120 mins in simulated gastric fluid the remaining reaction is mixed 50:50 with simulated intestinal fluid (15 mM sodium glycodeoxycholate, 15 mM taurocholic acid, 18.4 mM CaCl2, 50 mM MES pH 6.5 with a final trypsin:chymotrypsin:substrate ratio of 1:4:400 w/w) and neutralized with NaOH to pH 6.5. Time points are sampled from the reaction and quenched by addition of Trypsin/Chymotrypsin Inhibitor solution until 120 mins. Sampled time points can then be analyzed by chip electrophoresis, reverse phase HPLC, and LC-MS/MS.

[0524] Chip electrophoresis (Labchip GX II) is used to evaluate the digestion rate (half-life) of intact protein. Samples are analyzed using a HT Low MW Protein Express LabChip® Kit (following the manufacturer's protocol) a protein ladder is loaded every 12 samples for molecular weight determination (kDa) and quantification. The concentration of the polypeptide at each time point (if detected) is plotted to calculate the half-life of digestion and represents the speed of protein digestion. By increasing protease recognition sites the intact protein is more likely to have an exposed cleavage sequence to increase the initial steps in proteolysis of intact protein.

[0525] To analyze digestions by reverse phase HPLC the samples are automatically derivatized with o-phthalaldehyde (OPA) and in-line analyzed by RP-HPLC with UV-Vis and fluorescence detection according to an Agilent application note, Henderson et al. “Rapid, Accurate, Sensitive, and Reproducible HPLC Analysis of Amino Acids” Agilent (2000) Amino acids and small peptides are detected and quantified by comparing to standard amino acids and peptide mixtures. The quantity of amino acids in digest samples represents the efficiency of a protein to digest into small bioavailable components. By adding more protease cleavage sites more amide bonds are broken and the efficiency of a protein to break down into amino acids is increased.

[0526] To analyze digest peptides by LC-MS/MS the sample pH is adjusted to pH3 with trifluoroacetic acid (TFA) and peptides are extracted using HLB solid phase extraction cartridges (Waters). The eluted peptides are then loaded on-column and analyzed by nano LC/MS/MS. Data are searched against an appropriate database using Mascot to identify peptides. Using this method large peptides that are resistant to digestion can be detected. By adding protease recognition sites to sequence space that is resistant to digestion the polypeptide can breakdown more thoroughly into small peptides and amino acids.

Secreted Protein from Bacillus Engineered for Increased Essential Amino Acid Content

[0527] Essential amino acids include Histidine, Isoleucine, Leucine, Lysine, Methionine, Phenylalanine, Threonine, Tryptophan, and Valine. Because their carbon skeletons are not synthesized de novo by the body to meet metabolic requirements, they must be taken as food. The engineered secreted polypeptides SEQID-45009, SEQID-45010, SEQID-45014, SEQID-45024, SEQID-45025, SEQID-45026, SEQID-45028, and SEQID-45027 have increased essential amino acid content by 1.1-2.5% as compared to wild-type. Particularly, SEQID-45014 increased the essential amino acid content of wild type from 42.1% to 43.7%, a 3.8% increase. Also, all of these variants contain a complete set of all essential amino acids. The administration of these nutritive polypeptides can provide the essential amino acids absent or present in insufficient amounts in a subject's diet to treat or prevent essential amino acid deficiency. The amino acid content and PDCAAS score of the wild-type SEQID-45001 and variants are listed in Table 15A.

Secreted Protein from Bacillus Engineered for Increased PDCAAS (Protein Digestibility Corrected Amino Acid Score)

[0528] PDCAAS is required by the United States Food and Drug Administration (US-FDA) labeling regulations, which were promulgated out of the Nutrition Labeling and Education Act of 1990 (NLEA), when making claims about the quality of protein content. The method was described and recommended for use by the Food and Agriculture Organization/World Health Organization (FAO/WHO) in 1991 (FAO/WHO. Protein Quality Evaluation; Report of a Joint FAO/WHO Expert Consultation, United Nations; Rome, Italy, 1991). PDCAAS is a measure for protein quality based on the preferred amino acid requirements of humans and their ability to digest it by evaluating the ratio of the limiting amino acid with respect to reference protein normalized by a true fecal digestibility percentage. Mutant variants SEQID-45009, SEQID-45010, SEQID-45024, and SEQID-45026 have elevated PDCAAS scores as compared to wild-type, especially for SEQID-45009 which increased the PDCAAS score from 0.92 to 1.04 a 13% increase. Polypeptides with higher PDCAAS score are able to provide a superior ratio of important amino acids delivered to the body. The amino acid content and PDCAAS score of the wild-type SEQID-45001 and variants are listed in Table 15A.

Secreted Protein from Bacillus Engineered for Increased Lysine Content

[0529] The engineered secreted variant SEQID-45027 has enriched lysine content when compared to wild-type protein. In SEQID-45027 lysine was increased from 6.2% to 8.0%, a 28.9% increase in the lysine content. By enriching secreted proteins in lysine, the content of an essential amino acid which cannot be synthesized has been increased and an important amino acid has been added that has additional utility to growth and health. The amino acid content and PDCAAS score of the wild-type SEQID-45001 and variants are listed in Table 15A.

Secreted Protein from Bacillus Engineered for Increased Methionine Content

[0530] The engineered secreted variants SEQID-45010 and SEQID-45026 have enriched methionine content when compared to wild-type protein. In SEQID-45010 methionine was increased from 1.9% to 2.4%, a 29.3% increase in the methionine content. In SEQID-45026 methionine was increased from 1.9% to 3.5%, an 89.0% increase in the methionine content. By enriching secreted proteins in methionine, the content of an essential amino acid which cannot be synthesized has been increased and an important amino acid has been added that has additional utility to growth and health. The amino acid content and PDCAAS score of the wild-type SEQID-45001 and variants are listed in Table 15A.

Secreted Protein from Bacillus Engineered for Increased Histidine Content

[0531] Mutant variant SEQID-45028 has increased histidine amino acid content to 4.9% from 3.1%, a 55% increase in histidine as compared to wild-type. By enriching secreted proteins in histidine, the content of an essential amino acid which cannot be synthesized has been increased and an important amino acid has been added that has additional utility to growth and health. The amino acid content and PDCAAS score of the wild-type SEQID-45001 and variants are listed in Table 15A.

Secreted Protein from Bacillus Engineered for Increased Arginine Content

[0532] The engineered secreted variants SEQID-45009, and SEQID-45010 have enriched arginine content when compared to wild-type protein. In SEQID-45009 arginine was increased from 4.7% to 5.3%, a 13.8% increase in the arginine content. In SEQID-45010 was increased from 4.7% to 5.3%, a 13.7% increase in the arginine content. By enriching secreted proteins in arginine an important non-essential amino acid has been added that has utility to growth and health. The amino acid content and PDCAAS score of the wild-type SEQID-45001 and variants are listed in Table 15A.

Secreted Protein from Bacillus Engineered for Increased Threonine Content

[0533] The engineered secreted variant SEQID-45025 has enriched threonine content when compared to wild-type protein. In SEQID-45025 threonine was increased from 6.9% to 8.2%, a 18.6% increase in the threonine content. By enriching secreted proteins in threonine, the content of an essential amino acid which cannot be synthesized has been increased and an important amino acid has been added that has additional utility to growth and health. The amino acid content and PDCAAS score of the wild-type SEQID-45001 and variants are listed in Table 15A.

Secreted Protein from Bacillus Engineered for Increased BCAA Content

[0534] We demonstrated SEQID-45009, SEQID-45010, SEQID-45014, SEQID-45024 variants are readily secreted and contain increased branched chain amino acids relative to wild-type SEQID-45001. SEQID-45009, SEQID-45010, SEQID-45014, SEQID-45024 contains 7.2%, 6.4%, 9.7%, and 8.1% increased branched chain amino acids relative to wild-type SEQID-45001. By enriching secreted proteins in BCAAs, the content of essential amino acids and an important family of amino acids have been increased. The amino acid content and PDCAAS score of the wild-type SEQID-45001 and variants are listed in Table 15A.

[0535] Branched Chain Amino Acids have been shown to have anabolic effects on protein metabolism by increasing the rate of protein synthesis and decreasing the rate of protein degradation in resting human muscle. Additionally, BCAAs are shown to have anabolic effects in human muscle during post endurance exercise recovery. These effects are mediated through the phosphorylation of mTOR and sequential activation of 70-kD S6 protein kinase (p70-kD S6), and eukaryotic initiation factor 4E-binding protein 1. P70-kD S6 is known for its role in modulating cell-cycle progression, cell size, and cell survival. P70-kD S6 activation in response to mitogen stimulation up-regulates ribosomal biosynthesis and enhances the translational capacity of the cell (W-L An, et al., Am J Pathol. 2003 August; 163(2): 591-607; E. Blomstrand, et al., J. Nutr. January 2006 136: 269S-273S). Eukaryotic initiation factor 4E-binding protein 1 is a limiting component of the multi-subunit complex that recruits 40S ribosomal subunits to the 5′ end of mRNAs. Activation of p70 S6 kinase, and subsequent phosphorylation of the ribosomal protein S6, is associated with enhanced translation of specific mRNAs.

[0536] BCAAs given to subjects during and after one session of quadriceps muscle resistance exercise show an increase in mTOR, p70 S6 kinase, and S6 phosphorylation was found in the recovery period after the exercise. However, there was no such effect of BCAAs on Akt or glycogen synthase kinase 3 (GSK-3). Exercise without BCAA intake leads to a partial phosphorylation of p70 S6 kinase without activating the enzyme, a decrease in Akt phosphorylation, and no change in GSK-3. BCAA infusion also increases p70 S6 kinase phosphorylation in an Akt-independent manner in resting subjects. Leucine is furthermore known to be the primary signaling molecule for stimulating mTOR1 phosphorylation in a cell-specific manner. This regulates cellular protein turnover (autophagy) and integrates insulin-like growth signals to protein synthesis initiation across tissues. This biology has been directly linked to biogenesis of lean tissue mass in skeletal muscle, metabolic shifts in disease states of obesity and insulin resistance, and aging.

Secreted Protein from Bacillus Engineered for Increased Leucine Content

[0537] The engineered secreted variants SEQID-45009, SEQID-45010, SEQID-45014, and SEQID-45024 have enriched leucine content when compared to wild-type protein. In SEQID-45009 leucine was increased from 5.5% to 6.1%, a 11.3% increase in the leucine content. In SEQID-45010 leucine was increased from 5.5% to 6.0%, a 8.3% increase in the leucine content. In SEQID-45014 leucine was increased from 5.5% to 6.3%, a 14.3% increase in the leucine content. In SEQID-45024 leucine was increased from 5.5% to 5.8%, a 5.6% increase in the leucine content. The amino acid content and PDCAAS score of the wild-type SEQID-45001 and variants are listed in Table 15A.

Secreted Protein from Bacillus Engineered for Increased Isoleucine Content

[0538] The engineered secreted variants SEQID-45009, SEQID-45010, and SEQID-45014 have enriched leucine content when compared to wild-type protein. In SEQID-45009 leucine was increased from 5.5% to 6.1%, a 11.3% increase in the leucine content. In SEQID-45010 leucine was increased from 5.5% to 6.0%, a 8.3% increase in the leucine content. In SEQID-45014 leucine was increased from 5.5% to 6.3%, a 14.3% increase in the leucine content. In SEQID-45024 leucine was increased from 5.5% to 5.8%, a 5.6% increase in the leucine content. The amino acid content and PDCAAS score of the wild-type SEQID-45001 and variants are listed in Table 15A.

Secreted Protein from Bacillus Engineered for Increased Valine Content

[0539] We demonstrated SEQID-45009, SEQID-45010, SEQID-45014, SEQID-45024 variants are readily secreted and contain increased in valine relative to wild-type SEQID-45001. SEQID-45009, SEQID-45010, SEQID-45014, SEQID-45024 contains 15.6%, 9.1%, 9.2% and 25.5% increased valine relative to wild-type SEQID-45001. The amino acid content and PDCAAS score of the wild-type SEQID-45001 and variants are listed in Table 15A.

Secreted Protein from Bacillus Engineered for Decreased Activity

[0540] In some cases the engineered secreted protein is an enzyme or has enzymatic activity. Since activity is not necessarily important for nutritional quality, it can be desirable to inactivate or reduce the enzymatic activity. The active sites of SEQID-45001 are predicted to be residues D217 and E249, which are acidic residues lying in the center of the catalytic domain. To produce a polypeptide free of enzymatic activity and enriched in amino acids important to nutrition and health, we can mutate those two sites to disrupt the catalytic activity of SEQID-45001. Because D217 and E249 in SEQID-45001 may act as nucleophiles and proton donors or acceptors to form hydrogen bonds with their ligands, we can mutate both residues into alanine or an essential amino acid to disrupt the activity. Alanine, phenylalanine, leucine, isoleucine, valine, and methionine are lack of oxygen or nitrogen atoms in their side chain and cannot act as nucleophiles or proton donors with the ligand. Threonine, lysine, and arginine are different from glutamic acid and aspartic acid in their charges under physiological pH and their sizes and shapes.

What is claimed is:

1. A formulation comprising an isolated nutritive polypeptide, wherein the nutritive polypeptide comprises a ratio of one or more essential amino acids to total amino acids that is higher than the ratio of one or more essential amino acids to total amino acids in a reference secreted protein at least 50 amino acids in length, wherein the nutritive polypeptide is present in the formulation in a nutritional amount, and wherein the formulation is substantially free of non-comestible products.

2. The formulation of claim 1, wherein the one or more essential amino acids are present in the formulation in a nutritional amount.

3. The formulation of claim 1, wherein the nutritive polypeptide comprises a ratio of total essential amino acids to total amino acids that is higher than the ratio of total essential amino acids to total amino acids in the reference secreted protein.

4. The formulation of claim 1, wherein the nutritive polypeptide comprises a ratio of a single essential amino acid to total amino acids that is higher than the ratio of a single essential amino acid to total amino acids in the reference secreted protein.

5. The formulation of claim 1, wherein the nutritive polypeptide comprises a ratio of two essential amino acids to total amino acids that is higher than the ratio of two essential amino acids to total amino acids in the reference secreted protein.

6. The formulation of claim 1, wherein the reference secreted protein comprises a secreted enzyme polypeptide.

7. The formulation of claim 6, wherein the isolated nutritive polypeptide is capable of a decreased level of the primary enzymatic activity of the secreted enzyme polypeptide.

8. The formulation of claim 1, wherein the isolated nutritive polypeptide is substantially purified from a host cell.

9. The formulation of claim 1, wherein the solubility of the nutritive polypeptide exceeds about 10 g/l at pH 7.

10. The formulation of claim 1, wherein the solubility of the nutritive polypeptide exceeds the solubility of the reference secreted protein.

11. The formulation of claim 1, wherein the digestibility of the nutritive polypeptide has a simulated gastric digestion half-life of less than sixty minutes.

12. The formulation of claim 1, wherein the digestibility of the nutritive polypeptide exceeds the digestibility of the reference secreted protein.

13. The formulation of claim 1, wherein the thermostability of the nutritive polypeptide exceeds the thermostability of the reference secreted protein.

14. The formulation of claim 1, wherein the nutritive polypeptide has a calculated solvation score of −20 or less.

15. The formulation of claim 1, wherein the nutritive polypeptide as a calculated aggregation score of 0.75 or less.

16. The formulation of claim 1, wherein the solubility and digestibility of the nutritive polypeptide exceeds the solubility and digestibility of the reference secreted protein.

17. The formulation of claim 1, wherein the nutritive polypeptide has less than about 50% homology to a known allergen.

18. The formulation of claim 1, wherein the reference secreted protein is i) a protein selected from proteins identified by UniProt Accession Numbers Q4WBW4, Q99034, A1DBP9, Q8NJP6, A1CU44, B0Y8K2, Q4WM08, Q0CMT2, Q8NK02, A1DNL0, A1CCN4, B0XWL3, Q4WFK4, A2QYR9, Q0CFP1, Q5B2E8, A1DJQ7, A1C4H2, B0Y9G4, B8MXJ7, Q4WBU0, Q96WQ9, A2R5N0, Q2US83, Q0CEU4, Q5BCX8, A1DBS6, Q9HE18, O14405, P62694, Q06886, P13860, Q9P8P3, P62695, P07987, A1C8U0, B0Y9E7, B8N1V9, Q4WBS1, Q2U2I3, Q5AR04, A1DBV1, B0YEK2, B8N7Z0, A4DA70, A2R2S6, Q2UI87, Q0CVX4, Q5AX28, A1D9S3, A1CC12, B0Y2K1, Q4WW45, Q5AQZ4, Q99024, P29026, P29027, P69328, P69327, P36914, P23176, P22832, A2QHE1, A1CR85, B0XPE1, B8NRX2, Q4WJJ3, P87076, A2RAL4, Q2UUD6, D0VKF5, Q0CTD7, Q5B5S8, A1D451, B8NJF4, A2QPK4, Q2UNR0, Q5AUW5, B0Y7Q8, B8NP65, Q4WMU3, Q2UN12, Q0CI67, Q5B6C6, A1DMR8, B8NMR5, Q2U325, Q0CUC1, Q5B0F4, A1DC16, A1CUR8, B0XM94, B8NPL7, Q4WL79, Q2U9M7, Q5B6C7, A1DPG0, A1CA51, B0Y3M6, B8NDE2, Q4WU49, A2R989, Q2U8Y5, Q0CAF5, Q5BB53, A1DFA8, B0Y8M8, Q4WLY1, Q5AV15, A1DNN8, Q5BA18, B0YB65, Q4WGT3, Q0CEF3, Q5B9F2, A1DCV5, B0XPB8, B8N5S6, Q4WR62, A5ABF5, Q2UDK7, Q0C7L4, Q5AWD4, A1D122, Q5B681, Q5BG51, A1CCL9, Q0CB82, Q5ATH9, Q4AEG8, B0XP71, B8MYV0, Q4WRB0, A2QA27, O00089, Q2UR38, Q0CMH8, Q5BAS1, P29026, P29027, P48827, A1CIA7, B0Y708, P35211, B8N106, P28296, P12547, Q00208, A1CWF3, P52750, P52754, P79073, P52755, P41746, or P28346, ii) SEQID-45001, iii) SEQID-45029, or iv) a fragment of i), ii) iii) at least 50 amino acids in length.

19. The formulation of any one of claims 1-18, comprising at least 1.0 g of nutritive polypeptide at a concentration of at least 100 g per 1 kg of formulation.

20. The formulation of any one of claims 1-18, wherein the formulation is present as a liquid, semi-liquid or gel in a volume not greater than about 500 ml or as a solid or semi-solid in a mass not greater than about 200 g.

21. The formulation of claim 1, wherein the nutritive polypeptide is produced in a recombinant organism.

22. The formulation of claim 1, wherein the nutritive polypeptide is produced by a unicellular organism comprising a recombinant nucleic acid sequence encoding the nutritive polypeptide.

23. The formulation of claim 1, wherein the formulation provides a nutritional benefit of at least about 2% of a reference daily intake value of protein or is otherwise present in an amount sufficient to provide a feeling of satiety when consumed by a human subject.

24. The formulation of claim 1, wherein the formulation provides a nutritional benefit of at least about 2% of a reference daily intake value of one or more essential amino acids.

25. The formulation of claim 1, wherein the formulation provides a nutritional benefit of at least about 2% of a reference daily intake value of total essential amino acids.

26. The formulation of claim 1, wherein the formulation provides at least 10 grams of nutritive polypeptide.

27. The formulation of claim 1, formulated for enteral administration.

28. The formulation of claim 1, wherein i) the nutritive polypeptide comprises at least about 98%, or 99%, or 99.5% or 99.9% overall sequence identity′ to the reference secreted protein over the full-length of the nutritive poly/peptide or the reference secreted protein, or ii) the nutritive polypeptide comprises an ortholog of the reference secreted protein, wherein the ortholog comprises at least about 70% overall sequence identity to the reference secreted protein over the full-length of the nutritive polypeptide or the reference secreted protein.

29. A food product comprising at least about 1 gram of the formulation of claim 1.

30. The formulation of claim 1, wherein the formulation provides a nutritional benefit per 100 g equivalent to or greater than at least about 2% of a reference daily intake value of protein.

31. The formulation of claim 1, wherein the effective amount of the nutritive polypeptide is lower than the effective amount of the reference secreted protein when administered to a human subject.

32. The formulation of claim 1, substantially free of a surfactant, a polyvinyl alcohol, a propylene glycol, a polyvinyl acetate, a polyvinylpyrrolidone, a non-comestible polyacid or polyol a fatty alcohol, an alkylbenzyl sulfonate, an alkyl glucoside, or a methyl paraben.

33. The formulation of claim 1, further comprising a tastant, a vitamin, a mineral, or a combination thereof.

34. The formulation of claim 1, further comprising a flavorant or non-nutritive polyol.

35. The formulation of claim 1, further comprising a nutritive carbohydrate and/or a nutritive lipid.

36. A recombinant unicellular organism comprising a recombinant nucleic acid sequence encoding an isolated nutritive polypeptide, wherein the nutritive polypeptide comprises a ratio of one or more essential amino acids to total amino acids that is higher than the ratio of one or more essential amino acids to total amino acids in a reference secreted protein at least 50 amino acids in length.

37. The recombinant unicellular organism of claim 36, wherein nutritive polypeptide is secreted from the unicellular organism.

38. A method of formulating a nutritive product, comprising the steps of providing a composition comprising an effective amount of an isolated nutritive polypeptide, wherein the nutritive polypeptide comprises a ratio of one or more essential amino acids to total amino acids that is higher than the ratio of one or more essential amino acids to total amino acids in a reference secreted protein at least 50 amino acids in length, wherein the nutritive polypeptide is present in the composition at a concentration of at least 1 mg of nutritive polypeptide per gram of the composition, and combining the composition with at least one food component, thereby formulating the nutritive product.

39. The method of claim 38, wherein the food component comprises a flavorant, a tastant, an agriculturally-derived food product, a vitamin, a mineral, a nutritive carbohydrate, a nutritive lipid, a binder, a filler or a combination thereof, wherein the nutritive product is comestible, and wherein the nutritive product comprises at least 1.0 g of nutritive polypeptide at a concentration of at least 100 g per 1 kg of nutritive product, and wherein the nutritive product is present as a liquid, semi-liquid or gel in a volume not greater than about 500 ml or as a solid or semi-solid in a mass not greater than about 200 g.

40. A method of selecting a nutritive composition for administration to a human subject who can benefit from same, the method comprising: identifying a minimal essential amino acid nutritive need in the subject; calculating an essential amino acid content score required to meet the minimal essential amino acid nutritive need; and providing a nutritive composition comprising an effective amount of a nutritive polypeptide, wherein the nutritive composition has at least the required essential amino acid content score.

41. A method of selecting a nutritive composition for administration to a human subject who can benefit from same, the method comprising: identifying a maximal essential amino acid nutritive need in the subject; calculating an essential amino acid content score required to not exceed the maximal essential amino acid nutritive need; and providing a nutritive composition comprising an effective amount of a nutritive polypeptide, wherein the nutritive composition has no greater than the required essential amino acid content score.

42. A method of treating a disease, disorder or condition characterized or exacerbated by protein malnourishment in a human subject in need thereof, comprising the step of administering to the human subject a nutritive formulation in an amount sufficient to treat such disease, disorder or condition, wherein the nutritive formulation comprises a nutritive polypeptide and an agriculturally-derived food product, wherein the nutritive polypeptide comprises a ratio of one or more essential amino acids to total amino acids that is higher than the ratio of one or more essential amino acids to total amino acids in a reference secreted protein at least 50 amino acids in length.

43. The method of claim 42, wherein the human subject is an elderly subject.

44. The method of claim 42, wherein the human subject is a child under 18 years old.

45. The method of claim 42, wherein the human subject is a pregnant subject or lactating female subject.

46. The method of claim 42, wherein the human subject is an adult between 18 years old and about 65 years old.

47. The method of claim 42, wherein the human subject is an adult suffering from or at risk of developing obesity, diabetes, or cardiovascular disease.

48. A method of improving the nutritional status of a human subject, comprising administering to the subject an effective amount of a nutritive formulation comprising an agriculturally-derived food product and an isolated nutritive polypeptide, wherein the nutritive polypeptide comprises a ratio of one or more essential amino acids to total amino acids that is higher than the ratio of one or more essential amino acids to total amino acids in a reference secreted protein at least 50 amino acids in length.

49. An engineered protein comprising: a sequence of at least 20 amino acids that comprise an altered amino acid sequence compared to the amino acid sequence of a reference secreted protein and a ratio of essential amino acids to total amino acids present in the engineered protein higher than the ratio of essential amino acids to total amino acids present in the reference secreted protein.

50. The engineered protein of claim 49, comprising at least one essential amino acid residue substitution of a non-essential amino acid residue in the reference secreted protein.

51. The engineered protein of claim 49, comprising i) at least one Arginine (Arg) or Glutamine (Glu) amino acid residue substitution of a non-Arginine (Arg) or non-Glutamine (Glu) amino acid residue in the reference secreted protein, ii) at least one phenylalanine (Phe) amino acid residue substitution of a non-Phe amino acid residue in the reference secreted protein, or iii) a combination thereof.

52. The engineered protein of claim 49, comprising i) at least one leucine (Leu) amino acid residue substitution of a non-Leu amino acid residue in the reference secreted protein, ii) at least one isoleucine (Ile) amino acid residue substitution of a non-Ile amino acid residue in the reference secreted protein, or iii) a combination thereof.

53. The engineered protein of claim 49, comprising at least one valine (Val) amino acid residue substitution of a non-Val amino acid residue in the reference secreted protein.

54. The engineered protein of claim 49, comprising at least one threonine (Thr) amino acid residue substitution of a non-Thr amino acid residue in the reference secreted protein.

55. The engineered protein of claim 49, comprising at least one lysine (Lys) amino acid residue substitution of a non-Lys amino acid residue in the reference secreted protein.

56. The engineered protein of claim 49, comprising at least one methionine (Met) amino acid residue substitution of a non-Met amino acid residue in the reference secreted protein.

57. The engineered protein of claim 49, comprising at least one histidine (His) amino acid residue substitution of a non-His amino acid residue in the reference secreted protein.

58. The engineered protein of claim 49, wherein the amino acid residue substitution is at an amino acid position with a per amino acid position entropy of at least 1.5.

59. The engineered protein of claim 49, wherein the difference in total folding free energy between the reference secreted protein and the engineered protein is less than or equal to 0.5.

60. An engineered protein comprising at least one essential amino acid residue substitution of a non-essential amino acid residue in a reference secreted protein at a position with a position entropy of at least 1.5.

61. The engineered protein of claim 49, wherein the reference secreted protein is a naturally occurring protein.

62. The engineered protein of claim 49, wherein the engineered protein is secreted from a compatible microorganism when expressed therein.

63. The engineered protein of claim 62, wherein the microorganism is the same genus as the microorganism in which the reference secreted protein naturally occurs.

64. The engineered protein of claim 62, wherein the microorganism is a heterotroph.

65. The engineered protein of claim 62, wherein the microorganism is photosynthetic.

66. The engineered protein of claim 65, wherein the photosynthetic microorganism is a cyanobacterium.

67. An isolated engineered protein comprising a sequence of at least 20 amino acids that comprise an altered amino acid sequence compared to the amino acid sequence of a reference secreted protein and a ratio of essential amino acids to total amino acids present in the engineered protein higher than the ratio of essential amino acids to total amino acids present in the reference secreted protein.

68. A formulation comprising a nutritional amount of the isolated engineered protein of claim 67.

69. The formulation of claim 68, wherein the formulation is substantially free of non-comestible products.

70. The formulation of claim 68, wherein the amino acid sequence of the engineered protein is at least 40%, 45%, 50%, 55%, 60%, 65%, 70%, 75%, 80%, 85%, 86%, 87%, 88%, 89%, 90%, 91%, 92%, 93%, 94%, 95%, 96%, 97%, 98%, 99%, or 99.5% homologous to the reference secreted protein.

71. The formulation of claim 68, wherein the amino acid sequence of the engineered protein is at least 40%, 45%, 50%, 55%, 60%, 65%, 70%, 75%, 80%, 85%, 86%, 87%, 88%, 89%, 90%, 91%, 92%, 93%, 94%, 95%, 96%, 97%, 98%, 99%, or 99.5% identical to the reference secreted protein.

72. The formulation of claim 68, wherein at least 2 non-essential amino acid residues in the reference secreted protein are substituted by essential amino acid residues.

73. The formulation of claim 68, wherein from about 5 to about 50 non-essential amino acid residues in the reference secreted protein are substituted by essential amino acid residues.

74. The formulation of claim 68, wherein at least about 1% of one or more non-essential amino acid residues in the reference secreted protein are substituted by one or more essential amino acid residues.

75. The formulation of claim 68, wherein at least about 1.5% of one or more non-essential amino acid residues in the reference secreted protein are substituted by one or more essential amino acid residues.

76. The formulation of claim 68, wherein at least about 2% of one or more non-essential amino acid residues in the reference secreted protein are substituted by one or more essential amino acid residues.

77. The formulation of claim 68, wherein at least about 3% of one or more non-essential amino acid residues in the reference secreted protein are substituted by one or more essential amino acid residues.

78. The formulation of claim 68, wherein at least about 4% of one or more non-essential amino acid residues in the reference secreted protein are substituted by one or more essential amino acid residues.

79. The formulation of claim 68, wherein the reference secreted protein is native to an organism of a genus selected from Aspergillus, Trichoderma, Penicillium, Thermomyces, Kluyveromyces, Chrysosporium, Myceliopthora, Acremonium, Fusarium, Trametes, and Rhizopus.

80. The formulation of claim 68, wherein the reference secreted protein is native to a microorganism selected from Escherichia coil, Bacillus subtilis, Saccharomyces cerevisiae, Pichia pastoris, Corynebacterium species, Bacillus amyloliquefaciens, Bacillus licheniformis, Synechocystis species, and Synechococcus species.

81. The formulation of claim 68, wherein the reference secreted protein is a protein selected from the proteins listed in Appendix A.

82. The formulation of claim 68, wherein the reference secreted protein is selected from SEQ ID NOS: 1-9.

83. The formulation of claim 68, wherein the reference secreted protein comprises a consensus sequence for a fold selected from cellulose binding domain, carbohydrate binding module, fibronectin type III domain, and hydrophobin.

84. The formulation of claim 68, wherein the reference secreted protein is a protein selected from proteins identified by UniProt Accession Numbers Q4WBW4, Q99034, A1DBP9, Q8NJP6, A1CU44, B0Y8K2, Q4WM08, Q0CMT2, Q8NK02, A1DNL0, A1CCN4, B0XWL3, Q4WFK4, A2QYR9, Q0CFP1, Q5B2E8, A1DJQ7, A1C4H2, B0Y9G4, B8MXJ7, Q4WBU0, Q96WQ9, A2R5N0, Q2US83, Q0CEU4, Q5BCX8, A1DBS6, Q9HE18, O14405, P62694, Q06886, P13860, Q9P8P3, P62695, P07987, A1C8U0, B0Y9E7, B8N1V9, Q4WBS1, Q2U2I3, Q5AR04, A1DBV1, B0YEK2, B8N7Z0, A4DA70, A2R2S6, Q2UI87, Q0CVX4, Q5AX28, A1D9S3, A1CC12, B0Y2K1, Q4WW45, Q5AQZ4, Q99024, P29026, P29027, P69328, P69327, P36914, P23176, P22832, A2QHE1, A1CR85, B0XPE1, B8NRX2, Q4WJJ3, P87076, A2RAL4, Q2UUD6, D0VKF5, Q0CTD7, Q5B5S8, A1D451, B8NJF4, A2QPK4, Q2UNR0, Q5AUW5, B0Y7Q8, B8NP65, Q4WMU3, Q2UN12, Q0CI67, Q5B6C6, A1DMR8, B8NMR5, Q2U325, Q0CUC1, Q5B0F4, A1DC16, A1CUR8, B0XM94, B8NPL7, Q4WL79, Q2U9M7, Q5B6C7, A1DPG0, A1CA51, B0Y3M6, B8NDE2, Q4WU49, A2R989, Q2U8Y5, Q0CAF5, Q5BB53, A1DFA8, B0Y8M8, Q4WLY1, Q5AV15, A1DNN8, Q5BA18, B0YB65, Q4WGT3, Q0CEF3, Q5B9F2, A1DCV5, B0XPB8, B8N5S6, Q4WR62, A5ABF5, Q2UDK7, Q0C7L4, Q5AWD4, A1D122, Q5B681, Q5BG51, A1CCL9, Q0CB82, Q5ATH9, Q4AEG8, B0XP71, B8MYV0, Q4WRB0 A2QA27, O00089, Q2UR38, Q0CMH8, Q5BAS1, P29026, P29027, P48827, A1CIA7, B0Y708, P35211, B8N106, P28296, P12547, Q00208, A1CWF3, P52750, P52754, P79073, P52755, P41746, and P28346.

85. The engineered protein of claim 49, wherein the engineered protein further comprises a polypeptide tag for affinity purification.

86. The engineered protein of claim 85, wherein the tag for affinity purification comprises a polyhistidine-tag.

87. The formulation of claim 68, wherein the engineered protein has a net absolute per amino acid charge of at least 0.05 at pH 7.

88. The formulation of claim 68, wherein the engineered protein has a net absolute per amino acid charge of at least 0.10 at pH 7.

89. The formulation of claim 68, wherein the engineered protein has a net absolute per amino acid charge of at least 0.15 at pH 7.

90. The formulation of claim 68, wherein the engineered protein has a net absolute per amino acid charge of at least 0.20 at pH 7.

91. The formulation of claim 68, wherein the engineered protein has a net absolute per amino acid charge of at least 0.25 at pH 7.

92. The formulation of claim 68, wherein the engineered protein has a net positive charge at pH 7.

93. The formulation of claim 68, wherein the engineered protein has a net negative charge at pH 7.

94. The formulation of claim 68, wherein the engineered protein is digestible.

95. The formulation of claim 68, wherein the engineered protein comprises a protease recognition site selected from a pepsin recognition site, a trypsin recognition site, and a chymotrypsin recognition site, or wherein the engineered protein comprises an increased ratio of a protease recognition site selected from a pepsin recognition site, a trypsin recognition site, and a chymotrypsin recognition site relative to a reference secreted protein.

96. An isolated nucleic acid comprising a nucleic acid sequence that encodes the engineered protein of claim 49.

97. The isolated nucleic acid according to claim 96, further comprising an expression control sequence operatively linked to the nucleic acid sequence that encodes an engineered protein.

98. A vector comprising a nucleic acid sequence that encodes the engineered protein of claim 49.

99. The vector of claim 98, further comprising an expression control sequence operatively linked to the nucleic acid sequence that encodes an engineered protein

100. A recombinant microorganism comprising at least one of a) a nucleic acid according to any one of claims 96 and 97 and b) a vector according to any one of claims 98 and 99.

101. A method of making an engineered protein comprising culturing the recombinant microorganism of claim 100 under conditions sufficient for production of the engineered protein by the recombinant microorganism.

102. The method of claim 101, further comprising isolating the engineered protein from the culture.

103. The method of claim 101, wherein the engineered protein is soluble.

104. The method of claim 101, wherein the engineered protein is secreted by the cultured recombinant microorganism and the engineered protein is isolated from the culture medium.

105. A nutritive composition comprising the engineered protein of claim 49 and at least one second component.

106. The nutritive composition of claim 105, wherein the second component is selected from a protein, a polypeptide, a peptide, a free amino acid, a carbohydrate, a fat, a mineral or mineral source, a vitamin, and an excipient.

107. The nutritive composition according to claim 105, wherein the second component is a protein.

108. The nutritive composition according to claim 107, wherein the protein is an engineered protein.

109. The nutritive composition according to claim 105 wherein the second component is one or more free amino acids selected from the essential amino acids.

110. The nutritive composition according to claim 105, wherein the second component is one or more free amino acids selected from branch chain amino acids.

111. The nutritive composition according to claim 110, wherein the second component is Leu.

112. The nutritive composition according to claim 105, wherein the second component is an excipient.

113. The nutritive composition according to claim 112, wherein the excipient is selected from the group consisting of a buffering agent, a preservative, a stabilizer, a binder, a compaction agent, a lubricant, a dispersion enhancer, a disintegration agent, a flavoring agent, a sweetener, and a coloring agent.

114. A nutritive composition according to claim 105, wherein the nutritive composition is formulated as a liquid solution, slurry, suspension, gel, paste, powder, or solid.

115. A method of making a nutritive composition, comprising providing the engineered protein according to claim 49 and combining the engineered protein with second component.

116. The method according to claim 115, wherein the second component is selected from a protein, a polypeptide, a peptide, a free amino acid, a carbohydrate, a fat, a mineral or mineral source, a vitamin, and an excipient.

117. The method according to claim 115, wherein the second component is a protein.

118. The method according to claim 117, wherein the protein is an engineered protein.

119. A method of maintaining or increasing of muscle mass, muscle strength, and functional performance in a subject, the method comprising providing to the subject a sufficient amount of the engineered protein of claim 49, a nutritive composition according to claim 105, or a nutritive composition made by a method according to claim 115.

120. A method of maintaining or achieving a desirable body mass index in a subject, the method comprising providing to the subject a sufficient amount of the engineered protein of claim 49, a nutritive composition according to claim 105, or a nutritive composition made by a method according to claim 115.

121. The method of claim 119 or 120, wherein the subject is elderly, critically-medically ill, or suffering from protein-energy malnutrition.

122. The method of claim 119 or 120, wherein the engineered protein of claim 49, the nutritive composition according to claim 105, or the nutritive composition made by a method according to claim 115 is consumed by the subject in coordination with performance of exercise.

123. A method of providing protein to a subject with protein-energy malnutrition, the method comprising providing to the subject a sufficient amount of engineered protein of claim 49, a nutritive composition according to claim 105, or a nutritive composition made by a method according to claim 115.

124. The method of claim 123, wherein the engineered protein of claim 49, the nutritive composition of claim 105, or the nutritive composition made by the method of claim 115 is consumed by the subject by an oral, enteral, or parenteral route.

125. A method of making an engineered protein, comprising:
a) providing a reference secreted protein, b) identifying a set of amino acid positions of the reference secreted protein to mutate to improve the nutritive content of the protein, and c) synthesizing the engineered protein comprising the target amino acid substitutions.

126. The method of claim 125, wherein the amino acid substitutions are encoded by a degenerate codon capable of i) encoding a plurality of desired amino acids, or ii) not encoding one or more undesired amino acids.

127. The method of claim 126, wherein the plurality of desired amino acids are enriched for one or more amino acids.

128. The method of claim 127, further comprising d) selecting an engineered protein comprising the amino acid substitutions.

129. The method of claim 125, wherein the reference secreted protein is i) native to a member of a genus selected from Aspergillus, Trichoderma, Penicillium, Chrysosporium, Myceliopthora, Acremonium, Fusarium, Trametes, and Rhizopus, ii) native to a microorganism selected from Escherichia coli, Bacillus subtilis, Saccharomyces cerevisiae, Pichia pastoris, Corynebacterium species, Synechocystis species, and Synechococcus species, or iii) is a protein listed in Appendix A.

130. The method of claim 125, wherein the reference secreted protein comprises a consensus sequence for a fold selected from a cellulose binding domain, carbohydrate binding module, fibronectin type III domain, and hydrophobin.

131. The method of claim 125, wherein identifying the set of amino acid positions of the reference secreted protein to mutate to improve the nutritive content of the protein comprises determining at least one parameter selected from amino acid likelihood (AALike), amino acid type likelihood (AATLike), position entropy (Sₚₒₛ), amino acid type position entropy (S_{AATpos}), relative free energy of folding (ΔΔG_{fold}), and secondary structure identity (LoopID) for a plurality of amino acid positions of the reference secreted protein.

132. The method of claim 125, wherein a combination of parameters selected from: (A) AAlike and ΔΔG_{fold}, (B) AATlike and ΔΔG_{fold}, (C) AATlike, and ΔΔG_{fold}, (D) Sₚₒₛ and ΔΔG_{fold}, (E) S_{AATpos} and ΔΔG_{fold}, (F) LoopID and ΔΔG_{fold}, (G) AAlike, ΔΔG_{fold}, and LoopID, (H) AAlike, AATlike, ΔΔG_{fold}, and LoopID, (I) AATlike, ΔΔG_{fold}, and LoopID, (J) Sₚₒₛ, ΔΔG_{fold}, and LoopID, and (K) S_{AATpos}, ΔΔG_{fold}, and LoopID is determined for a plurality of amino acid positions of the reference secreted protein.

133. The method of claim 125, further comprising ranking the plurality of amino acid positions of the reference secreted protein on the basis of the parameter and mutating the amino acids at positions having at least a threshold parameter value.

134. The method of claim 125, wherein the engineered protein is synthesized in vivo.

135. A library comprising a plurality of recombinant nucleic acid sequences encoding nutritive polypeptide variants, wherein each nutritive polypeptide variant comprises a ratio of one or more essential amino acids to total amino acids that is higher than the ratio of one or more essential amino acids to total amino acids in a reference secreted protein at least 50 amino acids in length.

136. A population of recombinant unicellular organisms comprising the library of claim 135.

137. The isolated nutritive polypeptide variants secreted from the population of claim 136.

138. Isolated fragments of the nutritive polypeptide variants of claim 137, wherein the fragments are suitable for analysis by mass spectrometry.

139. A device comprising the population of claim 136, wherein two or more individual recombinant unicellular organisms containing unique polypeptide variants are spatially separated.

140. The device of claim 139, wherein secreted nutritive polypeptide variants are capable of being identified.

The application's sequence listing, which the Patent Office published only in electronic form, follows.

SEQUENCE LISTING (45157 sequences)

SEQ ID NO: 1 - protein, 616 aa, Aspergillus niger
ATLDSWLSNEATVARTAILNNIGADGAWVSGADSGIVVASPSTDNPDYFYTWTRDSGLVLKTLVDLFRNGDTSLLSTIENYISAQAIVQGISNPSGDLSSGAGLGEPKFNVDETAYTGSWGRPQRDGPALRATAMIGFGQWLLDNGYTSTATDIVWPLVRNDLSYVAQYWNQTGYDLWEEVNGSSFFTIAVQHRALVEGSAFATAVGSSCSWCDSQAPEILCYLQSFWTGSFILANFDSSRSGKDANTLLGSIHTFDPEAACDDSTFQPCSPRALANHKEVVDSFRSIYTLNDGLSDSEAVAVGRYPEDTYYNGNPWFLCTLAAAEQLYDALYQWDKQGSLEVTDVSLDFFKALYSDAATGTYSSSSSTYSSIVDAVKTFADGFVSIVETHAASNGSMSEQYDKSDGEQLSARDLTWSYAALLTANNRRNSVVPASWGETSASSVPGTCAATSAIGTYSSVTVTSWPSIVATGGTTTTATPTGSGSVTSTSKTTATASKTSTSTSSTSCTTPTAVAVTFDLTATTTYGENIYLVGSISQLGDWETSDGIALSADKYTSSDPLWYVTVTLPAGESFEYKFIRIESDDSVEWESDPNREYTVPQACGTSTATVTDTWR

SEQ ID NO: 2 - protein, 313 aa, Aspergillus niger
VPHGSGHKKRASVFEWFGSNESGAEFGTNIPGVWGTDYIFPDPSTISTLIGKGMNFFRVQFMMERLLPDSMTGSYDEEYLANLTTVVKAVTDGGAHALIDPHNYGRYNGEIISSTSDFQTFWQNLAGQYKDNDLVMFDTNNEYYDMDQDLVLNLNQAAINGIRAAGASQYIFVEGNSWTGAWTWVDVNDNMKNLTDPEDKIVYEMHQYLDSDGSGTSETCVSGTIGKERITDATQWLKDNKKVGFIGEYAGGSNDVCRSAVSGMLEYMANNTDVWKGASWWAAGPWWGDYIFSLEPPDGTAYTGMLDILETYL

SEQ ID NO: 3 - protein, 515 aa, Aspergillus niger
QQVGTYTTETHPSLTWQTCTSDGSCTTNDGEVVIDANWRWVHSTSSATNCYTGNEWDTSICTDDVTCAANCALDGATYEATYGVTTSGSELRLNFVTQGSSKNIGSRLYLMSDDSNYELFKLLGQEFTFDVDVSNLPCGLNGALYFVAMDADGGTSEYSGNKAGAKYGTGYCDSQCPRDLKFINGEANCDGWEPSSNNVNTGVGDHGSCCAEMDVWEANSISNAFTAHPCDSVSQTMCDGDSCGGTYSASGDRYSGTCDPDGCDYNPYRLGNTDFYGPGLTVDTNSPFTVVTQFITDDGTSSGTLTEIKRLYVQNGEVIANGASTYSSVNGSSITSAFCESEKTLFGDENVFDKHGGLEGMGEAMAKGMVLVLSLWDDYAADMLWLDSDYPVNSSASTPGVARGTCSTDSGVPATVEAESPNAYVTYSNIKFGPIGSTYSSGSSSGSGSSSSSSSTTTKATSTTLKTTSTTSSGSSSTSAAQAYGQCGGQGWTGPTTCVSGYTCTYENAYYSQCL

SEQ ID NO: 4 - protein, 184 aa, Aspergillus niger
SAGINYVQNYNGNLGDFTYDESAGTFSMYWEDGVSSDFVVGLGWTTGSSKAITYSAEYSASGSSSYLAVYGWVNYPQAEYYIVEDYGDYNPCSSATSLGTVYSDGSTYQVCTDTRTNEPSITGTSTFTQYFSVRESTRTSGTVTVANHFNFWAQHGFGNSDFNYQVMAVEAWSGAGSASVTISS

SEQ ID NO: 5 - protein, 36 aa, Aspergillus niger
AAQAYGQCGGQGWTGPTTCVSGYTCTYENAYYSQCL

SEQ ID NO: 6 - protein, 108 aa, Aspergillus niger [sequence omitted]

SEQ ID NO: 7 - protein, 114 aa, Aspergillus niger
PAGGGAGGNPRLYDELIRVSVTIKNTGKVAGDEVPQLYVSLGGPNEPKIVLRQFERITLQPSKETQWSTTLTRRDLANWNVETQDWEITSYPKMVFAGSSSRKLPLRASLPTVH

SEQ ID NO: 8 - protein, 75 aa, Trichoderma reesei
SNGNGNVCPPGLFSNPQCCATQVLGLIGLDCKVPSQNVYDGTDFRNVCAKTGAQPLCCVAPVAGQALLCQTAVGA

SEQ ID NO: 9 - protein, 71 aa, Trichoderma reesei
AVCPTGLFSNPLCCATNVLDLIGVDCKTPTIAVDTGAIFQAHCASKGSKPLCCVAPVADQALLCQKAIGTF

SEQ ID NO: 10 - protein, 36 aa, Artificial Sequence
  Description of Artificial Sequence: Synthetic polypeptide
AAQLYLQCGGQGWTGPTTCVSGYTCTYLNAYYSQCL

SEQ ID NO: 11 - protein, 36 aa, Artificial Sequence
  Description of Artificial Sequence: Synthetic polypeptide
AAQLYLQCGGQGWTGPTTCLSGYTCLLLNLYYSQCL

SEQ ID NO: 12 - protein, 36 aa, Artificial Sequence
  Description of Artificial Sequence: Synthetic polypeptide
AAQLYLQCGGQGWTGPTLCLSGYLCLLLLLYYSQCL

SEQ ID NO: 13 - protein, 36 aa, Artificial Sequence
  Description of Artificial Sequence: Synthetic polypeptide
LAQLYLLCGGQGWTGPTLCLSGYLCLLLLLLLSQCL

SEQ ID NO: 14 - protein, 391 aa, Thielavia terrestris
MAISHTSIVALCGCIFLLPGVLAGFNPSATDNIAIYWGQNSINRAGGQQRLSSYCSSTPFNIIPLAFLTSIKNPTSLNFANAGDNCTTFPGTQLLQCPQIEEDIQTCQSLGKTILLSIGGATYTEGGFTSADEATTWANTLWSMFGPPTSDSSVLRPFGSATVDGFDFDFEATTANLAPFAAALRANMDAASSSGGRRFYLSAAPQCPFPDAAMGEALSSVAFDFVSVQFYNNYCGATSYVSGAGGPGNFNFETWDNWAKTVSPNPNVKVLLGLPGSATAAGSGYVSGQQLTNVIDYSRGFSSFGGVMLWDMSQVYGNAGFLDSVVSALGGQLPSKTTTPTTLTTATATSAPTGSLVPQWGQCGGTGYQGPTQCQPPYQCVSVGPWWSQCE

SEQ ID NO: 15 - protein, 767 aa, Thielavia terrestris
MLGFLCACIALGASFSGSLAASHKPGACSPPKTCSGPWARVAPAPGAVVVDNSASPYPGSYRTVQEGVNALSTTTKTPQNLFIFPGTYVEQVYIPPLASNLTVQGYTCNSKSYEGNQATITYNLALINTTSDDKTATLRQWNPNTKVYNLNIVNTFGHIPQNGQNLALSAEATGQGYYGCQLIGYQDTVLAETGLQLYAKSLIVGAVDFIFGQTALAWFEGVDIRTIATGCVTASGRDSATNPSWYVISRSSVAGINDTIPAGINYLGRPWRSFARVVFQETYLGNVIAADGWKEWSTSTPNTANVTFAEYNNYGPGSVQHEGPRASFSEQLTARIPIRSILGNNFQDEWWVDTKYLDPSDLRDDDAVSTSATASSTTSTAASTSTSSPTASTTSTTAVATTTVTSLTTSSSASPTTSSNPCVCTDYSQISAAVASCTDIVLSNIAAPGGSAIDLSKLKAGATVTFDGLTTFGFTNSSSFNPITIGGQGITVTANPGAIIDGNGQAYWDGLGSNGGVPKPDHFIVVSKVTGGSVIKNLYIRNWPVHLFSISGCADLVFQDLVLNNTAGDAPNSRSNGLPAAHNSDGFDVSSSSNIVIRRSVVHNQDDCVAITSGNNMTVSDLDCYGGHGLSIGSVGLKSNNNVTNILFTNSTVTASENGCRIKTNYNATGFVANITYANIALRGISAYGIDVQQDYLNGGPTGVPSSGVLIQHVLFRNVTGTADPSARDYYVLCGDGSCEDFRFEDVSVTGGGVASSCNFPPGGCPS

SEQ ID NO: 16 - protein, 526 aa, Thielavia terrestris
MHAKFATLAALVASAAAQQACTLTAENHPTLSWSKCTSGGSCTSVSGSVTIDANWRWTHQVSSSTNCYTGNEWDTSICTDGASCAAACCLDGADYSGTYGITTSGNALSLQFVTQGPYSTNIGSRTYLMASDTKYQMFTLLGNEFTFDVDVSGLGCGLNGALYFVSMDEDGGLSKYSGNKAGAKYGTGYCDSQCPRDLKFINGEANNVGWTPSSNDKNAGLGNYGSCCSEMDVWEANSISAAYTPHPCTTIGQTRCEGDDCGGTYSTDRYAGECDPDGCDFNSYRMGNTTFYGKGMTVDTSKKFTVVTQFLTDSSGNLSEIKRFYVQNGVVIPNSNSNIAGVSGNSITQAFCDAQKTAFGDTNVFDQKGGLAQMGKALAQPMVLVMSLWDDHAVNMLWLDSTYPTDAAGKPGAARGTCPTTSGVPADVESQAPNSKVIYSNIRFGPIGSTVSGLPGGGSNPGGGSSSTTTTTRPATSTTSSASSGPTGGGTAAHWGQCGGIGWTGPTVCASPYTCQKLNDWYYQCL

SEQ ID NO: 17 - protein, 448 aa, Thielavia terrestris
MKSIATLILLAGGAAGQQSAYGQCGGINYSGPTSCVAGYACTSWNPYYYQCVPGTATPTPTPTSHTSTAVTTTSTSKSTSSTKTSTVSTKTTSSSTTGPTATGFAKTNGLLFEIDGVTKYFAGTNCYWCGFLTSNGDVDHVFADMAAAGFKVVRVWGFNDVNTIPLTGTVWYQYLSASGSQINTGEYGLQRLDYVVSSAAAHGLKLIINFVNNWNDYGGINAYVNAFGGNASTWYTNTAAQAQYQKYIEAVVSRYKDSTAVFAWELANEPRCSGCDGSVIYNWAATTSRYIKSLDPNHMVTMGDEGFGPLAGGDGSYPYQTGAGGYTWVDNLNISTLDFGTLHLYPDSWGQPYSWGDLWISTHGAACVNANKPCILEEYGGGNNCTVENPWQATALGTKGIAGDMFWQYGDTLPSCNCQTSQDGNTVYYNQGNWDCMVTQHVAAINAS

SEQ ID NO: 18 - protein, 326 aa, Thielavia terrestris
MKSFTIAALAALWAQEAAAHATFQDLWIDGVDYGSQCVRLPASNSPVTNVASDDIRCNVGTSRPTVKCPVKAGSTVTIEMHQQPGDRSCANEAIGGDHYGPVMVYMSKVDDAVTADGSSGWFKVFQDSWAKNPSGSTGDDDYWGTKDLNSCCGKMNVKIPEDIEPGDYLLRAEVIALHVAASSGGAQFYMSCYQLTVTGSGSATPSTVNFPGAYSASDPGILINIHAPMSTYVVPGPTVYAGGSTKSAGSSCSGCEATCTVGSGPSATLTQPTSTATATSAPGGGGSGCTAAKYQQCGGTGYTGCTTCASGSTCSAVSPPYYSQCL

SEQ ID NO: 19 - protein, 481 aa, Thielavia terrestris
MAQKLLLAAALAASALAAPVVEERQNCGSVWSQCGGIGWSGATCCASGNTCVELNPYYSQCLPNSQVTTSTSKTTSTTTRSSTTSHSSGPTSTSTTTTSSPVVTTPPSTSIPGGASSTASWSGNPFSGVQMWANDYYASEVSSLAIPSMTGAMATKAAEVAKVPSFQWLDRNVTIDTLFAHTLSQIRAANQKGANPPYAGIFVVYDLPDRDCAAAASNGEFSIANNGAANYKTYIDAIRSLVIQYSDIRIIFVIEPDSLANMVTNLNVAKCANAESTYKELTVYALQQLNLPNVAMYLDAGHAGWLGWPANIQPAANLFAEIYTSAGKPAAVRGLATNVANYNGWSLATPPSYTQGDPNYDESHYVQALAPLLTANGFPAHFITDTGRNGKQPTGQRQWGDWCNVIGTGFGVRPTTNTGLDIEDAFVWVKPGGECDGTSNTTSPRYDYHCGLSDALQPAPEAGTWFQAYFEQLLTNANPPF

SEQ ID NO: 20 - protein, 304 aa, Thielavia terrestris
MKGLFSAAALSLAVGQASAHYIFQQLSINGNQFPVYQYIRKNTNYNSPVTDLTSDDLRCNVGAQGAGTDTVTVKAGDQFTFTLDTPVYHQGPISIYMSKAPGAASDYDGSGGWFKIKDWGPTFNADGTATWDMAGSYTYNIPTCIPDGDYLLRIQSLAIHNPWPAGIPQFYISCAQITVTGGGNGNPGPTALIPGAFKDTDPGYTVNIYTNFHNYTVPGPEVFSCNGGGSNPPPPVSSSTPATTTLVTSTRTTSSTSSASTPASTGGCTVAKWGQCGGNGYTGCTTCAAGSTCSKQNDYYSQCL

SEQ ID NO: 21 - protein, 413 aa, Thielavia terrestris
MKPSVVAGLFASGAAAQSGAWGQCGGIGYTGPTSCVSGYRCVYVNDWYSQCQPGAATTTTSPPASSTSTPPTSTGTAGVRYVGRVNPSTKELSWPGTGISFTFTGTSATIGIASVSGTNSVDLVVDDGDPIVITSFGSSITTPAGLSQGTHTVTLRKRSEALYGSIFLGSVTTDGAFVAGTVPTRQIEIIGDSITVGYGLDGTNPCTNNATVEDNPKTYGALAAAALGADYNVIAWSGKGVVRNVATGSPDTSPLMPELYTRYGANDPDNSYPYPPTWSPDAVVINLGTNDFSYIAWDASGNAYAARPPLNATTYTDGMVAFAQSIRAHYPAAHVFLVGSPMLSDSYPTAADAQKTTQTNALKSAVAQLGANAHFVDWPTQGSDVGCDYHPNAATHAAEAAVLADAIRSALGW

SEQ ID NO: 22 - protein, 448 aa, Thielavia terrestris
MKSVALLLSVAASLAAASAIAVEHEAHVRADASITLPRSAASNCNPHKQKDNWGNAVEKDRKRITIRASKNDRDDISDEFLSGIKRANNGGLLHLEKDKTYVIGKKLDLSFLKDVYVKIDGELKFTDNITYWQANNFFYSFQNSITFWVWGGRDIKIYGSGTINGNGQAWWDGFAGHEILDPNNAYYRPILFLTDNATNVEVRGIHMKDSPCWNNFFVRSKNVIFDDVYISAVSTNASSLPKNTDGFDSFNVDGLTVTNTRVNVGDDCFSPKPNTTNILVQNLWCNGTHGVSMGSIGQYAGVKDIISNALLQNITLLNGQNGARLKAWAGADVGYGYISNITYRDIHVENTDNPIVLDQCYFNVNQTECAAHPSRVNITDVRFINVHGTSSGKNGRVVADLTCSPGATCTGIYLQDINITSPAGSPPEIVCDGIQGGIGVPCVSASEA

SEQ ID NO: 23 - protein, 334 aa, Thielavia terrestris
MRTTFAAALAAFAAQEVAGHAIFQQLWHGSSCVRMPLSNSPVTNVGSRDMICNAGTRPVSGKCPVKAGGTVTVEMHQQPGDRSCNNEAIGGAHWGPVQVYLSKVEDASTADGSTGWFKIFADTWSKKAGSSVGDDDNWGTRDLNACCGKMQVKIPADIPSGDYLLRAEALALHTAGQVGGAQFYMSCYQITVSGGGSASPATVKFPGAYSANDPGIHINIHAAVSNYVAPGPAVYSGGTTKVAGSGCQGCENTCKVGSSPTATAPSGKSGAGSDGGAGTDGGSSSSSPDTGSACSVQAYGQCGGNGYSGCTQCAPGYTCKAVSPPYYSQCAPSS

SEQ ID NO: 24 - protein, 830 aa, Thielavia terrestris
MRSSSRFLGALAAAASFVPSALAQNSVPVTFTDPSTGIVFNSWGLPNGSAETQGGYTFGVALPSNALTTDATEFIGYLQCASTDGKGWCGVSLGGPMTNSLLIAAWPYGDNIYTSFRYATGYAMPDVYTGNATLTQISSTINSTSFTLIFRCQNCLSWNQDGSSGGASTSSGALILGWCQAFPSPGNPTCPDQITIEQHDNGQGIWGAQLDSNAANPSYTAWAAKATKTVPAQCSGPTSTGVVGVPVPTGATYDYIVVGAGAGGIPIADKLSEAGKSVLLIEKGFASTGQNGGTLGPDWLAGTGLTRFDVPGLCNEIWVDSKGIACDDTDQMAGCVLGGGTAVNAGLWFHPYSLDFDYLFPTGWKSSDVQAAISRVFSRIPGTYTPSMDGKLYYQQGFDVISGGLSKGGWTQVVANSSPDSKNRTFSHSPFMFSGGERGGPLATYLQTAKKRSNFNLWLNTTVKRVVRDGGHITGVEVEAFRSGGYEGVVNVTNISGRVILSAGTFGTAKILLRSGIGPSDQLQVVQNSTIDGPTMINSTSWIPLPVGYNLDDHCNTDTVITHPNVVFYDFYAAWDNPIPSDEQSYLNSRSGILAQAAPNIGPMFWEEIKGADGIVRQLQWTARVEGSFDTPNGHAMTMSQYLGRGATSRGRMTITPSLTTVVSDVPYLKDPNDKEAVIQGIVNLQNALKNVANLTWTYPNSSISARDYVNSLSLSPSIRRSNHWVGTAKIGSDDGRTGGSAVVDLNARVYGTDNLFVVDASIFPGVPTTNPSAYIVTVSEHASEKILALAAPQPVPKWGQCGGRQWTGSFICAAGTKCTYQNDWYSQCL

SEQ ID NO: 25 - protein, 390 aa, Thielavia terrestris
MKSSVVVSLFASGAAAQVGPWGQCGGINWTGGTTCVSGYHCVYQNDWYSQCLPGADSTTLKTSTTSTKPTSTSTAPATTTSAAAKGKLKWLGINQSCAEFGQGTYPGTWGKDFTFPSTSSIQTHINDGYNIFRVAFAMERLVPNSLTGSPDAGYLKNLTDTVNFITNAGAYAILDPHNFGRYYGNIITDTTAFGAFWTTVAKQFASNSRVIFDTNNEYHDMDQTLVLNLNQAAINAIRGAGATSQYIFAEGNSYTGAWTWNTTNTNLAALSDPQNKLVYEMHQYLDSDGSGTSATCVSSDIGVQRIVGATSWLRANGKIGILGEYAGGANSVCQTAVTGLLDHLQANSDVWAGALWWAGGPWWGNYIFSFEPPSGTAYTYYNSLLKQYTP

SEQ ID NO: 26 - protein, 398 aa, Thielavia terrestris
MSAEPSSRSLALVIAAASLVAVARGAYPLTTDSNCNCYKTNLTTSNYFSHHQFFDFRSLWQYVNVPQPIDSFEGNAQAQPPSPYFTNPAFADAWDIQNWNNTALMALNDSTISDATVKMVNSPNNIYIEQDNGATHLTLRTVRHATFQSAAEIESQSQGFQFLSVRMRARTTGAKGAVTAMFTYRPPPTPLNTQLVQEADLEIRTEDPPMYVQYTNQPSWNSTGDIPAATRNVTLPDGWRWSDWAEYRMDWTPGSSTWYVNGRLVSQITFQAPRDPSQVIFNSWSDGGSWSGPMQVGSQAYLQIQWIEMVYNSTDPGAGRTGGCRNICTIDETTKLGTPALLTGGSFPSQPGNPGNAGPAGCVSAKYGQCAGKNWNGCRNCAAGSTCRYQNDYYSQCL

SEQ ID NO: 27 - protein, 311 aa, Thielavia terrestris
MKSSALLAACSALLAAASPILQGRRLYISTDVVTEWVTVTVTEGDASTAFSRPVPHTKATTTTSIPEPSTTSVAPPPPPPPPTSTSAPVIQAAPQPTQQPSPSPQAADPQVQAAQPSSDTPAPAPAPSTTTQASAAQPSDYTSTALYHHNVHRFNHSANALVWSDEHAQYAQTLAERCVFEHDTSIGGGGYGQNIAMWGSTGDPEAFGATGSIARAASNGWYNGELNDFPASSYGASTPDMTNFEKWGHFSQLVWKDTQKVGCATVFCQPGTLSSMGSWFSVCNYYPPGNVGGAYGDNVAPPEGQPIVTAA

SEQ ID NO: 28 - protein, 392 aa, Thielavia terrestris
MRLPQTEVSLALLALAAPAVRAGCSLPSSYKWTSTGPLATPKSGWVSLKDFTHVPYQGKHLVYATDHDTGSSYGSMNFGLFSNWSDMASASQNAMSQAAVAPTLFYFEPKSIWVLAYQWGPTAFSYRTSTDPTNANGWSAAQPLFTGTAEGAPYGPIDQTLIGDSTNMYLFFAGDDGKIYRSSMPIDNFPGNFGTESTVVLSGATNDIFEAVQVYTVTGQSSPQYLMIVESIGSSGDRYFRSYTASSLSGSWSPQATSESAPFAGKANSGATWTPDISHGDLIRSSADQTMPIDPCNLQLLYQGRNGSGSTYDLQPYRPGLLTLVGATGGNNGGGSSSTPTTTATPPATSTPGNGGTVAHWGQCGGSGYSGPTVCESPYTCTYQNPWYSQCL

SEQ ID NO: 29 - protein, 426 aa, Thielavia terrestris
MLPLTLLLPLSAIVLPVHGEVVKNGSTCIVTPLSDTNAAFAVPRSDGGGLARATVDDTPQILSAFSQCGQDGTIILRPGTYHIRQVMDTTNLRNVSVEIYGTLIWSADNLSYWRQKSFSVTYAGRQTAWRIGGRDIALRGFGQAVFDGNGQAWIDLARGASNLDGRPISLTVWHGTNVLIDGITWRMAQFWHTFVAYSQNVTMTNLVMNTLSSNSYSSQNTDGTDTWNSKDITISNWTVTCGDDCIAIKGNSSNVHVSNVVCHESGAMTIGSVGSNARQPDYVENIVFENITAIHSSNSAWIKTYPGTGYVRNVTFRNIYGEDVNQPIYVTSCIYSYQNCDSSHLAISDIRWENITGTSRYNVAAAIHCSGAAPCDNLHFSDINIKPKNGGTAKVLCSNIKNQATMGLQCTGPCPGSHPQQLSGNV

SEQ ID NO: 30 - protein, 464 aa, Thielavia terrestris
MGQKTLHGFAATALAVLPFVKAQQPGNFTPEVHPQLPTWKCTTAGGCVQQDTSVVLDWNYRWIHNADGTASCTTSSGVDHTLCPDEATCAKNCFVEGVNYTSSGVTTSGSSLTMRQYFKGSNGQTNSVSPRLYLLGSDGNYVMLKLLGQELSFDVDLSTLPCGENGALYLSEMDATGGRNQYNTGGANYGSGYCDAQCPVQTWMNGTLNTNGQGYCCNEMDILEANSRANAMTPHPCANGSCDKSGCGLNPYAEGYKSYYGPGLTVDTSKPFTIITRFITDDGTTSGTLNQIQRIYVQNGKTVASAASGGDIITASGCTSAQAFGGLANMGAALGRGMVLTFSIWNDAGGYMNWLDSGNNGPCSSTEGNPSNILANYPDTHVVFSNIRWGDIGSTVQVSGGGNGGSTTTTSTTTLRTSTTTTTTAPTATATHWGQCGGIGWTGPTVCESPYACKELNPWYYQCL

SEQ ID NO: 31 - protein, 284 aa, Thielavia terrestris
MQPSTPLRRAQAALTRVNDFGPNSSNTKMYIYVPSKLAAKPPIIVAIHYCTGTAQAYYSGSPYAQLADQKGFIVIYPESPYSGTCWDVSSRAALTHNGGGDSNSIANMVNYTLNKYNGDPSKVFVTGSSSGAMMTNVMAATYPEMFAAGIVYSGTPAGCFYSQSGGTDQWNSSCANGQIHSTPEVWAKMVHDMYPGYNGSRPKMQIYHGSADTTLYPSNYNETIKEWCGVFGYDYTKPDTTQANTPQARYTTYTWGDHLVGIYAQGVGHTVPIRGSDDMKFFGL

SEQ ID NO: 32 - protein, 314 aa, Thielavia terrestris
MVRQQATSLLALAFLSVASAQVSNDFESGWDQTAWPTYAPDCNQGGKVTLDSTTAHSGKNSIRVDGAGGYCGHIFFGTSQVPSGDLYVRVYLKAANALTSSHVTFITMPDPAQGTNKHLRIGGQSQILMYNRESDDATLPDLSPQGIASSTALPTGSWQCFEYHIGTDGTIETWLNGAAIAGLEAGPGINNPYADQWERSSIKPTPAGVYFGWESYGGDTNTFWYDDIVISSSRVGCSGSTGTSPPATTTTPGGSTPPPATSTTTSTAPPATSSTPSCTAAHWAQCGGIGYTGCTTCASPYTCTALNDYYSQCL

SEQ ID NO: 33 - protein, 300 aa, Thielavia terrestris
MWPTPKVAFLLLWAHALLVKGSPLAADAEVLGKRACPDIHVFGARETTAPPGYGTAGTVVNLILQAYPGATAEAINYPACGGQASCGGVQYGDSARQGTAAVATAVNNFYQQCPTTQLVLVGYSQGAQIMDNAVCGGPDNGAGITTTASPISAGALAQIKAVIEMGSPRFVAGLPYDVGTCTAQGFDARPSGYVCGGNQGSKIQSYCDSTDPYCCTGNDANSHQQYANKYGQQALAFIESKLGSSSSGGSGGSTGGSGGSTGGSCSALWGQCGGQGWTGPTCCSQGTCKAQNQWYSQCLN

SEQ ID NO: 34 - protein, 299 aa, Thielavia terrestris
MRSTPVLRTTLAAALPLVASAASGSGQSTRYWDCCKPSCAWPGKAAVSQPVYACDANFQRLSDFNVQSGCNGGSAYSCADQTPWAVNDNLAYGFAATSIAGGSESSWCCACYALTFTSGPVAGKTMVVQSTSTGGDLGSNQFDIAMPGGGVGIFNGCSSQFGGLPGAQYGGISSRDQCDSFPAPLKPGCQWRFDWFQNADNPTFTFQQVQCPAEIVARSGCKRNDDSSFPVFTPPSGGNGGTGTPTSTAPGSGQTSPGGGSGCTSQKWAQCGGIGFSGCTTCVSGTTCQKLNDYYSQCL

SEQ ID NO: 35 - protein, 489 aa, Thielavia terrestris
MKLTTVSLLLHSAGFGAAQLIGPVGPTTSLAHKTRECNVLHYGAVNDNSTDIADALEATFRRCVLHHPGSRLVVPQGEYLLNRSVVLSNGTNWAFQLEGLISLGYGGNYSVSRELILQGYAGVQPLNDTINGEGDHLFLENGLVIVNAVDFEFFSSTGKGAFQGQGYLWRNANNTDRPRLIRLISPINASVHDLILVDSPKFHIVFDFAVNLEVYHLTIRGANLGSYDGVDVVGTNYWVHDIEVTNRDECVSVKSPSNHALVENLVCNQAGSGISIGSLNVSASIANIHARNISIIQGNNIAFIKTYPGGSGYVTNVTFENFRSKASLYGLDINQYWQNTNTPDTGSVALSNLVFRNFSGSVANGVQRPPLYLIANDLTFATNVTVEDFSVWTETNDYVVNKISNVFGTGDDSYGPGNGIRALAPGEAPAPYTSTITVTASPTNWVAPPSPTWAVPNTGYGTNIPIPVYTPAPLWKPSGDYDKHYWGSF

SEQ ID NO: 36 - protein, 228 aa, Thielavia terrestris
MKFLPILCAAGLAAAAPTQPAGEAAVEARQLFSDTANDLENGVSSNCPKVIFICARGSTETGNLGSSVCPEVANGLKNYYPNQLWVQGVGGAYTADLASNALPGGTSTAAMQEAANMFNLAQQKCPNASVAAGGYSQGTAVVAGGIQSLSAAAKDQIKGVVLFGYTQAQQNHDTIPNFPVDKTMIFCAQGDLVCNGTLIVTAAHFSYITNGDASTKGPAWLHEKIGDA

SEQ ID NO: 37 - protein, 385 aa, Thielavia terrestris
MGLQYLKTTTAAVAILAAACGSMPGVQAADVASLWGQCGGIGYTGPTQCVSGAVCTHYNDWYYQCIPGATTSAVTTSSTSPVKLTTTSTPTTLSTSTSTTSSGSGPTSSSAPAAVKYLITFGDSYSQTGFDINSTKPAPGNPLGNPPLPGWTASGGLNWVGFLTSVFNTTTVLTYNFAYGGATTNATLVAPYEPTVLSLIDQVAEFSGSIASKPSYAPWTAQNSLFGVWIGVNDVGNSWWLSNYTQIVDQIMDSYFGRLQVLYDAGARNFVLLSVPPINRTPLMLAESTDSQQAEATAIAAYNAALTTRLAAFTSKNSGVTGKIVDTSVPFNTALDNPTAYGAPDNTCYNSDGTSCLWFNNYHPGIAINKLVAQAVADAWKGTFF

SEQ ID NO: 38 - protein, 220 aa, Thielavia terrestris
MRSLSLNVEAEVRNSERSDENLGYEVLEPSQGACSTSSMSTPDSSISIRTASSTVLIWGRLVVFLSWLLRRVVNVGVCKLGIIVGVLEVLEVLDGAGVPEAGLCFARHVGPFSGGGLAAQGNSVGWMRPQPLEVVDSAIRHIYPEHLGLRLVLGRHEVAVAIVPDVPELEVARRVLAEAQPSEDRGQLVDLEVSRPWISDRIRMGTKQRASESVQDKAEA

SEQ ID NO: 39 - protein, 363 aa, Thielavia terrestris
MSSLALLLSLSALAASNPLPAKLADRDSCTFTDAASAIKGKTSCSTITLSGITVPAGTTLDLTGLKDGTHVTFSGTTTFGYKEWSGPLISVSGNNILVDGAPGHIIDGNGAAWWDGEGSNGGKTKPKFFFAHSMTNSNIKGLSVKNTPVQAFSINGATNLGLYDIHIDNSAGDSQGGHNTDAFDVGSSTGVYISGAIVKNQDDCLAINSGTNITFTGGQCSGGHGLSVGSVGGRSDNTVKTVRILNSSVSNSENGVRIKTVYGATGSVSDVTYSGITLSGITKYGIVIEQDYENGSPTGTPTGGVPITDLTLSSVTGTVSSSATNIYILCAEGACSDWTWSNVSVKGGKTSTKCSNVPSPATC

SEQ ID NO: 40 - protein, 775 aa, Thielavia terrestris
MATTLLSLLGAAALAGRASAVCSRGGCIADSCARAVRFDTTLVPSASRVADCSSFLEVTATPSASTVWVTEDLAAATVTVTSELVQVERRQVTAQSASPANTIPAYASACSVASRYSSACSCFGVTGATVTAATPVVTSTTTVATTVTEVDYESPPLASSSVVFPSDDSWTATYTYSEYTLPVFTSAPDPTIDITYPTPSTTCLLDATPTGDSFYLLAPSAGYMFKRDSGLGPVDPPADEAAAEALMANWNPPTFEFQVAQDAAPGLFDLVVHDGTDSALYVALDVTSGEVTLVSSSTNGQVQDGRCTTVFGVSCKGSLIVEYGSTSYVWTATNSSTIATPGTPPANNTTPLNTMVLLPTRLATPFSLNATVSKRRSSRRALFKRDHSQDGVAPRCPGFPYGTVYAASNGVSPSPPNGCGPDGEWYSSLIPNLDFGGCCNSHDTCYDTCSEWFEDCNDKFHSCMLDTCASKYDHWYNFFLRPGCEAAADLYYWAVTGETAQSHFQSGSKAECSCNCADGNSAVCTPGGICQKVRGPGANDSGNCGGCGRNCGPKAHCQDGNCVCNPAPPTPDQCGSLCLDFMTHPRNCGGCGNVCASGYCYEGACFTPPAHPDQCYPVDAVRNGDFSNGTAYWTTVGAELAEAVSGSVPLPTISGNPPPSYLVIFMDWSTEAVISQTVRMCPGVQYQLDFLAAAARTFGFTITLGGQVVVDHSPISNTGGWFSQGPFDLPVLAAGEAGTTQGDDFFLETELAIHAQGPDVSVDMIGLGAISIHTI

SEQ ID NO: 41 - protein, 317 aa, Thielavia terrestris
MKGLSLLAAASAATAHTIFVQLESGGTTYPVSYGIRDPSYDGPITDVTSDSLACNGPPNPTTPSPYIINVTAGTTVAAIWRHTLTSGPDDVMDASHKGPTLAYLKKVDDALTDTGIGGGWFKIQEAGYDNGNWATSTVITNGGFQYIDIPACIPNGQYLLRAEMIALHAASTQGGAQLYMECAQINVVGGSGSASPQTYSIPGIYQATDPGLLINIYSMTPSSQYTIPGPPLFTCSGSGNNGGGSNPSGGQTTTAKPTTTTAATTTSSAAPTSSQGGSSGCTVPQWQQCGGISFTGCTTCAAGYTCKYLNDYYSQCQ

SEQ ID NO: 42 - protein, 504 aa, Thielavia terrestris
MKYRPSLSLAAAALFLLEPWVQAQLSGSVGPTTSRAAKAAKKVCNIMNYGGVASATTDNSAAITAAWNACKGGGEVYIPSGSYGLSSWVTLSGGSGVSINLEGVIYRITSATAGGTMISVSSTTDFEFYSGNSKGAIQGYGYLLNASDPRLVRLTQVTNFSFHDIALVDAPEFSLVMDTCSNGEVYNSIVRAGSEGGLDGVDVWGQNIWIHDIEVTNKDECVTVKSPASNILVESIFCNWSGGSAMGSLGANTDISNIYYRNVYSQNCNQMYMIKSWGGSGTVKNVKLENFWGHSNAYTLDLNAYWTSMTQAPGDGVSYQNITFTGWKGTNSNGAQRGSIQVLCPSAVPCTGITISDVNIWTESGSTEKEICENAYGTGGCLRAGSGGTYTTTVTRTTASNYAIQTMPNEIKAWGLGTEIPIPAIPTSFFPGLRPISALMAASSNGGGATPTTAGPTPTTTSAGTGGGVQSEYGQCGGSGYSGPTACAAPYACSTLNPYYAQCL

SEQ ID NO: 43 - protein, 628 aa, Aspergillus awamori
MVAFSALSGVSALSLLLCLVQHAHGVSLKVSTQGGNSSSPILYGFMFEDINHSGDGGIYGQLLQNPGLQGTTPNLTAWAAVGDATIAIDGDSPLTSAIPSTIKLDVADDATGAVGLTNEGYWGIPVDGSEFQSSFWIKGDYSGDITVRLVGNYTGTEYGSATITHTSTADNFTQASVKFPTTKAPDGNVLYELTVDGSVAAGSSLNFGYLTLFGETYKSRENGLKPQLANVLADMKGSFLRFPGGNNLEGNSAENRWKWNETIGDLWDRPGREGTWTYYNTDGLGLHEYFYWCEDLGLVPVLGVWDGFALESGGNTPITGDALTPYIDDVLNELEYILGDTSTTYGAWRAANGQEEPWNLTMVEIGNEDMLGGGCESYAERFTAFYDAIHAAYPDLILIASTSEADCLPESMPEGSWVDYHDYSTPDGLVGQFNYFDNLYRSVPYFIGEYSRWEIDWPNMKGSVSEAVFMIGFERNSDVVKMAAYAPLLQLVNSTQWTPDLIGYTQSPDDIFLSTSYYVQEMFSRNRGDTIKEVTSDSDFGPLYWVASSAGDSYYVKLANYGSETQDLTVSIPGTSTGKLTVLADNDPDAYNSDTQTLVTPSESTVQASNGTFTFSLPAWAVAVLAAN

SEQ ID NO: 44 - protein, 629 aa, Aspergillus flavus
MVALSTLSGLSALPFLFSLVQNVYGVSLEVSTEKGNSSSPILYGFMFEDINHSGDGGIYGQLLRNNGLQGSKPGLTAWAAVGDATIAVDAQNPLTEAIPHSLKLDVKQGASGAVGFTNEGYWGVPVDGSEFLNTFWIKGNFSGDITVRLVGNNTGTEYGSTKISQSSNSSNFTKVLAKIPTKKAPDGAVLYELTVDGASVGGSSLNFGLFELFPQTYKSRSNGLKPQVAQPLADMKGSFLRFPGGNNLEGASEARRWKWNETIGPVENRPGRQGDWSYYNTDGLGLDEYFYWCEDMGLTPVLGVWAGFALESGGNTPITGDALKPYIDDVLNELEYVLGDASTKYGSLRASYGRKEPWKLTMVEIGNEDMLGGGCESYVERFTAFYDAIHAAYPDLTIIASTDQSSCLPSKLPEGAWVDYHNYNTADNLVKQFSQFDNKDRSVPYFIGEYSCQQDNAWPFMQGSVAEAVYMIGIERNSDVVKMAAYAPLLQLVNSTQWTPNLIAFTQNPSTVIETTSYYVQQMFSVNRGDTIHNVTSDSAFGPVYWVASSADDKYYVKLANYGADTQEITVTISGKTGGKLTVLADSDPKAFNSDTQTLVTPSESDVKATNGKFTFTLPAWSVGVLAAH

SEQ ID NO: 45 - protein, 628 aa, Aspergillus kawachii
MVAFSALSGVSALSLLLCLVQHAHGVSLKVSTQGGNSSSPILYGFMFEDINHSGDGGIYGQLLQNPGLQGTTPNLTAWAAVGDATIAIDGDSPLTSAIPSTIKLDVADDATGAVGLTNEGYWGIPVDGSEFQSSFWIKGDYSGDITVRLVGNYTGTEYGSATITHTSTADNFTQASVKFPTTKAPDGNVLYELTVDGSVAAGSSLNFGYLTLFGETYKSRENGLKPQLANVLADMKGSFLRFPGGNNLEGNSAENRWKWNETIGDLWDRPGREGTWTYYNTDGLGLHEYFYWCEDLGLVPVLGVWDGFALESGGNTPITGDALTPYIDDVLNELEYILGDTSTTYGAWRAANGQEEPWNLTMVEIGNEDMLGGGCESYAERFTAFYDAIHAAYPDLILIASTSEADCLPESMPEGSWVDYHDYSTPDGLVGQFNYFDNLDRSVPYFIGEYSRWEIDWPNMKGSVSEAVFMIGFERNSDVVKMAAYAPLLQLVNSTQWTPDLIGYTQSPDDIFLSTSYYVQEMFSRNRGDTIKEVTSDSDFGPLYWVASSAGDSYYVKLANYGSETQDLTVSIPGTSTGKLTVLADNDPDAYNSDTQTLVTPSESTVQASNGTFTFSLPAWAVAVLAAN

SEQ ID NO: 46 - protein, 628 aa, Aspergillus niger
MVAFSALSGVSAVSLLLSLVQNAHGISLKVSTQGGNSSSPILYGFMFEDINHSGDGGIYGQMLQNPGLQGTAPNLTAWAAVGDATIAIDGDSPLTSAIPSTIKLNIADDATGAVGLTNEGYWGIPVDGSEFHSSFWIKGDYSGDITVRLVGNYTGTEYGSTTITHTSTADNFTQASVKFPTTKAPDGNVLYELTVDGSVAAGSSLNFGYLTLFGETYKSRENGLKPQLANVLDDMKGSFLRFPGGNNLEGNSAENRWKWNETIGDLWDRPGREGTWTYYNTDGLGLHEYFYWCEDLGLVPVLGVWDGFALESGGNTPLTGDALTPYIDDVLNELEYILGDTSTTYGAWRAANGQEEPWNLTMVEIGNEDMLGGGCESYAERFTAFYDAIHAAYPDLILIASTSEADCLPESMPEGSWVDYHDYSTPDGLVGQFNYFDNLNRSVPYFIGEYSRWEIDWPNMKGSVAEAVFMIGFERNSDVVKMAAYAPLLQLINSTQWTPDLIGYTQSPGDIFLSTSYYVQEMFSRNRGDTIKEVTSDSDFGPLYWVASSAGDSYYMKLANYGSETQDLTVSIPGTSTGKLTVLADSDPDAYNSDTQTLVTPSESTVQASNGTFTFSLPAWAVAVLAAN

SEQ ID NO: 47 - protein, 629 aa, Aspergillus oryzae
MVALSTLSGLSALPFLFSLVQNVYGVSLEVSTEKGNSSSPILYGFMFEDINHSGDGGIYGQLLRNNGLQGSKPGLTAWAAVGDATIAVDAQNPLTEAIPHSLKLDVKQGASGAVGFTNEGYWGVPVDGSEFLNTFWIKGNFSGDITVRLVGNNTGTEYGSTKISQSSNSSNFTKVLAKIPTKKAPDGAVLYELTVDGASVGGSSLNFGLFELFPQTYKSRSNGLKPQVAQPLADMKGSFLRFPGGNNLEGASEARRWKWNETIGPVENRPGRQGDWSYYNTDGLGLDEYFYWCEDMGLTPVLGVWAGFALESGGNTPITGDALKPYIDDVLNELEYVLGDASTKYGSLRASYGRKEPWKLTMVEIGNEDMLGGGCESYVERFTAFSDAIHAAYPDLTIIASTDQSSCLPSKLPEGAWVDYHNYNTADNLVKQFSQFDNKDRSVPYFIGEYSCQQDNAWPFMQGSVAEAVYMIGIERNSDVVKMAAYAPLLQLVNSTQWTPNLIAFTQNPSTVIETTSYYVQQMFSVNRGDTIHNVTSDSAFGPVYWVASSADDKYYVKLANYGADTQEITVTISGKTGGKLTVLADSDPKAFNSDTQTLVTPSESDMKATNGKFTFTLPAWSVGVLAAH

SEQ ID NO: 48 - protein, 628 aa, Aspergillus terreus
MVAFSTISGLGALSLLFSIIESVDGVSLKVSTDGGNSSSPLLYGFMFEDINHSGDGGIYGQMIQNNGLQGSSPNLTAWASVGDGTISVDTTNPLTAAIPNSLKLDIKPDATGAVGFTNEGYWGIPVDGTEFQNSFWMKGDFSGEITVRLVGNETGTEYGSTTFNQSSSSDDYTKVSVKFPTTKAPDGNVLYELTVDGESAQGSSLSFTLFELFAQTYKSRSNGLKPQLADALESVKGSFLRFPGGNNLEGNDVETRWKWNETIGPLENRPGHQGTWGYFNTDGLGLDEYLYWCEDMNLTPVLGVWAGFALESGGNTPITGDALTPYIEDVLNELEYVLGDPSTTYGKLRASYGREEPWNVTLVEIGNEDNLGGGCESYAERFTAFYNAIHDAYPDLTLIASTDNASCLPSPLPEGAWVDYHNYNTPDELVKQFGMFDNVDRSVPYFIGEYSRWEIPWPNMQGSVAEAVFMIGLERNSDVVKMAAYAPLLQLVNSTQWTPDLISFTQNPNMVIDSTSYYVQQMFSVNRGDTIKEVTSDSAFGPVYWVASSSGSSYYVKLANYGADTQEVSVSIPGMSSGKLTVLADSDPEAYNSDTQTLVTPSESNVQASNGQFSFTLPAWSVAVLTAN

SEQ ID NO: 49 - protein, 565 aa, Emericella nidulans
MPLSAAIKSSLSVSVRADAKGLVGFANTGYNGITVLKQTYWTSFYMKGEYSGTVLLRLTGTDSGTVYGSRNLSVKSTGGKWTQYETTFEANESYVAENEWQLLFDAATAKGHPLHFGLVQLFPPTYKNRTNGLRNDIARPIADLKPKFLRFPGGNNIQADRPGDWHYPNTDALGLDEYLWWCEDMDMVPVLSVWDGKSYGGIVSGEELQPYLDDIKDELEVTLPLTLLSHPLRAYLTPNTNEQYLLGPPSTPFGALRARNGHPDPWPIQYIEIGNEDDYSGGCDTYPDRLVQIYDTIHASYPNLTLIANNMDENCLPEIPLPGLWHDYHYYRSADDLVAMFNYWDNHDRGDRVLVGEYGCRNDSNPDGVFWSFMQGSCAEAVHMIGLERNSDVVMMAAYAPLLQHFGYTQWSVCTPSASLAYLGIHPADRGEEQPTLFGFESRPNSLTLSTSYYVNRMFSTNQGSTVHKVHSTAGFGPLYWVATSNETAYQVKLANYGAANQTVNIRVPGVGRGVLEMISGPKDASNLPGDIKIVPVSRNIRAGKEGYTVHMPPWGVAVLVVVFK

SEQ ID NO: 50 - protein, 499 aa, Aspergillus awamori
MFSRRNLLALGLAATVSAGPCDIYEAGDTPCVAAHSTTRALYSSFSGALYQLQRGSDDTTTTISPLTAGGIADASAQDTFCANTTCLITIIYDQSGNGNHLTQAPPGGFDGPDTDGYDNLASAIGAPVTLNGQKAYGVFMSPGTGYRNNEATGTATGDEAEGMYAVLDGTHYNDACCFDYGNAETSSTDTGAGHMEAIYLGNSTTWGYGAGDGPWIMVDMENNLFSGADEGYNSGDPSISYRFVTAAVKGGADKWAIRGANAASGSLSTYYSGARPDYSGYNPMSKEGAIILGIGGYNSNGAQGTFYEGVMTSGYPSDDTENSVQENIVAAKYVVGSLVSGPSFTSGEVVSLRVTTPGYTTRYIAHTDTTVNTQVVDDDSSTTLKEEASWTVVTGLANSQCFSFESVDTPGSYIRHYNFELLLNANDGTKQFHEDATFCPQAALNGEGTSLRSWSYPTRYFRHYENVLYAASNGGVQTFDSKTSFNNDVSFEIETAFAS

SEQ ID NO: 51 - protein, 506 aa, Aspergillus clavatus
MLSQPSRERAFVLALGLVVSSSLAAAAPCDIYSSGGTPCVAAHSTTRALYSAYSGPLYQVKRGSDGATTNIAPRSAGGVANAAAQDTFCASMTCLITVIYDQSGRGNHLTQAPPGGFKGPEANGYDNLASAIGAPVTLNGQKAYGVFISPGTGYRNNAASGTAIGDAAEGMYAVLDGTHYNGGCCFDYGNAETSSLDTGNGHMEAIYFGTNTVWGSGSGSGPWIMADLENGLFSGSSPANNAGDPSVSYRFLTAAIKGGPNRWAIRGANAASGSLATYYSGARPNASGYNPMSKEGAIILGIGGDNSNGAQGTFYEGVMTSGYPSDATENAVQADIVAANYAVTSLTSGPALTVGSAISLRATTSCCTTRYLAHTGSTINTQVVSSASATTLKQQATWTVRTGLANSGCFSFESKDTPGSFIRHSNFALVLNGNDGTKQFKEDATFCPQAGLNGQGSSIRSWSFPTRYFRHYSNVLYAASNGGVHTFDAAGSFNDDVSWVISSGFA

SEQ ID NO: 52 - protein, 506 aa, Aspergillus flavus
MSSGLSLERACAVALGIVASASLVAAGPCDIYSSGGTPCVAAHSTTRALYSAYTGALYQVKRGSDGSTTDIAPLSAGGVADAATQDSFCANTTCLITIIYDQSGRGNHLTQAPPGGFNGPESNGYDNLASAVGAPVTLNGKKAYGVFMSPGTGYRNNAASGTATGDEAEGMYAVLDGTHYNSACCFDYGNAEVSNTDTGNGHMEAIYYGDNTVWGSGAGSGPWIMADLENGLFSGLSSKNNAGDPSISYRFVTAVVKGEANQWSIRGANAASGSLSTYYSGARPSASGYNPMSKEGAIILGIGGDNSNGAQGTFYEGVMTSGYPSDATENSVQADIVAAKYAIASLTSGPALTVGSSISLQVTTAGYTTRYLAHDGSTVNTQVVSSSSTTALKQQASWTVRTGLANSACFSFESVDTPGSYIRHYNFALLLNANDGTKQFYEDATFCPQAGLNGQGNSIRSWSYPTRYFRHYENVLYVASNGGVQTFDATTSFNDDVSWVVSTGFA

SEQ ID NO: 53 - protein, 506 aa, Neosartorya fumigata
MLPQLSIERASVFALGLIATGSLVVAGPCDIYSAGGTPCVAAHSTTRALYSSYSGPLYQVKRGSDGATADIAPLSAGGVANAAAQDSFCDGTTCLITIIYDQSGRGNHLTQAPPGGFSGPESNGYDNLASAIGAPVTLNGQKAYGVFISPGTGYRNNAASGTATGDAPEGMYAVLDGTHYNDACCFDYGNAETSSRDTGNGHMEAIYFGDNTIWGTGSGSGPWIMADLENGLFSGSSPDNNSGDPSISYRFLTAVVKGKQNQWAIRGANAASGSLSTFYNGARPSVSGYNPMSKEGAIILGIGGDNSNGAQGTFYEGVMTSGYPSDATENSVQANIVAAKYATASLTSGPKLTVGSSISLQATTPGYTTRYIAHSGSTVNTQVVSSSSSTTLKQQASWTVRTGLANSDCFSFESRDTPGSFLRHYNFVLQLSANDGTKQFHEDATFCPQAGLNGQGNSIRSWNYPTRYFRHYNNVLYAASNGGVHTFDATSSFNNDVSWVISTGFA

SEQ ID NO: 54 - protein, 499 aa, Aspergillus kawachii
MFSRRNLLALGLAATVSAGPCDIYEAGDTPCVAAHSTTRALYSSFSGALYQLQRGSDDTTTTISPLTAGGIADASAQDTFCANTTCLITIIYDQSGNGNHLTQAPPGGFDGPDTDGYDNLASAIGAPVTLNGQKAYGVFMSPGTGYRNNEATGTATGDEAEGMYAVLDGTHYNDACCFDYGNAETSSTDTGAGHMEAIYLGNSTTWGYGAGDGPWIMVDMENNLFSGADEGYNSGDPSISYRFVTAAVKGGADKWAIRGANAASGSLSTYYSGARPDYSGYNPMSKEGAIILGIGGDNSNGAQGTFYEGVMTSGYPSDDTENSVQENIVAAKYVVGSLVSGPSFTSGEVVSLRVTTPGYTTRYIAHTDTTVNTQVVDDDSSTTLKEEASWTVVTGLANSQCFSFESVDTPGSYIRHYNFELLLNANDGTKQFHEDATFCPQAALNGEGTSLRSWSYPTRYFRHYENVLYAASNGGVQTFDSKTSFNNDVSFEIETAFAS

SEQ ID NO: 55 - protein, 499 aa, Aspergillus niger
MFSRRNLVALGLAATVSAGPCDIYEAGDTPCVAAHSTTRALYSSFSGALYQLQRGSDDTTTTISPLTAGGVADASAQDTFCANTTCLITIIYDQSGNGNHLTQAPPGGFDGPDVDGYDNLASAIGAPVTLNGQKAYGVFMSPGTGYRNNEATGTATGDEPEGMYAVLDGTHYNDACCFDYGNAETSSTDTGAGHMEAIYLGNSTTWGYGAGDGPWIMVDMENNLFSGADEGYNSGDPSISYSFVTAAVKGGADKWAIRGGNAASGSLSTYYSGARPDYSGYNPMSKEGAIILGIGGDNSNGAQGTFYEGVMTSGYPSDDVENSVQENIVAAKYVSGSLVSGPSFTSGEVVSLRVTTPGYTTRYIAHTDTTVNTQVVDDDSSTTLKEEASWTVVTGLANSQCFSFESVDTPGSYIRHYNFELLLNANDGTKQFHEDATFCPQAPLNGEGTSLRSWSYPTRYFRHYDNVLYAASNGGVQTFDSKTSFNNDVSFEIETAFAS

SEQ ID NO: 56 - protein, 506 aa, Aspergillus oryzae
MSSGLSLERACAVALGIVASASLVAAGPCDIYSSGGTPCVAAHSTTRALYSAYTGALYQVKRGSDGSTTDIAPLSAGGVADAAIQDSFCANTTCLITIIYDQSGRGNHLTQAPPGGFNGPESNGYDNLASAVGAPVTLNGKKAYGVFMSPGTGYRNNAASGTATGDKAEGMYAVLDGTHYNSACCFDYGNAEVSNTDTGNGHMEAIYYGDNTVWGSGAGSGPWIMADLENGLFSGLSSTNNAGDPSISYRFVTAVVKGEANQWSIRGANAASGSLSTYYSGARPSASGYNPMSKEGAIILGIGGDNSNGAQGTFYEGVMTSGYPSDATENSVQADIVAAKYAIASLTSGPALTVGSSISLQVTTAGYTTRYLAHDGSTVNTQVVSSSSTTALRQQASWTVRTGLANSACLSFESVDTPGSYIRHYNFALLLNANDGTKQFYEDATFCPQAGLNGQGNSIRSWSYPTRYFRHYENVLYVASNGGVQTFDATTSFNDDVSWVVSTGFA

SEQ ID NO: 57 - protein, 506 aa, Aspergillus terreus
MLLPRGFNRAVVTALGVVGTGTLVAAGPCDIYSSGGTPCVAAHSTTRALYSAYTGPLYQVKRGSDGATTNIAPLSAGGVANAAAQDSFCAGTTCLITIIYDQSGRGNHLTQAPPGGFKGPEANGYDNLASAIGAPVTLNGQKAYGVFISPGTGYRNNAASGTATGDAPEGMYAVLDGTHYNGGCCFDYGNAETSSTDTGNGHMEAIYFGDNTVWGSGSGSGPWIMADLENGLFSGSSTKNNAGDPSVSYRFLTAIVKGKPNQWAIRGANAASGSLSTYYNGARPNASGYNPMSKEGAIILGIGGDNSIGAQGTFYEGVMTSGYPSDATENSVQANIVAAKYAVAPLTSGPSLTVGSSISLRATTSCCTTRYLAHNGSTVNTQVVSSSSSTALKQQASWTVRAGLANSACFSFESKDTPGSFIRHYDFVLQLSANDGTKQFYEDATFCPQSGLNGQGSSIRSWNYPTRYFRHYNNVLYAASNGGVHTFDATGSFNDDVSWVVSTSFA

SEQ ID NO: 58 - protein, 510 aa, Emericella nidulans
MTMSRSSRSSVLALALATGSLVAAGPCDIYSSGGTPCIAAHSTTRALYSSYNGPLYQVQRASDGTTTTITPLSAGGVADASAQDAFCENTTCLITIIYDQSGNGNDLTQAPPGGFNGPDVGGYDNLAGAIGAPVTLNGKKAYGVFVSPGTGYRNNEAIGTATGDEPEGMYAVLDGTHYNDGCCFDYGNAETSSLDTGNGHMEAIYYGTNTAWGYGAGNGPWIMADLENGLFSGQSSDYNAGDPSISYRFVTAILKGGPNLWALRGGNAASGSLSTYYNGIRPTDASGYNPMSKEGAIILGIGGDNSVSAQGTFYEGAMTDGYPDDATENSVQADIVAAKYATTSLISGPALTVGDTVSLKVTTSGYDTRYIAHTGSTINTQVVSSSSSSTLKQQASWTVRTGLASTAAANGCVSFESVDTPGSYIRHSNFALLLNANDGTKLFSEDATFCPQDSFNDDGTNSIRSWNYPTRYWRHYENVLYVASNGGVNTFDAATAFTDDVSWVVADGFA

SEQ ID NO: 59 - protein, 505 aa, Aspergillus clavatus
MTTFTKLSEQETPSIAVHASRRISKINPNIYAGFTEHMGRCIYGGIYDPGNPLSDENGFRKDVLEALKELNIPVVRYPGGNFMATYHWIDGVGPKDQRPSRPELAWLGTETNQFGTDEFMKWCELLGTEPYFCLNFGTGTLDEALAWVEYCNGTRDTYYANLRRKNGREEPYNIKYWALGNEVWGPWQVAQTTKEEYAHKAYQWAKALKLLDPTLKLILCGQDGTASWDYYTLKHCILPVNSPLSTSAVPLIDMHSIHLYTSSSSHLPNVTAPLAAERAIEITSSLIDLAMIENGVPNTQLRPTICFDEWNVWDPIRAEGSKGAEESYTLSDALAVAVWLNVFVRKSKDVGMACIAQTVNVISPLMTTKDGIIKQTTWWPLYLFSKYMRGWTINTHVSCGTYEGETAPSWVRTVKDTPWLDVSATLGEDGYVNVAVVNISEDKDIESKFEGAAGEVAVFTVNGDSVSACNMNGKQEVGVTESTWDGKGAYAFPKHSLTLLRWKAE

SEQ ID NO: 60 - protein, 505 aa, Neosartorya fumigata
MTTFTKLSEQETPSISVHASRRISKINPNIYAGFTEHMGRCIYGGIYDPGNPLSDENGFRKDVLEALKELNIPVIRYPGGNFTATYHWIDGVGPKDQRPARPELAWLGTETNHFGTDEFMKWCELLGTEPYFCLNFGTGTLDEALAWVEYCNGTKDTYYANLRRKNGREEPYNIKYWALGNEVWGPWQVAQMTKEEYAHKAYQWAKALKLLDPSLKLILCGQDGTASWDYYTLKQCLLPAHSPLSTSTVPLIDMHSIHMYTCGSTHLPNVTAPLAAERAIEITSSLIDLAMIENGIPPDQPRPTICFDEWNVWDPLRAEGSKGAEESYTLSDALAVAIWLNVFVRKSKDVGMACIAQSVNVISPLMTTKDGIIKQTIWWPLYLFSKYMRGWTINAHVSCGAYEGETSPKWIRAVKDTPWLDVSATLGEDGYANVAVVNISDEKDMECKFEGATGDVTVFTVTGDSVSACNMKGKEEVGLTESTWDGKGAYKFPRHSLTLLRWKAE

SEQ ID NO: 61 - protein, 504 aa, Aspergillus flavus
MTTFTKLSDQDTPSIAIHPSRRISKINPNIYAGFTEHMGRCIYGGIYDPGNPLSDENGFRKDVLEALKTLDIPVVRYPGGNFMATYHWIDGVGPKDQRPARPELAWLGTETNQFGTDEFLKWCEVLGTEPYFCLNFGTGTLDEALAWVEYCNGTGNTYYANLRRKNGREEPYNVKYWALGNETWGPWQVEQMTKEAYSHKAYQWAKALKLLDPSLVLILCGQDGTASWDYYTLKHCLLPVNSPLSTSAVPLIDMHSIHLYTSSSSHLPNATAPLAAERAIEITSSLIDLARIENGVPPEQARPTICFDEWNVWDPIRAEGSKGAEECYTLSDALAVAVWLNVFVRKSKDLGMACIAQTVNVISPLMTTKEGITKQTTWWPLYLFSKYMRGWTISAHLASATYEGETSPKWIRGVKETPWLDVSAVLGEDGYVNVAVVNIHEEKAIETTIDGASGEVTVFTVTGDSVAATNMKGKEEVAVVESTWDGQGPYAFPKHSLTLLRWKA

SEQ ID NO: 62 - protein, 505 aa, Neosartorya fumigata; identical to SEQ ID NO: 60

SEQ ID NO: 63 - protein, 505 aa, Aspergillus niger
MTTFTKLSDQDAPSISIHPARRLSKINPNIYAGFTEHMGRCIYGGIYDPGNSLSDENGFRKDVLEALKELNIPVVRYPGGNFMATYHWIDGVGPKEKRPARPELAWLGTETNQFGTDEFLKWCEVLGTEPYFCLNFGTGTLDEALAWVEYCNGTKDTYYANLRRKNGREEPYNVKYWALGNETWGPWQVEQMTKEAYAHKAYQWAKALKLLDPSLILILCGQDGTASWDYYTLKQCLLPAHSPLSTSTVPLIDMHSIHLYTSSPSHLPNVTAPLAAERAIEITSSLIDLARIENGVPPDQHRPTICFDEWNVWDPIRAEGSKGAEESYTLSDALAVAVFLNVFVRKSKDLGMACIAQSVNVISPLMTSKDGITKQTTYWPLYLFSKYMRGWTISVHLSCASYEGETSPKWVRGVKDTPWLDVSATLGEDGYVNVAVVNIHEEKDIRSSIDGPSGTVSVFTVTGERVQACNMNGKEEVAVTESTWEAREQFVFPKHSLTLLRWKLA

SEQ ID NO: 64 - protein, 504 aa, Aspergillus terreus
MTTFTKLSEQEAPSLSVHPTRRISKINPNIYAGFTEHMGRCIYGGIYDPGNPLSDENGFRKDVLEALKELNIPVVRYPGGNFMATYHWIDGVGPKDQRPARPELAWLGTETNQFGTDEFLKWCEVLGTEPYFCLNFGTGTLDEALAWVEYCNGTRDTYYANLRRKNGREEPYNVKYWALGNETWGPWQVEQMTKEAYAHKAYQWAKALKLLDPSLVLVLCGQDGTASWDYYTLKQCLLPLNSPLSTSAVPLIDMHSIHLYTASSDHRANATAPLAAERAIEITSSLIDLARIENGVPADQLRPTICFDEWNVWDPIRAEGSKGAEECYTLSDALAVAVYLNVFVRKSKDLGMCCIAQSVNVISPLMTTKDGITKQTTWWPLYLFSRYMRGWTISAHLSCSTYEGETSPKWVRGVKDTPWLDVSATLGEDGYVNLAVVNVHDDKGIETQLEGPSGEVSVFTVTGDNVNVTNMKGKQEVGIVESTWDGKGKYVFPKHSFTLLRWKA

SEQ ID NO: 65 - protein, 504 aa, Emericella nidulans
MTTFTKLSEQEAPGISIHPDRRISKINPNIYAGFAEHMGRCIYGGIYDPGNPLSDENGFRKDVLEALKELKVPVIRYPGGNFTATYHWIDGVGPRDQRPARPELAWLGTETNQFGTDEFLKWCEVLGTEPYLCLNMGTGTLDEALAWVDYCNGTRDTYYANLRRKNGREEPYNVKYWALGNEVWGPWQVEQSTKEEYAHKAYQWAKALKLLDPSIELILCGKEGPTSWDYYTLKQTMLPVHSPLSTSAVPLIDMHSIHLYTAHSSHLPNVTAPLAAERAIEITSSLIDLARVENGVPPEQRRPTICFDEWNVWDPIRAEGSKGAEESYNLSDALAVGVWLNVFVRKSKDVGMACIAQSVNVISPLMTTKDGIVKQTTWWPLYLFSNYMRGWTISAHISVSAYEGETHPKWVRGVKDTPWLDVSATLGEDGYVNVVVINIHEEKGIEAKLDGPSGEVTVFTVTGDNPAVTNMKGKEEVGLVETKWDAQGPYVFPKHSLTLLRWKA

SEQ ID NO: 66 - protein, 321 aa, Aspergillus aculeatus
MYSLLTALSVPLLAGLAHGYANPGSCSGSCNVHDPALIVRESDGKYFRFSTGNEISYASASSINGPWTAIGSVVPAGSKIDLSGNTDLWAPDLSYVDGTYYCLYSVSTFGSQDSAIGVASSTTMELNTWTDHGSVGVASSSSKNYNAIDGNLLVDGSSYYLQFGSFWGDIYQVKMASPLKTAGSASYNIAYNATGTHSEEGSYLFKYGSYYYLFFSSGTCCGYDTSRPAQGEEYKIMVCRSTSATGGFVDKNGNACTESGGTIVLASHGTVYGPGGQGVYDDPTYGPVLYYHYVDTTIGYADDQKLFGWNTIDFSSGWPVV

SEQ ID NO: 67 - protein, 321 aa, Aspergillus clavatus
MHPSTFVTTIACLAGLAHGYANPGSCSGACNIHDPALIRRQSDGKYFRFSTGNKISYASSSSIKGPWTVLGSVLPRGSSINLPGKTDLWAPDISLVNGAYHLYYSVSAFGSQDSAIGLATSATMDPNSWTDHGSTGIRSSSSKPYNAIDANLFHDGGNYYMTFGSFWHDIYQAPMNSAATAVSSGPYNIAYNPSGTHAVEGAFMYKFGKYYYLFFSSGICCGYDTSRPAAGKEYKIRVCRSTSATGHFVDKHGVSCTNGGGTVVLESHGHVYGPGGQGVFTDPALGPVLYYHYVDTRIGYADGQKRFGWNKIDFSSGWPVV

SEQ ID NO: 68 - protein, 321 aa, Neosartorya fumigata
MSASVFVVVASCLAALAHGYANPGSCLGACNVHDPALIRRESDGKYFRFSTGNKISYASSSSIEGPWTVLGSVLPSGSSIDLPGNDDLWAPDVSLVNGVYHVYYSVSTFGSQSSAIGLATSSTMDLNSWTDHGSTGIQSSSSKPYNAIDGNLFKDGGTYYMNFGSFWHDIYQAPMNSAATSVASSSYNIAYNPSGTHAVEGAFMYKYGNYYYLFFSAGICCGYDTSRPASGEEYKIKVCRSTSATGNFVDANGVACTNGGGTVVLESHGNVYGPGGQGVFTDPSLGPILYYHYVDTTIGYADSQKLFGWNKIDFSSGWPVV

SEQ ID NO: 69 - protein, 319 aa, Aspergillus flavus
MYLQSSLALVLLRAAVVHGYANPGACSGACNIHDPSLIQNGDGTYYRFSTGNNISFASASSIEGPWTALGSVLPGGSSIDNSGRYDPWAPDVQKVGDLYYLYYAVSSFGTQESAIGLATSETMEEGTWTDKGSIVTSTTGDQYNAIDANLLVDGSANYLTFGSFWQDIFQVTLNGDATSSTSTPVNVAFDPATTHPVEGAYLYKYGDYYYLFYSWGTCCGYDTSRPAEGEEYKIKVCRSSTPTGNFVDASGVACTDGGGTVVLESHDNVYGPGGQGVYTDPNLGPVLYYHYVDTTIGYADSQKLFGWNAIDFSSGWPSV

SEQ ID NO: 70 - protein, 321 aa, Neosartorya fumigata; identical to SEQ ID NO: 68

SEQ ID NO: 71 - protein, 321 aa, Aspergillus niger
MYRLLSVASVPLLASLVHGYADPGACSGVCTTHDPGLIRRESDGTYFLFSTGNKISYVSASSIEGPWTSVGSMLPDGSSIDLDGNDDLWAPDVSYVDGLYYVYYAVSTFGSQDSAIGLATSETMEYGSWTDHGSTGIASSSAKIYNAIDPNLIYADGTYYINFGSFWDDIYQVPMKSTPTAAASSSYNLAYDPSGTHAEEGSYMFQYGDYYYLFYSAGICCGYDTSMPASGEEYHIKVCRSTSPTGDFVDSDGTACTDGGGTMVLESHGEVYGPGGQGVYDDPNLGPVLYYHYMNTTIGYADSDAQFGWNTIDFSSGWPVV

SEQ ID NO: 72 - protein, 319 aa, Aspergillus oryzae; identical to SEQ ID NO: 69

SEQ ID NO: 73 - protein, 338 aa, Aspergillus terreus
MRASFVVTAPLLAAAVHGYAAPGACSGACNIHDPSLIRRESDGKYFRFSTGNKISYASASSIEGPWTTIGSMLPDGSSIDLPGNDDLWVSAHATWTGVPHANREYQAPDAQIVNGVYHVYYSVSSFGSQNSAIGLATSTSMDAGTWTDHGSTGIQSSSSKNYNAIDGNLFNDGGTYYMNFGSFWADIFQAPMNSAATKVASSSYGIAYDPSGTHAVEGSYLYKYGNYYYLFYSWGICCGYDTSRPAAGQEYKIKVCRSTSATGNFVDADGVACTNGGGTVVLESHDNVYGPGGQGVFTDPNLGPVLYYHYVDTNIGYADGQKLFGWNVLDFSSGWPVV

SEQ ID NO: 74 - protein, 322 aa, Emericella nidulans
MYLPTLAASASLLVGVAHGYASPGACSGACNIHDPALIRRESDGKYFRFSTGNKISYASASSIEGPWTAIGSVLPGGSSIDLDGNDDLWAPDVQLVNGVYYVLYSVSTFGSQNSAIGLATSDTMDLNTWTDHGSTGIRSDSSKPYNAIDGNLFQDDSGTWYMNFGSFWNDIYQAQMKSPPTAVASSSYQIAYQPAGEHAVEGAYLYKYGNYYYLFFSEGKCCGYDSSRPATGEEYKIKVCRSTTATGNFVDANGVSCTSGGGTIVLESHDNVYGPGGQGVFTDPTLGPVLYYHYVDTTIGYADSQKLFGWNVLDFSSGWPVV

SEQ ID NO: 75 - protein, 321 aa, Neosartorya fischeri
MSASAFVAVASCLAALVHGYANPGSCSGACNVHDPALIRRQSDGKYFRFSTGNKISYASSSSIQGPWTVLGSVLPSGSSINLDGKDDLWAPDVSLVNGVYHVYYSVSTFGSQSSAIGLATSSTMDLNSWTDHGSTGIQSSSSKPYNAIDANLFNDGGTYYMNFGSFWHDIYQAPMNSAATAAASSSYNIAYNPSGTHAVEGAFMYKYGSYYYLFFSAGICCGYDTSRPASGEEYKIKVCRSTSATGNFVDASGVACTNGGGTVVLESHGTVYGPGGQGVFTDPSLGPILYYHYVDTTIGYADGQKLFGWNKIDFSSGWPVV

SEQ ID NO: 76 - protein, 372 aa, Neosartorya fumigata
MTVLVALFCLVTWTLCTRIPQYSTQGTQQPQQPEKTPHPHPQPEDAFPPTHATDLKIHDPSIIHVDGTYYSYSVGRHIRIHQAPSLDGPWERTGAVLNADSVIPKGDRKAPWAPQTVHHNDTYYCFYAVSNSGCRDSAIGVATSKSPGPGGWTDHGLLVQSGTGKGSDEHPFTSSNTIDPSVFVGEDGHGYLMFGSFWSGIWQVPLDESLLSVAGDTSSEARQLVYMEKAPLPASKHPNPLCREPSGARPIEGSFLSYHEPWYYLWFSYGKCCKFDTKNLPPPGREYSIRVGRSKSPRGPFVDKQGRDLANGGGEIVYASNRDVYAPGGQGVLTEKSGDILYYHYCRYPVIQEIEVDADLTVNKSTSYDFWV

SEQ ID NO: 77 - protein, 358 aa, Aspergillus flavus
MVLVATLFSLFTVSLCRSIPRSSPSSSPYTQATDLKIHDPTVINANGAYYAYGVGEHIVIHQAPGLAGPWKQIGSVLDKDSIIPKGDRAKPWAPTTIEVKGTFYCYYSVSNAGCRDSAIGVATSQSPGPGGWTDHGAIVQSGTGQGSDEHPFNEVNAIDPAVLVTGDKGHLVFGSYWSGIWQVPLNEDFSSVGNTTGLNAHHLAKHPKTERVNSQDQNPDPLCRDSSGRRPVEGAYISYHAPYYYLWLSWGQCCDYDPNNLPPSGEEYSIRVGRSESPHGPFVDKQGKELTQGGGELIYGSNNDVYAPGGQGVITVETGDILYYHYCESLFFRGLSEARLGYSYLGYVDGWPVIREAP

SEQ ID NO: 78 - protein, 372 aa, Neosartorya fumigata
MTVLVALFCLVTWTLCTRIPQYSTQGTQQPQQPEKTPHPHPQPEDAFPPTHATDLKIHDPSIIHVDGTYYSYSVGRHIRIHQAPSLDGPWERTGAVLNADSVIPKGDRKAPWAPQTVHHNDTYYCFYAVSNSGCRDSAIGVATSKSPGPGGWTDHGLLVQSGTGKGSDEHPFTSSNTIDPSVFVGEDGHGYLTFGSFWSGIWQVPLDESLLSVAGDTSSEARQLVYMEKAPLPASKHPNPLCREPSGARPIEGSFLSYHEPWYYLWFSYGKCCKFDTKNLPPPGREYSIRVGRSKSPRGPFVDKQGRDLANGGGEIVYASNRDVYAPGGQGVLTEKSGDILYYHYCRYPVIQEIEVDADLTVNKSTSYDFWV

SEQ ID NO: 79 - protein, 353 aa, Aspergillus oryzae
MVLVATLFSLFTVSLCRSIPRSSPSSSPYTQATDLKIHDPTVINANGAYYAYGVGEHIVIHQAPGLAGPWKQIGSVLDKDSIIPKGDRAKPWAPTTIEVKGTFYCYYSVSNAGCRDSAIGVATSQSPGPGGWTDHGAIVQSGTGQGSDEHPFNEVNAIDPAVLVTGDKGHLVFGSYWSGIWQVPLNEDFSSVGNTTGLNAHHLAKHPKTERVNSQDQNPDPLCRDSSGRRPVEGAYISYHAPYYYLWLSWGQCCDYDPNNLPPSGEEYSIRVGRSESPHGPFVDKQGKELTQGGGELIYGSNNDVYAPGGQGVITVETGDILYYHYSLYRYSTHSLYTFANLDFNQGCTLFIQ

SEQ ID NO: 80 - protein, 364 aa, Aspergillus terreus
MRRIIKILVVVAVLYLAIIFLFANTRRVVPIHRQTPFPPTHPADLKIHDPSILKVGDKYYSYSVGPRIVIHEAPTLSGPWKKTGHVLDKDSIIPKGDRKAPWAPTTIEVAGTYYCYYAVSQSGCRNSAIGVATSQSPGPGGWTDHGAIIHTGTGPGSDSAPFDRSNAIDASVILTPDGNGYLNFGSYWTGIWQVPLNADLVSISDVSTNAARHLAYEPHAFSPGGKNPNPLCGDRSGSHPIEGAFVSYRAPFYYLWFSWGKCCKYNPKALPPRGKEYQIRVGRSTHPQGPFVDRQGVDLIEGGGEVVYGSNRDVYAPGGQGVLTDEGTDILYYHYLNKTVSLDFWEARLGYNPLIYIDGWPVAQ

SEQ ID NO: 81 - protein, 400 aa, Emericella nidulans
MAVIFVLFFLVSMALSARIRPSFNGTALSGTSNKHPFEPGPNTIFREEVPPSAAASGFPSAHGTELRTHDPSIIKVGSIYYSYSVGPSITIHQAFSLDGPWTEVGALLSGESVIKKGDRKAPWAANTIYINGRYYCYYSVSNSGCRDSAIGVASSAFPGPGEWTDHGLIIQSGTGEGSDVFPLNQSNTIDPNVFVDGDGTAYLNFGSFWTGLWQVPLEEELVTVKGLQDGTLDAVHLAAEPGKVWRSKLANSKAKTVSTSKTGSPICGDPTGGHPIEGGFMAYHAPYYYMWFSWGRCCEFKDPAMRSNGKEYRIRVGRSTSARGPFVDKQGIDLVDGGGETVYGSNGDVFAPGGQGILTDEFGDILYYHYLNSSVSYDFADARLGYNRLEYVDGWPVAVY

SEQ ID NO: 82 - protein, 372 aa, Neosartorya fischeri
MAVLVALFCLVTWALCTRIPQYSTQGTQQLQQPEKTPHPHPRPEDPFPPTHAADFKIHDPSIIHVDGTYYSYSVGKHIRIHQAPSLDGPWKRTGTVLDADSVIPKGDRKAPWAPQTVHHGDTYYCFYAVSNSGCRDSAIGVATSKSPGPGGWTDHGLLVQSGTGKGSDEHPFASSNTIDPSVFVGEDGHGYLMFGSFWSGIWQVPLDETLLSVAGDTRSEARQLVYMEKAPLPASKHPNPLCREPSGARPIEGSFLSYHEPWYYLWFSYGKCCKFDTKNLPPPGREYSIRVGRSKSPRGPFVDKQGRDLANGGGEIVYASNRDVYAPGGQAVLTEKSGDILYYHYCRYPAVQETEVDADLTVNKSTSYDFWV

SEQ ID NO: 83 - protein, 319 aa, Aspergillus clavatus
MFVYTLIFLFLAAANAYSNPGPCSGNCWTHDPGLYQRKSDGKYFLFATGGGIHISSADDLAGPWTDDGFVLPDGSSIDLDGQNNLWAPDLHYRDGTYYLYYSVSALGSQNSAIGVATSETLEAGSWTDHGSTGVTSTPNSPYNTIDGNWIAVGDKQYLNFGSYWQNLFQVELADGLKVKEGATPHQLSYNASGIHRQEAAFMFERNSYFYLTFSGGVALGYNATWPAQGEEYHINVCRSTSATGGFVDKNGVSCLNSGGSLLLASHGFVYGPGGQGILEDRNKELVLYYHYADTRIGKAVEDYQFGWNQLKWENDWPSV

SEQ ID NO: 84 - protein, 321 aa, Neosartorya fumigata
MYLYTLILLFLASANVNAYANPGACSGNCWTHDPGLYQRKSDGKYFRFATGGGIHIASADSLEGPWTDDGYVLPSGSIIDLDGKTNLWAPDLHYHDGTYYLYYAVSSLGSQNSAIGVATSKTMEAGSWTDHGTTGIESTPSSPYNTIDANWIAVGGNQYVNFGSYWNNLFQVEMENGLKVKSGATPHQIAYNASGIHRQEAAFMFERNNYFYLTFSGGIALGYNDTWPAPGEEYFIAVCRSTSATGGFVDKNGVSCLNSGGSLLLSSHDFVYGPGGQGILQDSSKGFVLYYHYADTRIGKAVEDYQFGWNQLKWENDWPSV

SEQ ID NO: 85 - protein, 317 aa, Aspergillus flavus
MLSFLAALSLPLALVNAYANPGTCNGNCWAHDPGLWKHDDGRYFLFSTGNGIHISSAPSLQGPWTEVGYALPDGSSINHDGNKNLWAPDVHKGDDGKYYMYYSVSTLGSQNSVIGVASSTTMEPGSWTDHGSTGLSSDGSQGYNTIDANWIKIGDQQVLNFGSYWQGLYQIDLAGPLKIGTAAPVNIAYNATGQHAIEASFLYQQNGFYYLFFSSGKANGYDTSFPAQGEEYRINVCRSSTGRGDFVDKNGVSCLQSGGTTVLASHDNVYGPGGQGVLEDNGAVLYYHYAPRNGDLSVSSYQFGWNRLNWVDGWPTV

SEQ ID NO: 86 - protein, 321 aa, Neosartorya fumigata
MYLYTLILLFLASANVNAYANPGACSGNCWTHDPGLYQRKSDGKYFRFATGGGIHIASADSLEGPWTDDGYVLPSGSIIDLDGKTNLWAPDLHYHDGTYYLYYAVSSLGSQNSATGVATSKTMEAGSWTDHGTTGIESTPSSPYNTIDANWIAVGGTQYVNFGSYWNNLFQVEMENGLKVKSGATPHQIAYNASGIHRQEAAFMFERNNYFYLTFSGGIALGYNDTWPAPGEEYFIAVCRSTSATGGFVDKNGVSCLNSGGSLLLSSHDFVYGPGGQGILQDSSKGFVLYYHYADTRIGKAVEDYQFGWNQLKWENDWPSV

SEQ ID NO: 87 - protein, 318 aa, Aspergillus niger
MLSFVLLLCVALVNAYSDPGACSGTCWAHDPNVIRRVSDGTYFRFSTGGGVHISSASAITGPWTDLGYALPNGSIVTVGNASNLWAPDVHYVDGTYYMYYASSTLGSRDSTIGVATSTTLEADSWTDHGEIGVTSSSSTPYNAIDPNWITIGSTPYLQFGSYWQGLYQVEMTDSLSASSSTPTNLAYNASGNHAIEASYLYEYGGYYYLTFSSGKAQGYTTSLPAQGDEYRIVVCRSKTGTGNFVDKDGVSCLNSGGTTVLASHDYVYGPGGQGIINTTSHGIVVYYHYANKNIGLAVDDYQFGWNTLTWTDGWPVVA

SEQ ID NO: 88 - protein, 317 aa, Aspergillus oryzae; identical to SEQ ID NO: 85

SEQ ID NO: 89 - protein, 320 aa, Aspergillus terreus
MYRSTLLFLFIALVNAFANPGPCTGDCWTHDPGLYQRKSDGRYFRFATGGGIHISSAPAIVGPWEDNGFALPNGSKINHAGNDNLWAPDVHYQENTKKYYMYYSVSVLGKKDSVIGVASSDTMEVGSWTDHGSIGLNTSNNPPYNTIDANWIRIDGAPALNFGSYWQGIFQVPLKNPFELAEIAPHQIAWNASLNHRIEAAFEFKHGNYYYLTFSSGLGGNYDVNLPAQGEEYSIHVCRSEGGRNNFVDKSGRSCRESGGTTLLASHGNVYAPGGQGIVEDKNLGQVLYYHYADKTKGLAKTDYQFGWNRLNWVDGWPSV

SEQ ID NO: 90 - protein, 320 aa, Emericella nidulans
MKLALSLFLLSGSLAQYSNPGACSGDCWGHDPGFYQRVSDGRYYRFSTGGGIQIHASDNLEGPWEAVGEALPGGSVVDHAGSTNLWAPDIHYEASTNLYYMYYSVSTLGSRDSVIGVATSPNLQPNWTDHGALFRSQAGGNYNAIDANWASIGGSPILTFGSYWNGIHQLPLAGPLSLADGATPTQIAYNSSGNHAIEAGFVFYRRGWYYLTFSSGRAGSYDTNPPATGEEYRIVVCRSASGTGDFVDKSGRSCLTDNGGTTILASHGNVYGPGGQGVFEDRTRGWVLYYHYANPDIGLSTGQYQFGWNVLQWADGWPSV

SEQ ID NO: 91 - protein, 321 aa, Neosartorya fischeri
MYLYTLILLFLASVNVNAYADPGACSGNCWTHDPGLYQRKSDGKYFRFATGGGIHIASADSLEGPWTDDGYVLPNGSIIDLNGKNNLWAPDLHYRDGTYYLYYAVSSLGSQNSAIGVATSKTMEAGSWTDHGTTGIESTPASPYNAIDANWIAVGGTQYANFGSYWNNLFQVEMTNGLKVKSGATPHQIAYNASGIHRQEAAFMFERNDYFYLTFSGGIALGYNDTWPAPGEEYFISVCRSTSATGGFVDKNGVSCLNSGGTLLLASHGFVYGPGGQGILKDSSKGFVLYYHYADTRIGKAVEDYQFGWNQLKWENDWPSV

SEQ ID NO: 92 - protein, 129 aa, Neosartorya fumigata
MRLFHRLLMATPSTMGSKSSLSEALALLPPLQLYRRILRVHRRKLDPEMRILGDSYVKSEFRAHRNVENPLHIIGFLTEWQLYAQKLEGDAWVGEKLDKSKLDKMSDQQIGQLYELMQAIKNPEGEGKE

SEQ ID NO: 93 - protein, 135 aa, Emericella nidulans
MRIFTRLLYAAPSNMGSAASLSEALALLPPIPLYRRILRVHRKKLDPEMRILGDSYVKSEFRAHRGTENPLHIIGFLTEWQLYAQKLEGDSWIGEKLDQGKLDKMSDQQLGQLYELMQTIQNKDGKGEGEGESEK

SEQ ID NO: 94 - protein, 793 aa, Aspergillus niger
MLISGSSAALCALALPFAAAKSLWSDSPGNYSSFITTAFPLGNGRLGAMPIGSYDKEIVNLNVDSLWRGGPFESPTYSGGNPNVSKAGALPGIREWIFQNGTGNVSALLGEYPYYGSYQVLANLTIDMGELSDIDGYRRNLDLDSAVYSDHFSTGETYIEREAFCSYPDNVCVYRLSSNSSLPEITFGLENQLTSPAPNVSCHGNSISLYGQTYPVIGMIYNARVTVVVPGSSNTTDLCSSSTVKVPEGEKEVFLVFAADTNYEASNGNSKASFSFKGENPYMKVLQTATNAAKKSYSALKSSHVKDYQGVFNKFTLTLPDPNGSADRPTTELLSSYSQPGDPYVENLLFDYGRYLFISSSRPGSLPPNLQGLWTESYSPAWSGDYHANINLQMNHWAVDQTGLGELTEPLWTYMAETWMPRGAETAELLYGTSEGWVTHDEMNTFGHTAMKDVAQWADYPATNAWMSHHVWDHFDYSQDSAWYRETGYPILKGAAQFWLSQLVKDEYFKDGTLVVNPCNSPEHGPTLTPQTFGCTHYQQLIWELFDHVLQGWTASGDDDTSFKNAITSKFSTLDPGIHIGSWGQIQEWKLDIDVKNDTHRHLSNLYGWYPGYIISSVHGSNKTITDAVETTLYSRGTGVEDSNTGWAKVWRSACWALLNVTDEAYSELSLAIQDNFAENGFDMYSGSPPFQIDANFGLVGAMVQMLIRDSDRSSADASAGKTQDVLLGPAIPAAWGGGSVGGLRLRGGGVVSFSWNDSGVVDSCKADLSARGSDVSQVKFYVAGGRAIDCSS

SEQ ID NO: 95 - protein, 723 aa, Aspergillus oryzae
MRSLVLLGMSSLATANSLWSSKAASWDTTNEAYTLGNGKLGVMPFGEPGAEKLNLNHDELWEGGPFEVNGYRGGNPNSSMTEILSEVRDEIWKKGTGNDSRLHGDTDGYGSFHSLANLTIAIDGIDKVSDYTRSLDLGTGIHTTTYSTGKGKYTTDVYCSYPAQVCIYKLNSTATLSKVTIYFDQLVEESSLWNATCDSDFARLRGVTQEGPPRGMTYDTIARSSIPGRCDSSTGKLAINARNSSSLTIVIGAGTDFDGTKGTAATDYTFKGEDPAEYVEKITSSALSQSESKLRTEHIEDYSGLMSAFTLDLPDTQDSTGTELSTLITNYNANKTDGDPYLEKLLFDYGRHLFISSSRANSLPPNLQGVWSPTKNAAWSGDYHANINLQMNLWGAEATGLGELTVAVFNYMEQNWMPRGAETAELLYGGAGWVTHDEMNIFGHTGSLVVNPCTSPEQGPTTFGCTHWQQLIHQVYENAIQGAEIAGETDSTLLKDIKDQLPRLDKGLHIGTWGQIKEWKLPDSYDYEKEGNEHRHLSHLVGWYPGWSLSSYFNGYNNATIQSAVNTSLISRGVGLYTNAGWEKVWRSACWARLNNTEKAHYELRLTIDQNIGQSGLSLYSGGDTPSGAFQIDANFGYLGAVLSMLVVDMPLDSTHSEDDVRTVVLGPAIPAAWAGGSVKGLRLRGGGSVDFSWDSEGLVDKASATGVSSNVRIVNVEGTVLV

SEQ ID NO: 96 - protein, 809 aa, Emericella nidulans
MRKTTLFLAVTFATSNAQGRALRSSSPATYGTTDGSDYILKTGYLIGNGKLGVIPFGPPDTEKLNLNVDSLWSGGPFEVENYTGGNPSSPIYDALPGIRERIFENGTGGMEELLGSGNHYGSSRVLGNITIALDGVEAYSKYKRTLDLSDGVHRTSFTIANRTTAALKSSIFCSYPDQVCVYHLESASDARLPKVTISIENLLVNQSLLQTSCESEAKRAVLRHSGVTQAGPPEGMKYAAVAEVVNPRSSVTTCLGEGALQISSRKKQLTIIIGAATNYDQKAGNAKSGWSFKNAKDPASIVDGIASAAGWKGYQRLLDRHVKDYKKLMGDFSLELPDTTDSASKDTSELIEKYSYASATGNPYLENLLLDYARHLLVSSSRPNSLPANLQGRWTESLTPSWSADYHANINLQMNYWLADQTGLGETQHALWNYMADTWVPRGTETARLLYNASGWVVHNEINIFGFTAMKEDAGWANYPAAAAWMMQHVWDNFDYTHDTAWLVSQGYALLKGIASFWLSSLQEDKFFNDGSLVVNPCNSPETGPTTFGCTHYQQLIHQVFETVLAAQEYIHESDTKFVDSVASALERLDTGLHLSSWGGLKEWKLPDSYGYDNMSTHRHLSHLAGWYPGYSISSFAHGYRNKTIQDAVKETLTARGMGNAADANAGWAKVWRAACWARLNDSSMAYDELRYAIDENFVGNGLSMYWGASPPFQIDANFGFAGAVLSMLVVDLPTPRSDPGQRTVVLGPAIPSAWGGGRAKGLRLRGGAKVDFGWDKRGVVNWVNIVKRGKGTSRVKLVNKEGDILAEM

SEQ ID NO: 97 - protein, 94 aa, Aspergillus giganteus
MKFVSLASLGFALVAALGAVATPVEADSLTAGGLDARDESAVLATYNGKCYKKDNICKYKAQSGKTAICKCYVKKCPRDGAKCEFDSYKGKCYC

SEQ ID NO: 98 - protein, 499 aa, Emericella nidulans
MELEKFKPWRDSHSEHIPVPLTSRQNIIIILLILFSHYHHWYWRCRRPTDRWSLLAVCHKHHQRAPNSLPTSKSLHSFLHSARGWNSWGIQATPNTIPSYPKEELGRVLNQKFIISQCTMLTDPATQDAGYDLCSLDGGWYSSITDKFGCITYNASLFDISALSRYLHGKGLRMGLYSQPGTPCKARHGTNVTVGSAFIDHVDKNNNCYFDYENPNTQLYRELITLWVSWGVDMIKLDYVTPGSTFQDTCMPGNLNASAIAYHCAIEKSGRKFQLDVSSDVCRSQPYWGTWNSNADSIRVDTDINPYDSDDFFFFYMQHCTVEDYRQFVNLQVVDAQNDKPVTLRGNLDNLFVGNPAKVKGVTDKQRNTLMRIWIGASSNLFLGSDMRILDDLGRWLITSPSSIAAADFCAMYPMQPRNPGTGSNQAVQLQACITGPSEHGEAYVLLTNLGPNLGDGGYVTVGGGEQKMSVTLADMGPSRSSANRLDLSPRPIHVLILL

SEQ ID NO: 99 - protein, 525 aa, Aspergillus clavatus
MHPSMTLLAILPPLVRASIGNPHLLPTPPMGFNNWARFMCNLNESLFLDTAAAMLDTGLHAAGYTRLNLDDCWMASHRAPNGSLPWDPTKFPHSLPWLSAQLRSLGFSLGIYQDAGNVTCGGYPGSYGFEELDAHTFAEWGVDYLKLDGCNVSPAGAVSLADEYRARYARWHSVLGAMPHPLVFSESAPAYFVDPQNATAWYGVMDWVPAYGELARHSTDILVYEGEGSAWQSIMVNYRYNTLLARYQRPGYFNDPDFLIADHPGLSLVEKRSHFALWASFGAPLIISADVPGLSKEVIAVLTNADLIRVDQDALGLQATLASRSEHLDVLTRSLDGGDRLVTILNRGDGGLAVKVPVGWMGLQRCAYQAKNLWDGEIQEIEEDIEVQLDSHATEVFRVSLPPDCPMVIPTGIVFNTASGNCLTDGEALAFEPCRGQDLQVWQVEESGILRPLSRTSHCLTAIGDNVVVKPCTGRPGQRWTYHITGNLQNQHTGACLTEGTGIDVCGFELDSQVFGLPSGVDIEA

SEQ ID NO: 100 - protein, 534 aa, Aspergillus flavus
MRLITRWIPLANALASTMPVQVVASIENPSLLPTPPMGFNNWARFMCDLNETLFVETTDAMASNGLLEAGYNRINLDDCWMNYDRAENGSLEWNVTKFPRGLPWLGQYVKSKGFNFGIYEDSGNLTCGGYPGSEGYEEIDAETFAAWGIDYLKLDGCNVYPKEGRTLQEEYKYLYGNWHEILSKMQQPLIFSESAPAYFSMTDNLTDWHTVMDWVPEYGELARHSVDILVYSGEGSAWDSIMTNYKFNTLVARYQRPGYYNDPDFLIADHPGLSLDEKRSQFALWASFSAPLIISAHIPDLSSEDLEYLTNQALIAVDQDPLAQQATLASRDGSLDVLTRNLADGSRLVTILNHGSESIETDISLDILGLSTDCTYKAQDLWGGSTQTIKDAIRIKLNTHATAVYKIDTDEKCSQVIPTGLIFNTASGKCLTGTSSSVGSESCNGSKSQIWQIDASGVIRTLSEQSKCLTADGKAISLQECSENNGQKWSYAITGNLKNADTGYCLTNGGGVSACGFETNSQVFGLPAGVHVAL

SEQ ID NO: 101 - protein, 532 aa, Neosartorya fumigata
MDTTKSLLSTLIAIMIPLSLGSVSSPNLLPTPPMGFNNWARFMCDLNETLFLETASAMISTGLLEAGYNRVNLDDCWMAYDRAADSSLQWNTTKFPHGIPWLARHLKAQGFHVGIYEDAGNLTCGGYPGSFGHEALDAQTFAAWGIDYLKLDGCNVFPEHSRTLEEEYKARYAHWHSILKQMHHPLIFSESAPAYFADPANLTSWYEVMDWVPAFGELARHSTDILVYVGEGSAWDSIMVNYRYNTLLARYQRPGYINDPDFLIPDHPGLTLEEKRSQFALWASFSAPLIVSAYIPGLSSEELAILRNEELIRVDQDVLGLQATLASRGLEVDVLTRSLEGGDRLLTVLNRGDGVAVVSVPVEWMGLQRGCPYVVKNLWDGEVQVLEEEIVIRLNSHATQVYRIALPDECSTVIPTGIVFNTASGNCLTDENGERVGFEACRGSETQIWQVSELGYLRPLSRTSHCLTGGSQASVQLCTEQKNQQWAYAITGILKNEHTEMCLTEGTGISQCGFERDSQVFGLPSGVDIKPS

SEQ ID NO: 102 - protein, 537 aa, Aspergillus niger
MNQGTKSILLAATLAAIPWQVYGSIEQSSLLPIPPMGFNNWARFMCDLNETLFTETADAMAANGLRDAGYNRINLDDCWMAYQRSDNGSLQWNTTKFPHGLPWLAQYVKAKGFHFGIYEDSGNMTCGGYPGSYNHEEQDANTFALWGIDYLKLDGCNVYATQGRTLEEEYKQRYGHWHQVLSKMQHPLIFSESAPAYFAGTDNNTDWYTVMDWVPIYGELARHSTDILVYSGAGSAWDSIMNNYNYNTLLARYQRPGYFNDPDFLIPDHPGLTADEKRSHFALWASFSAPLIISAYIPALSKDEIAFLTNEALIAVNQDPLAQQATFASRDNTLDILTRNLANGDRLLTVLNKGNTTVTRDIPVQWLGLTETDCTYTAEDLWDGKTQKISDHIKIELASHATAVFRLGLPQGCSSVVPTGLVFNTASGNCLTAASNSSVAFQSCNGETSQIWQVTLSGVIRPVSQTTQCLAADGNSVKLQACDSTDSDGQNWTYAVTGNLKNAKTDGCLTEGSVQMKSCLYERDGQVFGLPSGVQLS

SEQ ID NO: 103 - protein, 545 aa, Aspergillus niger
MIQGLESIMNQGTKRILLAATLAATPWQVYGSIEQPSLLPTPPMGFNNWARFMCDLNETLFTETADTMAANGLRDAGYNRINLDDCWMAYQRSDNGSLQWNTTKFPHGLPWLAKYVKAKGFHFGIYEDSGNMTCGGYPGSYNHEEQDANTFASWGIDYLKLDGCNVYATQGRTLEEEYKQRYGHWHQVLSKMQHPLIFSESAPAYFAGTDNNTDWYTVMDWVPIYGELARHSTDILVYSGAGSAWDSIMNNYNYNTLLARYQRPGYFNDPDFLIPDHPGLTADEKRSHFALWASFSAPLIISAYIPALSKDEIAFLTNEALIAVNQDPLAQQATLASRDDTLDILTRSLANGDRLLTVLNKGNTTVTRDIPVQWLGLTETDCTYTAEDLWDGKTQKISDHIKIELASHATAVFRLSLPQGCSSVVPTGLVFNTASGNCLTAASNSSVAFQSCNGETSQIWQVTPSGVIRPVSQTTQCLAADGNLVKLQACDSTDSDGQKWTYPVTGNLKNAKTDGCLTEGSVQMKSCLYERDGQVFGLPSGVQLA

SEQ ID NO: 104 - protein, 534 aa, Aspergillus oryzae
MRLITRWIPLANALASTMPVQVVASIENPSLLPTPPMGFNNWARFMCDLNETLFVETTDAMASNGLLEAGYNRINLDDCWMNYDRAENGSLEWNVTKFPRGLPWLGQYVKSKGFNFGIYEDSGNLTCGGYPGSEGYEEIDAEIFAAWGIDYLKLDGCNVYPKEGRTLQEEYKYLYGNWHEILSKMQQPLIFSESAPAYFSMTDNLTDWHTVMDWVPEYGELARHSVDILVYSGEGSAWDSIMTNYKFNTLVARYQRPGYYNDPDFLIADHPGLSLDEKRSQFALWASFSAPLIISAHIPDLSSEDLEYLTNQALIAVDQDPLAQQATLASRDGSLDVLTRNLADGSRLVTILNHGSESIETDISLDILGLSTDCTYKAQDLWGGSTQTIKDAIRIKLNTHATAVYKIDTDEKCSQVIPTGLIFNTASGKCLTGTSSSVGSESCNGSKSQIWQIDASGVIRTLSEQSKCLTADGKAISLQECSENNGQKWSYAITGNLKNADTGYCLTNGGGVSACGFETNSQVFGLPAGVHVAL

SEQ ID NO: 105 - protein, 529 aa, Aspergillus terreus
MKALFAAITMAHALLQTQASLQNPNLLPTPPMGFNNWARFMCDLNETLFVETADAMAANGLLAAGYNWLNLDDCWMTHQRAPNNSLMWNTTKFPRGLPWLGSYVKAKGFRFGIYEDAGNLTCGGYPGSLGHEELDARTFADWGVEYLKLDGCNVFPEGGRTSEQQYEHLYGLWHRILSGMPHPLVFSESAPAYFANEKNLSDWYTVMDWVPRYGELARHSTDILVYAGEGSAWDSIMVNYRYNTLVARYQRPGYYNDPDFLIPDHPGLTMDEKKSHFGLWASFAAPLIISAYIPGLSEEDIGYLTNRDLIAVDQDPLAQQATLASRDDEVDVLTRSLADGSRLVSVLNRGNSSVQRVIPLQWLGLNPGQRYQARNLWDGTEKRIRKDLTVTVRSHATEIYKFTGSNGRVDAVSTGIVFNTASGNCLTGDAAGVGFAPCTGGEKQIWQVRGSELRPLSLLGECLTADGTRLSLRPCAGDEAQMWSYHISGNLKSGHEGGCLTEGHGVASCGWELNSQVFGLPSGVRVSGY

SEQ ID NO: 106 - protein, 532 aa, Neosartorya fischeri
MYTTKSLLSTLIPIMIPLSLGSVSSPNLLPTPPMGFNNWARFMCDLNETLFLETASAMISTGLLEAGYNRLNLDDCWMAYDRAADSSLQWNTTKFPHGIPWLAYRLKTQGFHLGIYQDAGNLTCGGYPGSFGYEALDAQTFAAWGIDYLKLDGCNVFPEHSRTLEEEYKARYAHWHNVLRQMHPPLIFSESAPAYFADPANLTSWYEVMDWVPAFGELARHSTDILVYVGEGSAWDSIMVNYHYNTLLARYQRPGYFNDPDFLIPDHPGLTLEEKRSQFALWASFSAPLIVSAYIPGLSGEELAILRNEELITVDQDVLGLQATLASRGEEVDVLTRSLAHGDQLLTVLNRGDGVPVVRVPVEWMGLQRGCAYVVKNLWDGEVQVLEEEIVIRLNSHATQVYRIALPEECSTVIPTGIVFNTASGNCLTDENGERVGFEACRGSETQVWQVSELGHLHPLSRTSHCLTAGSQASVQLCTGQKNQQWTYEITGNLKNEHTKMCLTEGTGISQCGFERDSQVFGLPSGVDIKSS

SEQ ID NO: 107 - protein, 448 aa, Aspergillus clavatus
MSRFHLPLAAAVVLVSCLWSANALVRPDGVGKLPALGWNSWNAFGCDIDDAKIMTAAKEIVNLGLKDLGYEYINIDDCWSVKSGRDKTTKRIVPDPAKFPDGIAGVADRIHDLGLKVGIYSSAGLTTCAGYPASLGYEEIDAQTFAEWGIDYLKYDNCGVPSNWTDAYTFCVPDPGSASTNGTCPDNENPAPQGYDWSTSLTAQRHQRMRDALLGVEHTIFYSLCEWGQADVSAWGNATGNSWRMSGDITPSWDRIAAIANENSFLLNHVDFWGHSDPDMLEVGNGDLTLAENRAHFALWAAMKSPLIIGTALDGIDPAHLEILLNKYLIAFHQDPVIGRPAYPYKWGYSPDWTFDPAHPAEYWSGPSSTLDGTLVLMLNSEGSRQTRTAVWKEIPELKDALGRKGRRQTGFRVTDVWTGKDLGCVRDHYTVTLESHDVAALLVGKGC

SEQ ID NO: 108 - protein, 426 aa, Neosartorya fumigata
MSRSKTRQGKLPALGWNTWNAFGCDIDATKIMTAANEVVNLGLKDLGYEYINIDDCWSVKSGRDASTQRIIPDPDKFPDGISGVADQIHDLGLKIGIYSSAGLTTCAGYPASLGYEDIDAQTFAEWGIDYLKYDNCGVPSNWTDTYTYCVPDPGSKATNGTCPDNKNPAPAGYDWRTSLTAERYRRMRDALVSVDRTILYSLCEWGQANVNDWGNETGNSWRTTGDITPSWPRIAAIANENSFLMNHVDFWGYPDPDMLEVGNGNLTLAENRAHFALWAAMKSPLIIGTALDSISQDHLAILSNKILLKFHQDPVIGRPAQPYKWGYNPDWTFDPAHPAEYWSGASSVLGGTLVLMLNSEDTTQRRTAVWKEVPELKDVLGRQGKRRIGFRVTDVWTGKDLGCVRDHYSVELESHDVAALVVGRAC

SEQ ID NO: 109 - protein, 442 aa, Aspergillus flavus
MQRYISLSVSLSLLSGANALVRPDGVGRLPALGWNTWNAFGCDIDASKVLTAAEETINLGLKDAGYEYINIDDCWSVKSGRDPNTKRIIPDSAKFPDGISGVASKIHDLGLKVGIYSSAGTETCAGYPASLGYEKIDAESFAEWGIDYLKYDNCGVPTNWTDTYTHCVPDNSNGSKFPNGTCPDISNPAPTAYDWSSSNTAQRYNAMRDALLGVNRTILYSLCEWGQADVNTWGNGTGNSWRTTGDITPDWSRIVEIANENSFLMNYADFWGYPDPDMLEVGNGNLTLEENRAHFALWAAMKSPLIIGTALDSINEEHLAILKNKPLLSFHQDPVIGRPAYPYKWGYNPDWTFDPAHPAEYWSGPSSTLGGTLVLMFNSEDSAKHRTAVWSEIPELKDSAEKGSGYRVTDIWTGEDLGCVKDQYDVELQSHDIAALVVGESC

SEQ ID NO: 110 - protein, 447 aa, Neosartorya fumigata
MTTFFSLTTAAAVLTLARGSNALVRPGNVGKLPALGWNTWNAFGCDIDATKIMTAANEVVNLGLKDLGYEYINIDDCWSVKSGRDASTQRIIPDPDKFPDGISGVADQIHDLGLKIGIYSSAGLTTCAGYPASLGYEDIDAQTFAEWGIDYLKYDNCGVPSNWTDTYTYCVPDPGSKATNGTCPDNKNPAPAGYDWRTSLTAERYRRMRDALVSVDRTILYSLCEWGQANVNDWGNETGNSWRTTGDITPSWPRIAAIANENSFLMNHVDFWGYPDPDMLEVGNGNLTLAENRAHFALWAAMKSPLIIGTALDSISQDHLAILSNKILLKFHQDPVIGRPAQPYKWGYNPDWTFDPAHPAEYWSGASSVLGGTLVLMLNSEDTTQRRTAVWKEVPELKDVLGRQGKRRIGFRVTDVWTGKDLGCVRDHYSVELESHDVAALVVGRAC

SEQ ID NO: 111 - protein, 443 aa, Aspergillus niger
MRWLLTSSALLVPAAALVRPDGVGRTPALGWNSWNAYSCDIDADKIVTAANEVVNLGLKDLGYEYINIDDCWSVKSGRNTTTKRIIPDPDKFPNGISGVADQVHALGLKLGIYSSAGLTTCAGYPASLGYEEIDAQSFAEWGIDYLKYDNCGVPTNLTDQYTYCVPDSTDGSNYPNGTCVNLTDAAPQGYDWATSTTAKRYQRMRDALLSVNRTILYSLCDWGQADVNAWGNATGNSWRMSGDITATWSRIAEIANENSFLMNYANFWGYPDPDMLEVGNGNLTLPENRAHFALWAMMKAPLIIGTPLDSIDTSHLTILSNKPLLTFHQDAVIGRPAYPYKWGYNPDWTFDPEHPAEYWSGPTSSGEVFVLMLNSEGEVKTRSAVWEEVPELKDRGTKKNSKEKKGFKVTDAWTGKDLGCVKDKYEVKLQAHDVAVLVVGGQC

SEQ ID NO: 112 - protein, 443 aa, Aspergillus niger
MRWLLTSSALLVPAAALVRPDGVGLTPALGWNSWNAYSCDIDADKIVTAANEVVNLGLKDLGYEYINIDDCWSVKSGRNTTTKRIIPDPDKFPNGISGVADQVHALGLKLGIYSSAGLTTCAGYPASLGYEEIDAQSFAEWGIDYLKYDNCGVPTNLTDQYTYCVPDSTDGSNYPNGTCVNLTDAAPQGYDWATSTTAKRYQRMRDALLSVNRTILYSLCDWGQADVNAWGNATGNSWRMSGDITATWSRIAEIANENSFLMNYANFWGYPDPDMLEVGNGNLTLPENRAHFALWAMMKAPLIIGTPLDSIDTSHLTILSNKPLLTFHQDAVIGRPAYPYKWGYNPDWTFDPEHPAEYWSGPTSSGEVFVLMLNSEGEVKTRSAVWEEVPELKDRGTKKNSKEKKGFKVTDAWTGKDLGCVKDKYEVKLQAHDVAVLVVGGQC

SEQ ID NO: 113 - protein, 442 aa, Aspergillus oryzae
MQRYISLSVSLSLLSGANALVRPDGVGRLPALGWNTWNAFGCDIDASKVLTAAEETINLGLKDAGYEYINIDDCWSVKSGRDPNTKRIIPDSAKFPDGISGVASKIHDLGLKVGIYSSAGTETCAGYPASLGYEKIDAESFAEWGIDYLKYDNCGVPTNWTDTYTHCVPDNSNGSKFPNGTCPDISNPAPTAYDWSSSNTAQRYNAMRDALLGVNRTILYSLCEWGQADVNTWGNGTGNSWRTTGDITPDWSRIVEIANENSFLMNYADFWGYPDPDMLEVGNGNLTLEENRAHFALWAAMKSPLIIGTALDSINEEHLAILKNKPLLSFHQDPVIGRPAYPYKWGYNPDWTFDPAHPAEYWSGPSSTLGGTLVLMFNSEDSAKHRTAVWSEIPELKDSAEKGSGYRVTEIWTGEDLGCVKDQYDVELQSHDIAALVVGESC

SEQ ID NO: 114 - protein, 455 aa, Emericella nidulans
MIEFLALITLISRANALMRPDGVGRLPALGWSSWNAHECDINATVILTAAAQVVKLGLKDLGYEYINIDDCWSIKTHRDPTTNRMIPDADRFPDGIASVASQIHELGLKVGIYSSAGETTCAGYPASLGYEDIDAETFAEWEIDYLKYDDCGVPDNWKDPYTFCVPDTANNAGPFPNGTCPSLPNPAPANYNWSTSPSAERFRRMLDALNTQDRTILYSLCNWGNAAVNTWGAEIGNSWRMSGDISPGRGEVGPDRTRIAVWERIAEITNEMSFLVREYAEFWGWPDADMLEVGNGEGGMTVAENRAHFALWAAMRSPLLIGTKLDTIRQEHLKILKNPTLLTFHQDPIINRPAYPYKWGYNADYTFDAAHPAEYWSGPSPALEGTLVVMLNSENVTSTRMAVWSEVPELQNQDQGDAFEVMDGWTGEDLGCIKEKYEVELDAHDAAVLVVGNAC

SEQ ID NO: 115 - protein, 447 aa, Neosartorya fischeri
MTTFLSLTTAAAVLTLARGSNALVRPGNVGKLPALGWNSWNAFGCDIDAAKIMTAANEVVNLGLKDLGYEYINIDDCWSVKSGRDASTQRMVPDPEKFPDGISGLADQIHDLGLKVGIYSSAGLTTCAGYPASLGYEDIDAQTFAEWGIDYLKYDNCGVPSNWTDAYTYCVPDPGSKSTNGTCPDNKNPAPAGYDWRTSLTAERYRRMRDALVSVDRTILYSLCNWGQADVNDWGNETGNSWRTTGDITPSWPRIAAIANENSFLMNYVDFWGYPDPDMLEVGNGNLTLAENRAHFALWAAMKSPLIIGTALDSISQDHLAILSNKILLKFHQDPVVGRPAHPYKWGYNPDWTFDPAHPAEYWSGASSVLGGTLVLMLNSEDTKQRRTAVWKEIPELKDVLGRQGKRRTGFRVTDVWTGKDLGCVRDHYSVELESHDVAALVVGRAC

SEQ ID NO: 116 - protein, 751 aa, Aspergillus flavus
MFGSPKRAALAAASLLAIFGNGPSVMAQETSSNNAVVADGKTFALNGENVSYRFRVNETTGDLVSDHFGGSITGDLFPGFGAEALGGWVGLAGRFRREFPDHGRGDFRIPAVRIRQEAGYTVTDLQYQSYSVIPGKPALPGLPSTFGSEEDVTTLVVHLYDNYSSIAVDLSYSIFPKYDAIVRSANVTNKGTQNITVEALSSFSFDFPYEDLEMISLRGDWAREAHRQRRKVEYGLQGFGSSTGFSSHLHNPFLAIVHPSTTESQGEAWGFNLVYTGSFSVDVEKGSQGLTRALLGFNPSQLSWQLGAGETLTSPECVSVYSSDGIGGMSRSFHRLYRNHLIKSKFATSDRPPLLNSWEGLYFDYNESTIYRLAEESAALGVKLFVMDDGWFGDKYPRVSDNAGLGDWVPNPDRFPDGLTPLVEDVTKLKAGNSSTDLRFGLWVEPEMANPNSTLYHEHPDWVLHAGQYPRTLQRNQLVLNLALPEVQDYIIDEITNILNSSAISYVKWDFNRAMHETPSPSNDHEYILGMYRVFDTLTTRFPDVLWEGCASGGGRFDPGVLEYFPQIWTSDNTDALMRITIQLGTSLAYPPSAMGAHLSAVPNAQTGRTIPVKFRGHVAMMGGSFGLELDPAELQEDEKAEVPGLIALAEKVNPIILTGDMWRLRLPEESNWPAVLFISEDGNQAVLFYFQLGPNVNHATPWLRLQGLDPKATYSVDGNGSYSGATLMNMGLQYKFESDYDSKVVFLQKQ

SEQ ID NO: 117 - protein, 751 aa, Aspergillus oryzae
MFGSPKRAALAAASLLAVFGNGPSVMAQETSSNNAVVADGKTFALNGENVSYRFRVNETTGDLVSDHFGGSITGNLFPGFGAEALGGWVGLAGRFRREFPDHGRGDFRIPAVRIRQEAGYTVTDLQYQSYSVIPGKPALPGLPSTFGSEEDVTTLVVHLYDNYSSIAVDLSYSIFPKYDAIVRSANVTNKGTQNITVEALSSFSFDFPYEDLEMISLRGDWAREAHRQRRKVEYGLQGFGSSTGFSSHLHNPFLAIVHPSTTESQGEAWGFNLVYTGSFSVDVEKGSQGLTRALLGFNPSQLSWQLGAGETLTSPECVSVYSSDGIGGMSRSFHRLYRNHLIKSKFATSDRPPLLNSWEGLYFDYNESTIYRLAEESAALGVKLFVMDDGWFGDKYPRVSDNAGLGDWVPNPDRFPDGLTPLVEDVTKLKAGNSSTDLRFGLWVEPEMANPNSTLYHEHPDWVLHAGQYPRTLQRNQLVLNLALPEVQDYIIDEITNILNSSAISYVKWDFNRAMHETPSPSNDHEYILGMYRVFDTLTTRFPDVLWEGCASGGGRFDPGVLEYFPQIWTSDNTDALMRITIQLGTSLAYPPSAMGAHLSAVPNAQTGRTIPVKFRGHVAMMGGSFGLELDPAELQEDEKAEVPGLIALAEKVNPIILTGDMWRLRLPEESNWPAVLFISEDGNQAVLFYFQLGPNVNHATPWLRLQGLDPKATYSVDGNGSYSGATLMNMGLQYKFESDYDSKVVFLQKQ

SEQ ID NO: 118 - protein, 747 aa, Aspergillus terreus
MVAFMNSATFVAGLFTLWSRPIWATPASNTNAVVVNGTAFTLNGDHVSYRFHVDDATGDLFSDHFGPRVSGNFPTEIVSQVNGWVNTIGRVRREFPDQGRGDFRIPAIRIRQTAGYTVSELLYRSHTVIPGKPALPGLPATFGSEEDVTTLVVHLYDEISEVAADLSYSIFPKYDAVVRSVNVTNQGAGNITIETLASLSVDFPYEDLDMVYLRGDWAREAHSERRKVEYGTQGFDSSAGYSSHLHNPFLAIMNPATTESQGETWGFSLVYSGSFAVNVERGSQGFTRALLGLNPGQLSWVLRPGESLVSPECVAVYSADGIGGMSRLLHRLYRNHLIKSKFAVSDRPVLLNSWEGLGFNYNETTVYQLATEAAELGVKLFVLDDGWFGDKYPRTADNAGLGDWVPNPDRFPHGLPHEVDRITALHPGNDTSTNLRFGLWFEPEMVNPNSSLYHQHPDWALHAGSYPRTLTRNQLVLNMALPEVQDYVIKSVSDILDSADISYVKWDNNRGIHETPSPSTDHQYMLGMYRVFDNLTTKYPNVLWEGCASGGGRFDPGVLQYFPQIWTSDDTDALERITIQMGTSLAYPPSAMGAHLSAVPNQQTGRTLPITFRAHVAMMGGSFGLELNPAHMPDDERDAVPGLIALAERVNPIVLTGDMYRLSPHDSQWPAVLFISPDGEQAVLFYFQTSPRVDNSIPRVKMQGLDPQAVYSVDGDAEYSGATLMNVGLQFPFDSDVGSKVVFFQRL

SEQ ID NO: 119 - protein, 750 aa, Emericella nidulans
MFRSTATVAAATAMGLLTATGHGSLAIAQGTTGSNAVVVDGTNFALNGASMSYVFHANSTTGDLVSDHFGATISGAIPAPKEPAVNGWVGMPGRIRREFPDQGRGDFRIPAVRIRQTAGYTVSDLQYQGHEVVDGKPALPGLPATFGEAGDVTTLVVHLYDNYSAVAADLSYSVFPEFDAVVRSVNVTNKGKGNITIENLASLSVDFPLEDLDLVSLRGDWAREANRERRRVEYGIQGFGSSTGYSSHLHNPFFALVHPSTTESQGEAWGFNLVYTGSFSAQVEKGSQGLTRALIGFNPDQLSWNLGPGETLTSPECVSVYSKDGIGGMSRKFHRLYRKHLIRSKFATSDRPPLLNSWEGVYFDFNQSSIETLAEQSAALGIRLFVMDDGWFGDKYPRTSDNAGLGDWTPNPDRFPNGLEPVVEEITNLTVNDTSAEKLRFGIWVEPEMVNPNSSLYREHPDWALHAGAYARTERRNQLVLNLALPEVQEYIIDFMTDLLNSADISYIKWDNNRGIHEAPSPSTDHEYMLGVYRVFDTLTARFPDVLWEGCASGGGRFDAGVLHYFPQIWTSDNTDGVDRVTIQFGTSLAYPPSAMGAHLSAVPNHQTGRTVPLEFRAHVAMMGGSFGLELDPATLQDDPDVPELIQMAEKVNPLVLNGDLYRLRLPEESQWPAALFVAEDGSQAVLFYFQLSPNVNHAAPWVRLQGLDPEASYTVDGDKTYTGATLMNLGLQYTFDTEYGSKVVFLERQ

SEQ ID NO: 120 - protein, 648 aa, Neosartorya fumigata
MEFIVSLLLLSPALVAGSLHSRIDNGLARTPQMGWNSYNYYSCSPNEAIIRSNAKALVDLGLAELGYRYVTTDCGWSVADRLPNGTLTWNETLFPSGFPAMGEYLHELGLLFGVYGDSGTKLCGSPPDQVGSLYHEEQDAKTFAEWGADSLKYDNCYSDAATNYPNVNYEPSTSPRPRYEIMSSALARVGRPILFQICEWGIDFPALWAPALGNSWRIGNDIIPAWRSIFRTLNQAVPNTDFAGPGQWADLDMLYVGNGVFSLPEEQTHFSLWAILKSPLTIGAALKDDDTSISQASLEVLKQKDVIGFNQDALGVSASLKRRWSDEGYEVWSGPLSGNRTVVAVINWRNESRDLTLDLPDVGLQYAQVARNIWGKTVVRDVRTSYTAGVAGHGTILLELQGTLPSGLYPAKIFAKSTGQRSTFESIYAATTSANYELAITFSRPSTETVTITTSSGQTVSISGKSGRIALTAGSNTITIQHKTPIESIQITPPTGTYYANTVFNVTGSAKHTTCGSGCSPVGSKIGYLSPTSNAYTSISTTTAGSKYLAIDYINNEVAFSSSWGWGSNSRNLTVSVNDGAPVRLEVPLSGRHSELYSPGKGWWDTATLGVLTSGWKKGENKVVFGNEGGEDGFQTYAADFVGVRVLD

SEQ ID NO: 121 - protein, 655 aa, Aspergillus flavus
MLPKIFYLSLLPAALGHPHLQPRLDNGLARTPQMGWNTYNHYSCSPNETIVRSNAQALVDLGLASLGYRYVTTDCGWTVADRLSDGSLTWNETLFPEGFPALGKYLHDLDLLFGVYQDSGIKLCGSPPDNVGNYEDQDARTFASWEVDSLKYDNCYSDAATGYPNVNYEPSTSPQPRFANMSRALAAQNRSMVFQVCEWGIDFPARWAPALGHSWRIGNDIIPHWRAIYRTLNQAVPQTSFAGPGQWPDLDMLFVGNDILSIPEEQTHFSLWAILKSPLTIGAALKDDETSINDESLQILKQADIIGYNQDSLGVSASLRRRWTEEGYEVWSGPLSGGRTVAALINWRNESRDLTLDLPDIGLQYAGTVKNIWDGTTAQNVKTSYTAKVQGHGTILLELQDTTASGQYPGDTFATSTGSSTTFESIYGVTTSFRYNITVKLSEASSSSDVKIQSTASNKTITAQVSASGTEASAQIPLLAGSSNSITIVSPQSVDAITITPPNGTYFPNTAFTTIGDADTVSCGAGYCQPVGSKIGNISTNGTARAVIPATAGTKYLAIDYINNDVAFDSAWDWGSNSRNLTVSVNGNKPVRIEVPLSGQHSELFGPGKGWWDTATIGVLTEGWKDGDNDVVIGNEGGESGFTSYGPDFVGLRVL

SEQ ID NO: 122 - protein, 648 aa, Neosartorya fumigata; identical to SEQ ID NO: 120

SEQ ID NO: 123 - protein, 660 aa, Aspergillus niger
MLLHFILYAALSSVVTSVSLQPRLQDGLALTPQMGWNTYNHYSCSPNETIVQSNAQALVDLGLSSLGYRYVTTDCGWTVADRLPDGSLTWNDTLFPQGFPAMGDFLHDLGLLFGVYQDSGILLCGSPPNETGSLYHEEQDARTFASWNVDSLKYDNCYSDAATGYPNVNYAPSTSPEPRFANMSHALLQQNRTILFQICEWGISFPANWAPALGHSWRIGNDIIPDWRTIFRIINQAAPQTDVAGPGQWPDLDMLEVGNNIFSLPEEQTHFSLWAILKSPLIIGAALKDELTAINDASLAVLKQKDVIAFNQDALGKSASLRRRWTEEGYEVWSGPLSNGRTVAAVINWHNESKDLTLDLPDVGLQHAGTVKNIWDGTTARDVLTSYTATVAGHGTMLLELQNTTAVGVYPRGVFGVSSGQTTTFQNIYAVTTSAKYIISVYFSQPASSTETITIGSNANQSMISAQVPASSTLVSAEIPLTAGSSNTITINTSIPIDAIHVTPPNGTYYPCTNFTLAGSTTLTTCGSGYCQPVGSKVGYISPSGTAKATISATTSGSKYLEIDWINNDIAFDSSWGWGSNSRNLTVTVNSEDPVRIEVPLSGRHSELFGPGLGWWDTSTLGLLTSGWKEGLNEVVVGNVGGDEGFQSYGADFVGIRVLD

SEQ ID NO: 124 - protein, 657 aa, Aspergillus oryzae
MLPKIFYLSLLPAALGHPHLQPRLDNGLARTPQMGWNTYNHYSCSPNETIVRSNAQALVDLGLASLGYRYVTTDCGWTVADRLSDGSLTWNETLFPKGFPALGKYLHDLDLLFGVYQDSGIKLCGSPPDNVGSLYHEDQDARTFASWEVDSLKYDNCYSDAATGYPNVNYEPSTSPQPRFANMSRALAAQNRSMVFQVCEWGIDFPARWAPALGHSWRIGNDIIPHWRAIYRTLNQAVPQTSFAGPGQWPDLDMLFVGNDILSIPEEQTHFSLWAILKSPLTIGAALKDDNTSINDESLQILKQEEVIGYNQDSLGVSASLRRRWTEEGYEVWSGPLSGGRTVAALINWKDEARELTLDLPDIGLQFAGTVKNIWDGTTAQNVKTSYTAKVQSHGTILLELQDTTASGQYPTDTFATSTDSSTTFESIYGVTTSFRYNITVKLSEASSSGDVNIQSTASNKTITAQVSASGTEASAQIPLLAGSSNSITIVSPQSVDAITITPPNGTYFPNTAFTTTGDADTVSCGAGYCQPVGSKIGNISTNGTARAVIPATAGTKYLAIDYINNDVAFDSAWDWGSNSRNLTVSVNGNKPVRIEVPLSGQHSELFGPGKGWWDTATIGVLTEGWKDGDNDVVIGNEGGESGFTSYGPDFVGLRVL

SEQ ID NO: 125 - protein, 655 aa, Aspergillus terreus
MASVIALSLLLPAAFAADHSPLRARLQDGLARTPQMGWNTYNHYNCYPDEEIFRSNAKALVDFGLADLGYRYATIDCGWTLTERLANGSLTWNATRFPSGFPAIADYLHDLGLLFGVYGDAGIKLCGPSDEHEEQDAQTFAAWGADSLKYDNCFSEASLGYPNVEYAPSSPLKPRYEVMSNALQKLDRPILFQICEWGIDFPALWAPALGHSWRIGNDIIPAWRSVFRTLNQAVPQTDFAGPGQWPDLDMLMVGNGVYSVPEEETHFSLWAILKSPLIIGSALKDATTEINSESLRILKQKAVIGYNQDKLGVSASLRRRWTDQGYEVWSGPLSNGRTVAAVINWRGEARDLTLDLPDIGLQSAGLVKNIWAGSTSRNVQTSYTARVEGHGTMLLELRDTVPAGVYPKKIFGSSRGQGTVFKSVYAGSTSENYTLAINFAKTIPSASKITVQVGANRQKLSIAVPPSRQQVTATIPLVAGSNNTITISHSHPITAIQVTSPNGTYYPATQFSLTGAARHETCGEGFCQPVGSKVSYLSPNSTARGVIPASAGTKYVEIDYINNEVAFSSSWGWGANSRNLTISLNGGEPVRLEVPLSGRHSELFGPGKGWWDTATLGVSVDGWKEGDNEVVVGNVNGEKGFQPYAADFVGLRVFD

SEQ ID NO: 126 - protein, 659 aa, Emericella nidulans
MRALVPMVVAATALASPAPALKPRLDDGLARTPQMGWNTYNQYNCFPNESIVHENAQALVDTGLADLGYRYVTIDCGWGVEDRLPNGTITWNPELFPQGFPAMGQYLHDLGLLFGVYGDSGILLCGSPPNITGSLYYEDIDARTFAEWGADSLKYDNCYSDAATNYPNVNYAPSTSPHPRFANMSRYIQAQDRDILFQVCEWGIDFPALWAPEIGHSWRIGNDIIPHWRSIFRTLNQAVPQTDFAGPGQWPDLDMLLVGLDGVLTVPEEQTHFSLWSILKSPLTIGAAIPGMRAESLEILSNADVIAFNQDALGVSAALRRRWSDEGYEVWSGPLEGGRTIAAVINWRDEDREITLDLPDIGLQYAETLQNVWADETVNGVKTSYSSVVEAHGVMLVQLAETVEEGVYPADVFAATNRDVTTFSDVYAITSSPNFVLNITLTEVTAAATNITIITDSSRRPISTSIPAGSSSISTSVSLIAGSNNTITIRNAPPLSSITLSPPEPTYYTGAQDFTLTSPAGAYTCPDAYCLPAGSKIVDLSTESAATAHINSSTSGSKYLEIDYINNEVAFDSSWGWGANSRNLTIKVNDNNPVRLEVPLSGRHSELFGPGLGWWDSGRLGVLTDGWIKGTNELVLSNEGGEGGFTKYAPDVVGIAVYD

SEQ ID NO: 127 - protein, 648 aa, Neosartorya fischeri
MESIVWLLLLSPALVAGSLHPRIDNGLAKTPQMGWNSYNYYSCSPNEAIVRSNAKALVDLGLADLGYRYVTTDCGWSVADRLPNGTLTWNETLFPSGFPAMGKYLHELGLLFGVYGDSGTKLCGSPPDQVGSLYHEEQDAKTFAEWGADSLKYDNCYSDAATNYPNVNYEPSTSPRPRYEIMSSALARVGRPILFQICEWGIDFPALWAPALGSSWRIGNDIIPEWRSIFRTLNQAVPNTDFAGPGQWADLDMLYVGNGVFSLPEEQTHFSLWAILKSPLTIGAALKDDDTSINQASLEVLKQKDVIGFNQDALGVSASLKRRWSDEGYEVWSGPLSGNRTVVAVINWRDESRDLTLDLPDVGLQYAQVARNIWGKTVVRDVRTSYTAGVAGHGTMLLELQGTIPSGLYPAKIFAKSTDQKTTFESIYAATTSANYELAITFSRPSTETVTITTSSGQTISISGKSGRIALTAGSNTITIQHKTPIESIQITPPTGTYYANTVFNVTGSAKHTTCGSGCSPVGSKIGDLSPNSNAYTSIPATTVGSKYLAIDYINNEVAFSSSWGWGSNSRNLTVSVNDGAPVRLEVPLSGRHSELFSPGKGWWDTATLGVLTSGWKKGENKVVFGNQGGEDGFQTYAADFVGVRILD

SEQ ID NO: 128 - protein, 725 aa, Aspergillus terreus
MTIENGIAKAIYVDGTKFVLNGRHVSYCFHVDDETGDLRTDHFGGRVTGAIPVDPSPVVDGWTGMPDRVRREFPDQGRGDFRIPALRIRQAEGHTVSALKYQSYTLLHGKPDLPGLPATFGTEKDVSTLVVHLRDEYSSVTADLIYSVFPEYNAIVRSVSITNNGFQPISIEALASFSTDLPYEDLEMISLRGDWAREAHRMRRKVEYGTQGFGSTTGFSSHLHNPFLALAHPSTTESQGEAWGFSLVYTGSFEVNVEKGSQGLTRAVLGFHPNQLSWPLSPGETLTSPECVAVYSNHGLGGMSRSLHRLFRDHLIKSKFATANRPVLLNSWEGLYFDIDETSMIRIAKESAALGVKLLVMDDGWFGKDYPRTSDAAGLGDWVPNPARFPNGLAPMVDQITSLKVANSSANLLFGIWVEPEMVNPDSALYREHPEWALHAGSYPRTEQRNQLVLNLALLEVQEFIINFMTDLLSSAKISYVKWDLNRGINETSAPKATHAYMLGMYKVFDTLTSRFPDVLWEGCAAGGGRFDPGILQYFPQIWTSDDSDAVERIFIQMGSSLAYPASAMGAHISAVPNHQTGRTTPLSLRAHVAMMGGSFGLELDPSQVSAEEKALIPELIALAEKVNPIVLTGDMWRLSLPEESNWPAVQFISQDQSQVVLFYFQLSPNVNHSMPRVRLQGLDEDAMYRVDGAGPYSGAMLMNLGLQYSFRTEYGSRVVFLEKQ

SEQ ID NO: 129 - protein, 726 aa, Emericella nidulans
MTNSKARYVLEPVQVTGTTFALNGTTLSYQFHVDEPSADLRSDHFGGSISGPIPVDPEPIVDGWTGMPDRVRREFPDQGRGDFRVPAFRIRQAEGHTVSAFRYREHEIVPGKEVSASGLPGVFGDAHDATTLIVRLVDPYSDLAAELKYTVFPKYDTVVRSASITNKSNSDVTIESLASLSVDFPFDELEMIGLRGDWAREAHRLRRKVDYGVQSFGSTTGFSSHLHNPFVALVHPSTTESQGEAWGFSLIYSGSFTINVEKSSQGLTRVSIGPSQLSWTLKPGETFDSPECVAVYSSTGIGGMSRSLHGLYRKHLMKSKFATEDRPVLLNSWEGLYFHIDQDRMYRLAQEAAALGVKLLVMDDGWFGDEHPRTSDDAGLGDWIPNPARFPDGLTPLVNRITALKVANSQRNMRFGIWVEPEMVNPRSTLYQQHPDWVLHAGNYPRTEQRNQLVLNMSLPEVQEFIISAMSEILNAADITYVKWDHNRGLAETPSPCANHAYMLGAYRVFDVLTTRFPNVIWEGCASGGGRFDPGILQYFPQVWTSDDSDAVERIFIQFGTSLAYPASAMGGHISSVPNHQTGRTTPLTFRAHVAMMCGSFGLELDPAHLTDSERRDIPGLIALAEKISPIVVKGDLWRLALPEDSNWPAALFLSENRTQGVLFFFQLAPMVNHSLPRVRLQGLEDGALYRVDGEGPYSGSMLMNLGLQYSFRGDYGSRLAFIERE

SEQ ID NO: 130 - protein, 887 aa, Aspergillus clavatus
MLRSLLLLAPMVGAAVAATEPNSPACPGYRATNVREGHNSLTADLTLAGKPCNTYGTDLKNLKLLVEYQTDERLHVKIYDANEQVYQVPESVVPRVDGKGGSRKKSVLKFNFKANPFSFQVKRGREVLFDTSGSNLVFQDQYLNLRTSLPRDPNLYGLGEHTDPLRLTTTNYTRTLWNRDSYGIPENSNLYGSHPVYYDHRGEDGTHGVFLLNSNGMDIKIDKTKDGKQFLEYNALGGIFDFYFFNGDTPKDASIEYAKVAGLPAMQSYWSFGFHQCRYGYRDAFEVAEVVQNYTQAKIPLETMWTDIDYMDRRRVFTLDPDRFPLEKVRELVSYLHKHDQKYIVMVDPAVSVSDNKGFNDGMEQGVFMKHQNGSLYKGAVWPGVTAYPDWFHPDIQKYWDGQFNDFFSPEKGVDIDGLWIDMNEAANFCTYPCLDPEGYSIENNLPPAAPPVRPNPRPLPGFPDDFQPPAASKRSVAKGSKVGLPGRDLLNPRYQIRNDAGLISSKTINTDLIHAGEGYAEYDTHNLYGTMMSSASRQSMAQRRPAVRPLIITRSTFAGAGTHVGHWLGDNLADWKHYRISIAQMLSFASMFQVPMVGSDICGFGGDTNEELCARWARLGAFYPFFRNHNEITSIPQEFYRWESVAESARKAIEVRYKLLDYVYTAFHRQTQTGEPFLQPMFYMYPEDKNTFSNDMQFFYGDSILVSPVHDVSQTSVEAYFPKDIFYDWNTGDVLRGRGAKVTLSNISVTDIPIHIRGGSIVPIRSESAMTTVELRKKGFELLIAPGQDGTASGTLYLDDGDSLKQSASLELEFKYRKGNLQIKGKFGMHTDLKINAITLLGQTSVPRQVTLSRAGKADSKFDPARQSVTIKTDLSLNESSEIDIN

SEQ ID NO: 131 - protein, 881 aa, Neosartorya fumigata
MLRSLLLLAPLVGAAVIGARDHSQECPGYKATNIREGRDSLTADLTLAGKPCNTYGTDLKNLKLLVEYQTDKRLHVKIYDADEEVYQVPESVLPRVDGKGGSSKKSALKFDYQANPFSFKVKRGGEVLFDTSGSNLIFQSQYLSLRTWLPEDPNLYGLGEHTDSLRLETTNYTRTLWNRDAYAIPEKTNLYGTHPVYYDHRGQHGTHGVFLLNSNGMDIKIDKTKDGKQYLEYNTLGGVFDFYFFTGATPKDASIEYAKVVGLPAMQSYWTFGFHQCRYGYRDVFEVAEVVYNYSQAKIPLETMWTDIDYMDRRRVFTLDPERFPLEKMRELVSYLHNHNQHYIVMVDPAVSVSDNVGYNDGMEQGIFLQTQNGSLYKGAVWPGVTAYPDWFHPDIQKYWNDQFAKFFDPKTGVDIDGLWIDMNEAANFCPYPCSDPEGYARDNDLPPAAPPVRPSNPRPLPGFPGDFQPSSSSKRSTKGSKVGLPNRDLINPPYMIRNEAGSLSNKTINTDIIHAGEGYAEYDTHNLYGTMMSSASRNAMQHRRPGVRPLVITRSTYAGAGAHVGHWLGDNISEWSKYRISISQMLAFASMFQVPMIGSDVCGFGGNTTEELCARWARLGAFYTFFRNHNEITGIPQEFYRWPTVAESARKAIDIRYRLLDYIYTAFHRQTQTGEPFLQPMFYLYPKDKNTFSNQLQFFYGDAILVSPVTDGSQTSVDAYFPDDIFYDWHTGAALRGRGANVTLSNIDVTEIPIHIRGGSIIPVRSESAMTTTELRKKGFELIIAPGLDGTASGSLYLDDGDSIEPRATLELEFTYRKGHLQVKGKFGFRTEVKINAVTLLGQSAPASKSADVASLDSGRQAVTIKTSLDLTGPSEIDLS

SEQ ID NO: 132 - protein, 877 aa, Aspergillus flavus
MLGSLLLLAPLAGAAVIGSRADTKQCPGYKASNVQENDRSLTADLTLAGKPCNTYGTDLQNLKLLVEYQTDERLHVKIYDAEERVYQVPEKVTPRVDSGDGSSKDSALKFEYEEEPFSFTVKRDDEVLFDSSAENLIFQSQYLKLRTWLPENPYLYGLGEHTDPLRLSTTNYTRTFWNRDAYGTPANSNLYGTHPVYYDHRGESGTHGVFLLNSNGMDVFIDKTADGKQYLEYNALGGIFDFYFFTGSNPKEASIEYSKIVGLPAMQSYWTFGLHQCRYGYRDVYQVAEVVYNYTKAGIPLETMWTDIDYMDRRRVFSLDPDRFPLEKMRELVGYLHDHDQHYIVMVDPAVSVSDNGAFNRGLEQDVFLKTQNGSLYKGAVWPGVTAYPDWFHPDIQDYWNSEFSTFFNAETGVDIDGLWIDMNEASNFCPDPCTDPERYSSENNLPPAPPPVRSSSPRPLPGFPADFQPSSASRSQKRIVKAKVGLEGRDLLNPPYKIRNEAGSLSNKTINTGIVHAGEGYAEYDTHNLYGTMMSSSSREAMQYRRPEVRPLVITRSTYAGAGRDVGHWLGDNFSKWEHYRISIAEGLAFASMFQVPMVGADVCGFAGNTTEELCARWASLGAFFTFYRNHNEIGNIGQEFYVWPTVAESARKAIDIRYRLLDYIYTSFYKQSQTGEPFLQPVFYLYPEDENTFSIDLQFFYGDAILVSPVPDKGLTSVDAYFPDDIFYDWYTGTPVRGHGANITLSNIDITHIPLHIRGGSIIPIRSSSAMTTTELREKSFQLIIAPGLDGTASGSLYLDDGDSLEQKATLEVEFEYRKGVLHIDGKFELHASLVESVTLLGQGKGGSRARREDGTKKTIQTNLELSKPTEIKLE

SEQ ID NO: 133 - protein, 881 aa, Neosartorya fumigata; identical to SEQ ID NO: 131

SEQ ID NO: 134 - protein, 877 aa, Aspergillus oryzae
MLGSLLLLAPLAGAAVIGSRADTQQCPGYKASNVQENDRSLTADLTLAGKPCNTYGTDLHNLKLLVEYQTDERLHVKIYDAEERVYQVPEKVTPRVDSGDGSSKDSALKFEYEEEPFSFTVKRDDEVLFDSSAENLIFQSQYLKLRTWLPENPYLYGLGEHTDPLRLSTTNYTRTFWNRDAYGTSANSNLYGTHPVYYDHRGESGTHGVFLLNSNGMDVFIDKTADGKQYLEYNALGGIFDFYFFTGSNPKEASIEYSKIVGLPAMQSYWTFGLHQCRYGYRDVYQVAEVVYNYTKAGIPLETMWTDIDYMDRRRVFSLDPDRFPLEKMRELVGYLHDHDQHYIVMVDPAVSVSDNGAFNRGLEQDVFLKTQNGSLYKGAVWPGVTAYPDWFHPDIQDYWNSEFSTFFNAETGVDIDGLWIDMNEASNFCPDPCTDPERYSSENNLPPAPPPVRSSSPRPLPGFPADFQPSSASRSQKRIVKAKVGLEGRDLLNPPYKIRNEAGSLSNKTINTGIVHAGEGYAEYDTHNLYGTMMSSSSREAMQYRRPEVRPLVITRSTYAGAGRDVGHWLGDNFSKWEHYRISIAEGLAFASMFQVPMVGADVCGFAGNTTEELCARWASLGAFFTFYRNHNEIGNIGQEFYVWPTVAESARKAIDIRYRLLDYIYTSFYKQSQTGEPFLQPVFYLYPEDENTFSIDLQFFYGDAILVSPVPDKGLTSVDAYFPDDIFYDWYTGTPVRGHGANITLSNIDITHIPLHIRGGSIIPIRSSSAMTTTELREKSFQLIIAPGLDGTASGSLYLDDGDSLEQKATLEVEFEYRKGVLHIDGKFELHASLVESVTLLGQGKGGSRARREDGTKKTIQTNLELSKPTEIKLE

SEQ ID NO: 135 - protein, 879 aa, Aspergillus terreus
MLGSLLLLAPLAGAAVIGSRSNNTEPCPGYKVSNVREGVNSLTADLSLAGKPCNTYGTDLKDLKLLVEYQTERPDERLHVMIYDANEQVYQVPESVVPRVEGRKGARPHSALKFTYEEEPFSFTVTRDDEVLFDTSASNLIFQSQYLNLRTWLPEDPYLYGLGEHTDSLRLPTTNYTRTIWNRDSYGVPQNSNLYGAHPVYYDHRGESGTHGVFLLNSNGMDIRIDKTEDGQQYLEYNTLGGVFDFYFFTGSTPKETSMEYSKIVGLPAMQSYWSFGLHQCRYGYRDVYQVAEVVYNYSKAGIPLETMWTDIDYMNARKVFTLDPERFPLPKMRELVDYLHKHDQKYIVMVDPAVSAVDNEAYEHGVDQGIFLQQQNGSLYKGAVWPGVTVYPDWFHPDIQEYWNSEFSAFFSADDGVDIDGLWIDMNEAANFCTWPCADPEQYAIDNDLPPAPPAVRPSNPRPLPGFPDSFQPSSSKRAVKRAGGSKGAKVGLPGRNLVDPPYKIQNAAGSISNKTINTDIIHAGEGYAEYDTHNLYGTMMSSASRGAMLNRRPDVRPLIITRSTFAGAGSHVGHWLGDNLSQWDQYRISISQIVAFASMFQVPMVGADVCGFGGNTTEELCARWAALGAFYTFYRNHNEIGSTSQEFYQWPTVADSARKAIEIRYKLLDYIYTAFHKQTETGEPFLQPMFYLYPEDENTFANDVQFFYGDALLVSPVLTEGSTSVDAYFPDDIFYDWYTGAPVRGHGAKKTLENIDVTHIPLHVRGGNIIPVRSSGAMTTKELRNKSFELIIAPGLDGTASGSLYLDDGDSLEQKGTAEIKFEYRRGKLSVKGSFGRSAAGVKVQAVKVLGQKAESRMSAFRSTEFELTRPMEISLQ

SEQ ID NO: 136 - protein, 894 aa, Emericella nidulans
MAGTLLSWTPLALALMARALSQLPLTDCPGYRVINVEERPRGLTADLTLAGTPCNVYGVDIENLRLETDYDTNQRLHVKIYDADENVYQVPDSVFPRPVVNDQACADENTPELRFSYAEDPFSFAVSRASNDETLFNTTGHNLIFQSQYVNLRTSLPQNPNLYGLGEHSDPLRLNTINYTRTLWNRDAYTIPAGTNLYGAHPMYIDHRGEAGTHGVFLLNSNGMDIKIDKNSDNIQFLEYNILGGVLDFYFFAGPSPKDVSVQYAEVAGLPAMVPYWGLGFHQCRYGYRDIFEVAAVVHNYSEARIPLETMWTDIDYMDHRKVFTLDRERFPLDTVRALVQYLHQRDQHYIVMVDPAVAHSENGAFTRGLEKDVFMRKQDGTLYQGAVWPGATVFPDWFHPNTSDYWINEFALFFNAESGVDIDALWIDMNEAANFCDWPCTDPVAYAEENNLPPEPPAVRPNPSSLPGFPAEFQPVNSNNNNSSRKRETQVVIAARQGFVKVGNDNGNGRRLGLQGRELIDPPYKIANAAGSLSNKTMNTDIFHANGLAEYDTHNLYGTMMSSLSRDAMLYRRPEKRPLVITRSTFAGAGSYVGHWLGDNASTWTKYRISIAQMLAFASIFQIPMVGSDACGFTGNTTEELCSRWATLAAFNPFFRNHNEYGMVSQEFYRWNSVAEAARKAISIRYSLLDYLYTEFHEQTVTGEPFLLPLFFVYPNDPNVVGIDSQFFYGDAILVSPVIEEGKTEVHAYFPGDLFYDWYTGLPLRGNGEVITLTDIGYTDIPLHVRGGKIVPVRTGSAGMNTTTEVRKSGFRLVIAPGLDGRAAGRLYIDDGESLEQTAMVDVVFTYEDGRVSVDGVFTLQTDLRVEAVTVFGDNVVERTIDLPLSGPGGVEL

SEQ ID NO: 137 - protein, 881 aa, Neosartorya fischeri
MLRSLLLLAPLVGAAVLGVRDNSQECPGYKATNIREGRNSLTADLTLAGTPCNTYGTDLKNLKLLVEYQTDKRLHVKIYDADEEVYQVPESVLPRVDGKGGSGKKSALKFDYQANPFSFKVKRGGEVLFDTSGSNLIFQSQYLNLRTWLPEDPNLYGLGEHTDSLRLETTNYTRTLWNRDAYAIPEKTNLYGTHPVYYDHRGQDGTHGVFLLNSNGMDIKIDKTEDGKQYLEYNTLGGVFDFYFFTGATPKDASIEYAKVVGLPAMQSYWTFGFHQCRYGYRDVFEVAEVVYNYTQAKIPLETMWTDIDYMDRRRVFTLDPERFPLEKLRELVTYLHNHNQRYIVMVDPAVSVSDNVGYNDGMEQGIFLQTQNGSLYKGAVWPGVTAYPDWFHPDIQKYWNDQFAKFFDRKTGVDIDGLWIDMNEAANFCPYPCSDPEGYSRDNDLPPAAPPVRPSNPRPLPGFPGDFQPSSSSKRSTKGSKVGLPNRDLINPPYMIRNEAGSLSNKTINTDIIHAGEGYAEYDTHNLYGTMMSSASRNAMQHRRPEVRPLVITRSTYAGAGAHVGHWLGDNISEWSKYRVSIAQMLAFASMFQVPMIGSDVCGFGGNTTEELCARWARLGAFYTFFRNHNEITGIPQEFYRWPTVAESARKAIDIRYRLLDYIYTAFHRQTQTGEPFLQPMFYLYPKDKNTFSNQLQFFYGDAILVSPVTDGSQTSVDAYFPDDIFYDWHTGAALRGRGANVTLGNIDVTEIPIHIRGGSIIPIRSESAMTTTELRKKGFELIIAPGLDGTASGSLYLDDGDSIEQRATLELEFTYRKGRLRVKGKFGFRTDVKINAVTLLGQSAPASKSGSVASFDSGRQAVTIKTSLDLTGPSEIDLN

SEQ ID NO: 138 - protein, 840 aa, Aspergillus clavatus
MRSVITTLTLVASVGLAVAENGFDGWLRYAPVSCHGACQKSLPSHIVTLDPTESSPISVAGQEIQDGLQRMFKMHATVEPKGCSTRSSVIIGTLDAYNHACKDADPVPELEEDGFWLNTKDGKVQIIGQSERGALYGAYEYLSMLSQGNFAPVSYTTSPHAPIRWVNQWDNMDGSMEHGYGGLSIFFKDGVIPQDLSRVKQYARLLASIRINGIIVNNVNANASLLKPENMDGLARIADIFRPYGVKVGISLNFASPSTLGGLNTYDPLDESVISWWGGITDELYKRVPDMAGYLVKANSEGQPGPTTYNRTLAEGANLFARALKPHGGIVMFRAFVYDHHISEENWYNDRANAAVDFFKPLDGKFEENVVVQIKYGPIDFQVREPVSPLFANLYKTNTAIELQVTQEYLGQQSHLVYLPPLWQTILGFDLRVDGKPSPTRDIISGQRFNRPLGGWAAVVNVGTNTTWLGSHLALSNLYAYGRLAWEPTLDSQDILQDWIRMTFGLDRRVLDTITKMSMESWPAYENYSGNLGIQTLTDILYTHYGPNPASQDGNGWGQWTRADHEAIGMDRTIKNGTKFTGQYPAEVAQVYENIETTPDDLLLWFHHVPYTQRLQSGKTVIQHFYDAHYAGADTAQTFVSQWESLRGKIDPERYEHVLTRLIYQAGHSIVWRDAINEFYHNLSGIADEKQRVGHHPWRIEAEDMKLDGYVPYDVNPFETASNTKAIVTATNSTTGTASTQLDFKTGKYDLGINYYDFYGGKSQWTAYLNDRLVGQWQGNNEDVLSHELSVYLDGHSATRITFRDVKIHKGDRLKIVGKPDGMEPAPLDYVVLLPQGIVD

SEQ ID NO: 139 - protein, 840 aa, Neosartorya fumigata
MWSGIPIFALLSSIGIAAAETGLDGWLRYASVPCNGNCQRALPSHIVTLNSTRSSPVYVAGQELQDGLHQILGKHASVKSTGCSTDSSIIVGTVEAYRQVCNAGRQVPQLDVDGFWLSIREKSVLIVGQSERGALYGAYEYLSMLAQGNFSQVSYATSPHAPIRWVNQWDNMDGSIERGYGGPSIFFKDGVIRQDLSRVQQYARLLASVRINGIIVNNVNANASLLMPSNMDGLARIADIFRPYGIRVGISLNFASPSTLGNLSTYDPFDSSVIAWWGNVTDQLYARIPDMAGYLVKANSEGQPGPTTYNRTLADGANMFARALKPYGGVVMFRAFVYDHHISEDNWYNDRANAAVDFFKPLDGKFDDNVVVQIKYGPIDFQVREPASPLFANLYKTNTAIELQVTQEYLGQQSHLVYLPPLWQTILGFDLRVDQKPSLVRDIISGQRFDRPLGGWAAVVNVGTNSTWLGSHLAMSNLYAYGRLAWEPTLDSEDIVQDWIRLTFGLDRRIVDTLTQMSMESWPAYENYSGNLGIQTLTDILYTHYGPNPASQDGNGWGQWTRADHLSIGMDRTVKNGTKFSGQYPAEVAAMYENIETTPDNLLLWFHHVNYTQRLHSGKTVIQHFYDAHYTGAETAQTFVSQWESLRERIDAERYQHVLTRLIYQAGHSIVWRDAINNFYHNLSGIADEKQRVGHHPWRVEAEDMQLDGYVPYAVSPFETASNYTAIVTASNGTTGTASATLDFKTGTYDLGINYYDMYGGKSHWTVYLNDRVVGQWQGNSEDVLSHTPSIYLDGHSATRITFRDVKIHKGDRLKIVGKPDGVEPAPLDYVVVLPPGIVD

SEQ ID NO: 140 - protein, 839 aa, Aspergillus flavus
MRWSFLTVLLWLVSLTGAENGFNGWLRYAPVQCDKRCQRALPSSIVTLNSTDSGPIGTASQELQAGLENIVGKQLSIKRSSCGSRSSILVATLEQYRQACNRSSEVPSLGIDGFWLRAYGDTVQIVGENERGALYGAFEYLSLLAQGNFSHVDYTTSAHAPVRWVNQWDNMDGSIERGYAGPSIFFEDGHIVEDLSRVKQYARLLASIRINGVIVNNVNANATLLTSQNMDGLARIANVFRPYGIQIGISLNFASPDTLGGLGTYDPLDPSVISWWANITDSLYDRVPDMAGYLVKASSEGQPGPDTYNRTLAEGANVFAKALQPHGGILMFRTFVYDHHINESIWTNDRANAQVDFFKELDGQFEDNVILQIKYGPIDFQVREPVSPLFANLYKTNMAIELQVTQEYLGQQDHLVYLSPLWKELLDFDLRVDHQPSLVRDIVSGQRFDRQLGGWAAVVNVGTNTTWLGSHLAMSNLYAYGRLAWSPTDDSQGILQDWIRLTFGRDQNVLDTITDMSMASWPAYENYTGNLGIQTLTDILYTHYGPNPASQDNNGWGQWTRADHDTIGMDRTVKNGTGNAGQYPAEIAQVYEDLDSTPDDLLLWFHHVPYTHRLHSGKTVIQHFYDAHYDGAETAHRFLSQWESLKGRIDQQRYNEVLSRLVYQAGHSLVWRDAINNFYWNMSGISDEKNRVGHHPWRVEAESMTLDGYEPYTVSPFETASNYKAVVTTSNSTTGTAQTKLQFPSGTYDLGVNYYDMYGGKSEWTVYVNDRVVGQWEGNSENTLGHTPSIYIDGHSATRITFRGVEIENGDQLKIVGVPDGVEPAPLDYVVLLPPDVVD

SEQ ID NO: 141 - protein, 840 aa, Neosartorya fumigata
MWSGIPIFALLSSIGIAAAETGLDGWLRYASVPCNGNCQRALPSHIVTLNSTRSSPVYVAGQELQDGLHQILGKHASVKSTGCSTDSSIIVGTVEAYRQVCNAGRQVPQFDVDGFWLSIREKSVLIVGQSERGALYGAYEYLSMLAQGNFSQVSYATSPHAPIRWVNQWDNMDGSIERGYGGPSIFFKDGVIRQDLSRVQQYARLLASVRINGIIVNNVNANASLLMPSNMDGLARIADIFRPYGIRVGISLNFASPSTLGNLSTYDPFDSSVIAWWGNVTDQLYARIPDMAGYLVKANSEGQPGPTTYNRTLADGANMFARALKPYGGVVMFRAFVYDHHISEDNWYNDRANAAVDFFKPLDGKFDDNVVVQIKYGPIDFQVREPASPLFANLYKTNTAIELQVTQEYLGQQSHLVYLPPLWQTILGFDLRVDQKPSLVRDIISGQRFDRPLGGWAAVVNVGTNSTWLGSHLAMSNLYAYGRLAWEPTLDSEDIVQDWIRLTFGLDRRIVDTLTQMSMESWPAYENYSGNLGIQTLTDILYTHYGPNPASQDGNGWGQWTRADHLSIGMDRTVKNGTKFSGQYPAEVAAMYENIETTPDNLLLWFHHVNYTQRLHSGKTVIQHFYDAHYTGAETAQTFVSQWESLRERIDAERYQHVLTRLIYQAGHSIVWRDAINNFYHNLSGIADEKQRVGHHPWRVEAEDMQLDGYVPYAVSPFETASNYTAIVTASNGTTGTASATLDFKTGTYDLGINYYDMYGGKSHWTVYLNDRVVGQWQGNSEDVLSHTPSIYLDGHSATRITFRDVKIHKGDRLKIVGKPDGVEPAPLDYVVVLPPGIVD

SEQ ID NO: 142 - protein, 841 aa, Aspergillus niger
MRGLNLFQLILALLLSMVAAEDGYDGWLRYAPVSCDLHCQQALPSHVVLLNSTKGSPIETAGRELKAGFQSILSTNLTSRPFQCNSSASILVATLDEYRQRCRDINVPELDPDGFWLQSEGDTVRILGKDARGALYGAYEYLAMVAQRNFSRVAYATSPHAPIRWVNQWDNMDGSIERGYGGASIFFKDGTVVEDMAPVEQYARLLASIRINAIVVNNVNANATLLLPENMKGLSRIADACRPYGVQIGISLNFASPEALGGLNTYDPLDPGVIAWWQNITDSLYTYVPDMAGYLVKADSEGQPGPDTYNRTLSQGANLFARALQPYGGVLMYRAFVYDDNLNESDWKADRAKAAVEYFKDLDGQFEENVVIQIKYGPIDFQVREPTSPLFANLYHTNTAIELEVSQEYLGQQCHLVYLPPLWKTVLDFDLRVDHKPSMVRDIISGQRFNRTLGGWAAVVNVGTNRTWLGSHLAMSNLYAYGRLAWSPTDESEQILEDWTRLTFGQNHHVINTISDMSMTSWPAYENYTGNLGIQTLTDILYTHYGPNPATQDNNGWGQWTRADHDSVGMDRTIWNGTGYTGQYPEEVARVYESLESTPDDLVLWFHHVPWTHRLHSGVTVIQHFYNAHYAGAEAAHGFVRQWESLEGLIDRERYEAMRSRLVYQAGHSIVWRDAINNFYYNMTGIPDVAGRVGHHPWRIEAESMGLDGYQTYTVSPFEAASNTTAIITTSNSTTGTARTSIKAPSGVYDIGVNYYDLYGGQSKWTLSVGDKVVGQWLGDMEHNSLGHTPSIYLGGHSATRITFHGVGIRQGDQLKIVGEANGVEPAPLDYIVLLPPGLVD

SEQ ID NO: 143 - protein, 841 aa, Aspergillus niger
MRGLNLFQLILALLLSMVAAEDGYDGWLRYAPVSCDLRCRQALPSHVVLLNSTKGSPIETAGRELKAGFQSILSTNLTSRPFQCNSSTSILVATLDEYRQRCRDINVPELDPDGFWLQSEGDTVRILGKDARGALYGAYEYLAMVAQRNFSRVAYATSPHAPIRWVNQWDNMDGSIERGYGGASIFFKDGTVVEDMAPVEQYARLLASIRINAIVVNNVNANATLLLPENMKGLGRIADACRPYGVQIGISLNFASPEDLGGLNTYDPLDPGVIAWWQNITDSLYTYVPDMAGYLVKADSEGQPGPDTYNRTLSQGANLFARALQPYGGVLMYRAFVYDDNLNESDWKADRAKAAVEYFKDLDGQFEENVVIQIKYGPIDFQVREPTSPLFANLYHTNTAIELEVSQEYLGQQCHLVYLPPLWKTVLDFDLRVDHKPSMVRDIISGQRFNRTLGGWAAVVNVGTNRTWLGSHLAMSNLYAYGRLAWSPTDESEQILEDWTRLTFGQNHHVINTISDMSMTSWPAYENYTGNLGIQTLTDILYTHYGPNPATQDNNGWGQWTRADHDSVGMDRTIRNGTGYTGQYPEEVARVYESLESTPDDLVLWFHHVPWTHRLHSGVTVIQHFYNAHYAGAEAAHGFVRQWESLEGLIDRERYEAMRSRLVYQAGHSIVWRDAINNFYYNMTGIPDVAGRVGHHPWRIEAESMRLDGYQTYTVSPFEAASNTTAIITTSNSTTGTARTSIKAPSGVYDIGVNYYDLYGGQSKWTLSVGDKVVGQWLGDMEHNSLGHTPSIYLDGHSATRITFHGVGIRQGDQLKIVGEANGVEPAPLDYIVLLPPGLVD

SEQ ID NO: 144 - protein, 835 aa, Aspergillus oryzae
MRWSFLTVLLWLVSLTGAENGFNGWLRYAPVQCDKRCQRALPSSIVTLNSTDSGPIGTASQELQAGLENIVGKQLSIKRSSCGSRSSILVATLEQYRQACNRSSEVPSLGIDGFWLRAYGDTVQIVGENERGALYGAFEYLSLLAQGNFSHVDYTTSAHAPVRWVNQWDNMDGSIERGYAGPSIFFEDGHIVEDLSRVKQYARLLASIRINGVIVNNVNANATLLTSQNMDGLARIANVFRPYGIQIGISLNFASPDTLGGLGTYDPLDPSVISWWANITDSLYDRVPDMAGYLVKASSEGQPGPDTYNRTLAEGANVFAKALQPHGGILMFRTFVYDHHINESIWTNDRANAQVDFFKELDGQFEDNIKYGPIDFQVREPVSPLFANLYKTNMAIELQVTQEYLGQQDHLVYLSPLWKELLDFDLRVDHQPSLVRDIVSGQRFDRQLGGWAAVVNVGTNTTWLGSHLAMSNLYAYGRLAWSPTDDSQGILQDWIRLTFGRDQNVLDAITDMSMASWPAYENYTGNLGIQTLTDILYTHYGPNPASQDNNGWGQWTRADHDTIGMDRTVKNGTGNAGQYPAEIAQVYEDLDSTPDDLLLWFHHVPYTHRLHSGKTVIQHFYDAHYDGAETAHRFLSQWESLKGRIDQQRYNEVLSRLVYQAGHSLVWRDAINNFYWNMSGISDEKNRLGHHPWRVEAESMTLDGYEPYTVSPFETASNYKAVVTTSNSTTGTAQTKLQFPSGTYDLGVNYYDMYGGKSEWTVYVNDRVVGQWEGNSENTLGHTPSIYIDGHSATRITFRGVEIENGDQLKIVGVPDGVEPAPLDYVVLLPPDVVD

SEQ ID NO: 145 - protein, 841 aa, Aspergillus terreus
MLRLPLVLVWSLWASLTVAENGLNGWLRYAPIPCDGRCHKALPSRIVALNSTQGSPLETAIEELQTGVRGMTGKRLSVAKENNCNLHATALIATVEEYRRTCRNSSDIPDLDVDGFWLRTEGNNVQILGQSERGALYGAFEYLSMLAQGDFSSVDYSTSPHAPVRWVNQWDNMDGSIERGYAGPSIFFAQGQIVPDLSRAKQYARLLASVRINGIIVNNVNANATLLTPQNMDGLARIANVFRPYGIRIGIALNFASPDTLGGLGTYDPLDPSVISWWGNITDSLYERIPDMAGYLVKASSEGQPGPDTYNRTLADGANLFARALKPHGGVMMFRAFVYDHHINESIWTNDRANAQVDFFKKLDGQFEDNVIVQIKYGPIDFQVREPVSPLFANLYHTNTAIELQVTQEYLGQQCHLVYLPPLWKTITDFDLRVDHSPSVVRDIISGERFNRPLGGWAAVVNVGTNDTWLGSHLSMSNLYAYGRMAWSPTDDSVEILQDWIRLTFGRDQHVLDTITDMSMASWPAYENYTGNLGIQTLTDILYTHYGPNPASQDGNGWGQWTRADHDSIGMDRTVKNGTGNAGQYPAEIAEIYEDIDKTPDDLLLWFHHVPYTHRLDSGKTVIQHFYDAHYAGAETAQGFVPQWESLRGRIDPERYDAMRTRLVYQAGHSIVWRDAINNFYWNLSGIADTNGRVGHHPWRVEAESMQLQGYQPYAVSPFETASNYTAVVTTSNSTTGTASTTLDFPSGTYDVGVNYFDMYGGKSRWSLYLNDKVVGKWEGNSEDVLGHTPSIYLDGHSAIRITFNGVKVRKGDRLKIVGVPDGVEPAPLDYVVFLPQGVID

SEQ ID NO: 146 - protein, 841 aa, Aspergillus tubingensis
MRGSNLFQLTLALLLSLVAAEDGYNGWLRYAPVSCDLHCRQALPSHIVLLNSTKGSPIETAGRELKAGFQSILSTNLTFHPFQCDSSASILVATLDEYRQKCRDINLPELDPDGFWLQSEGDTVRILGNNARGALYGAYEYLAMVAQRNFSRVAYTTNPHAPIRWVNQWDNMDGSIERGYGGASIFFKDGTVVEDMAPVEQYARLLASIRINAIVVNNVNANATLLLPENMKGLGRIADACRPYGVQIGISLNFASPESLGGLETYDPLDPGVIAWWQNITDSLYTYVPDMAGYLVKADSEGQPGPDTYNRTLSQGANLFARALQPHGGVLMYRAFVYNDNLNESDWKADRAKAAVEYFKDLDGQFYENVVVQIKYGPIDFQVREPTSPLFANLYQTNTAIELEVSQEYLGQQCHLVYLPPLWKTVLDFDLRVDHKPSMVRDILSGQRFNRTLGGWAAVVNVGTNRTWLGSHLAMSNLYAYGRLAWSPTDDSEQILKDWTRLTFGQNRQVIDTIADMPMTSWPAYENYTGNLGIQTLTDILYTHYGPNPATQDNNGWGQWTRADHNSVGMDRTISNGTGYTGQYPEEVARLYESLETTPDDLVLWFHHVPWTHRLHSGLTVIQHFYNAHYAGSEAAHGFIRQWESLKGLIDRERYEAMRSRLVYQAGHSIVWRDAINNFYYNMTGIPDVAGRVGHHPWRIEAESMRLDGYQTYTVSPFEAASNTTAIITTSNSTTGTARTTIKAPSGVYDIGVNYYDLYGGQSKWTLSVGDKVVGQWLGDMEHQSLGHTPSIYLDGHSATRITFHGVVVRQGDQLKIVGEANGVEPAPVDYVVLLPPGVVD

SEQ ID NO: 147 - protein, 847 aa, Emericella nidulans
MRSFLLLTALLGVAAVAEDGLAAWLRYAPIPHAKSYHKNLPSVIVPLNATAGRPIDTAAYELVDGIKGIFGKRVTLKNETRDDPNLPAVTVGTVEAYAEAGGDVSSVPELIDDGYYLSVAGPSVLILGQNERGALYGTFQYLERLAQGKVSDTSFASNPSAPIRWVNQWDNLQDGGTHGSVERGYGGDSIFFWDGRVRDDLTRASQYARLLASIGLNAVIVNNVNANETILTQENMDGVARIADAFRPYGIQLGLSLNFASPQSLGGLDTFDPFDERVISWWGEITDELYERIPDMAGYLVKANSEGQPGPFTYNRTLADGANLFARALQPHGGIVLFRAFVYDHENLNETLDWKADRANAAVEFFDGLDPQFEDNVVIQIKNGPIDFQVREPVSPLFAHLSQTASAVELQVTQEYLGQQCHLVYLAPMWKEVLDFDLRVDGKDSVVSDIVSGRRFNNTLGGYAGVVNVGLNTTWLGSHLAMSNLYAYGRLAWDPSADSVELLQEWIKMTFSHDQEVVDVITKMSMESWPAYENYSGNLGIQTLTDILLGHYGPNPASQDGNPWGQWTRADADSIGMDRTVWNGTGNAGQYPEEVYQMYENIDTTPDNLLLWFHHVPYTQRLKSGKTVIQHFYDAHYRGSATAQTFVSLWKTIKGKIDKERYEHVLFRLVYQAGHALVWRDSITNFYYNKSGIPDEAGRVGNHPYRIEAEDMELDGYEPYLVSPFEAASGSHCIVTSNNSTEGRASTPLKVKNGKYDIAVNYFDQAIGNSTWRLFLDDDLVGEWKGDLEYILGRAPSPYIDGQTAARITFKHVHIKSRSTLSIVGIPDGMEPAPIDYVSILPEGVID

SEQ ID NO: 148 - protein, 840 aa, Neosartorya fischeri
MWSGIPVFALLSSIGIAAAENGLDGWLRYASVPCNGNCQRALPSHIVTLNSTKSSQVYVAGQELQDGLHQILGKHASVKSTGCSTDSSIVVGTVEAYRQVCNTGSQAPELDVDGFWLSIRGKSVQIVGQTERGALYGAYEYLSMLAQGNFSQVSYATSPHAPIRWVNQWDNMDGSIERGYGGPSIFFKDGVIPQDLSRVKQYARLLASVRINGIVVNNVNANASLLMPSNMDGLARIADVFRPYGIRVGISLNFASPSTLGNLSTYDPFDSSVIAWWGNVTDQLYARIPDMAGYLVKANSEGQPGPTTYNRTLADGANMFARALKPHGGVVMFRAFVYDHHISEDNWYNDRANAAVDFFKPLDGKFDDNVVVQIKYGPIDFQVREPASPLFANLYKTNTAIELQVTQEYLGQQSHLVYLPPLWQTILRFDLRVDQKPSPVRDIISGQRFDRPLGGWAAVVNVGTNTTWLGSHLAMSNLYAYGRLAWEPTLDSEDIVQDWIRLTFGLDRRVLDTLTQMSMESWPAYENYSGNLGIQTLTDILYTHYGPNPASQDGNGWGQWTRADHLSIGMDRTVKNGTKFSGQYPAEVAAMYENIETTPDNLMLWFHHVNYTQRLHSGKTVIQHFYDAHYDGAETAQTFVSRWESLRERIDAERYQHVLARLIYQAGHSIVWRDAINNFYRNLSGIADEKERVGYHPWRVEAEDMQLDGYVPYAVSPFETASNFTAIVTASNGTTGTASATLDFKTGTYDLGINYYDMYGGKSHWTVYLNDRVVGQWQGNSEDVLSHTPSIYLDGHSATRITFRDVKIHKGDRLKIVGEPDGVEPAPLDYAVVLPRGIVD

SEQ ID NO: 149 - protein, 152 aa, Neosartorya fumigata
MKFTTPISLISLFVSSALAAPTPENEARDAIPVSVSYDPRYDNAGTSMNDVSCSNGVNGLVTKWPTFGSVPGFARIGGAPTIPGWNSPNCGKCYKLQYEQNTIYVTAIDAAPGGFNIATSAMDQLTNGMAVELGRVQATYEEADPSHCASGV

SEQ ID NO: 150 - protein, 310 aa, Neosartorya fumigata
MAALLRLAVLLPLAAPLVATLPTSPVPIAARATPHEPVFFSWDAGAVTSFPIHSSCNATQRRQIEAGLNEAVELARHAKAHILRWGNESEIYRKYFGNRPTMEAVGAYDVIVNGDKANVLFRCDNPDGNCALEGWGGHWRGANATSETVICDRSYTTRRWLVSMCSQGYTVAGSETNTFWASDLMHRLYHVPAVGQGWVDHFADGYDEVIALAKSNGTESTHDSEALQYFALEAYAFDIAAPGVGCAGESHGPDQGHDTGSASAPASTSTSSSSSGSGSGATTTPTDSPSATIDVPSNCHTHEGGQLHCT

SEQ ID NO: 151 - protein, 322 aa, Neosartorya fumigata
MQLKNSMLLLTALAAGSSVARLHGHERRHLHHAGEKREVGDTVYATINGVLVSWINEWSGEAKTSDAPVSQATPVSNAVAAAAAASTPEPSSSHSDSSSSSGVSADWTNTPAEGEYCTDGFGGRTEPSGSGIFYKGNVGKPWGSNIIEVSPENAKKYKHVAQFVGSDTDPWTVVFWNKIGPDGGLTGWYGNSALTLHLEAGETKYVAFDENSQGAWGAAKGDELPKDQFGGYSCTWGEFDFDSKINQGWSGWDVSAIQAENAHHEVQGMKICNHAGELCSIISHGLSKVIDAYTADLAGVDGIGGKVVPGPTRLVVNLDYKE

SEQ ID NO: 152 - protein, 652 aa, Aspergillus oryzae
MRPLSHLSFFNGLLLGLSALSAATSVVHERREATSSNWVKRARVNPSDKHVVRIGLTQSSLEEAHDLLMDVSNPSSPNYARFYSADEVAAKFAPSTETVNEVQNWLTEKGINASRVAQTQNHGWLVFHATSKEIENLFDTTYYEYHNRKTGKKAIACEQYHVPASVQKHIDYVHPGVNLNPSSGKPSSIRRRAAASKKTKLPARGPRPIQQHDVKGLNVTNCDQLITPECIRALYKIPSARAAPHPNNSLGIFEEGDYYAQEDLDLFFKTFAKDIPQGTHPIPAFIDGAEAPVPVTKAGGESDLDFELAYPIVHPQSITLYQTDDANWASNTTGFLNTFLDALDGSYCTYCAYGECGNDPSLDPVYPDDAGYDGQLMCGVFKPTNVISVSYGEQENDLPANYQQRQCMEFLKLGLQGVSVLFASGDNGVAGPPGDGNSVNGCLNNGTVFSPAFPNSCPYITNVGATKVYPGYTVSQPESAVYDPDGLYSYASGGGFSNIYPIPDYQAEAVATYFKDHNPPYPYYEGAENLGKNGGLYNRLGRGYPDVAANGDNIAVFNGGEFGSSGGTSASTPIFASIINRIIDERLAVGKGPVGFINPVLYKNPSVLNDITNGTNPGCGTDGFSTAPGWDPATGLGTPNYPKMLKLWLDLP

SEQ ID NO: 153 - protein, 304 aa, Aspergillus awamori
MLLSTHLLFVITTLVTSLLHPIDGHAVKRSGSLQQVTDFGDNPTNVGMYIYVPNNLASNPGIVVAIHYCTGTGPGYYGDSPYATLSEQYGFIVIYPSSPYSGGCWDVSSQATLTHNGGGNSNSIANMVTWTISKYGADSSKVFVTGSSSGAMMTNVMAATYPELFAAATVYSGVSAGCFYSNTNQVDGWNSTCAQGDVITTPEHWASIAEAMYSGYSGSRPRMQIYHGSIDTTLYPQNYYETCKQWAGVFGYDYSAPEKTEANTPQTNYETTIWGDSLQGIFATGVGHTVPIHGDKDMEWFGFA

SEQ ID NO: 154 - protein, 308 aa, Aspergillus clavatus
MAPFSFLLTLLLYTLSAGASVLESRSSALLPRAGSLQQVTNFGDNPTNVGMYIYVPNNLASNPGIIVAIHYCTGTAEAYYNGSPYAKLAEKHGFIVIYPESPYQGKCWDVSSRASLTHNGGGNSNSIANMVKWTIKKYKTNTSKVFVTGSSSGAMMTNVMAATYPDMFAAGVVYSGVAAGCFMSNTNQQAAWNSTCAHGKSIATPEAWAHVAKAMYPGYDGPRPRMQIYHGSADTTLYPQNYQETCKEWAGVFGYDYNAPRSVENNKPQANYKTTTWGKELQGIYATGVGHTVPINGDRDMAWFGFAK

SEQ ID NO: 155 - protein, 303 aa, Aspergillus ficuum
MLSTHLLFLATTLLTSLFHPIAAHVAKRSGSLQQITDFGDNPTGVGMYIYVPNNLASNPGIVVAIHYCTGTGPGYYSNSPYATLSEQYGFIVIYPSSPYSGGCWDVSSQATLTHNGGGNSNSIANMVTWTISEYGADSKKVYVTGSSSGAMMTNVMAATYPELFAAGTVYSGVSAGCFYSDTNQVDGWNSTCAQGDVITTPEHWASIAEAMYPGYSGSRPKMQIYHGSVDTTLYPQNYYETCKQWAGVFGYDYSAPESTEANTPQTNYETTIWGDNLQGIFATGVGHTVPIHGDKDMEWFGFA

SEQ ID NO: 156 - protein, 307 aa, Aspergillus flavus
MILLSYLLTYLLCALTCSARAIHNGRSLIPRAGSLEQVTDFGDNPSNVKMYIYVPTNLASNPGIIVAIHYCTGTAQAYYQGSPYAQLAETHGFIVIYPESPYEGTCWDVSSQATLTHNGGGNSNSIANMVTWTTKQYNADSSKVFVTGTSSGAMMTNVMAATYPNLFAAGVAYAGVPAGCFLSTADQPDAWNSTCAQGQSITTPEHWASIAEAMYPDYSGSRPKMQIYHGNVDTTLYPQNYEETCKQWAGVFGYNYDAPESTESNTPEANWSRTTWGPNLQGILAGGVGHNIQIHGDEDMKWFGFTN

SEQ ID NO: 157 - protein, 307 aa, Aspergillus flavus
MILLSYLLTYLLCALTCSARAIHNGRSLIPRAGSLEQVTDFGDNPSNVKMYIYVPTNLASNPGIIVAIHYCTGTAQAYYQGSPYAQLAETHGFIVIYPESPYEGTCWDVSSQATLTHNGGGNSNSIANMVTWTTKQYNADSSKVFVTGTSSGAMMTNVMAATYPDLFAAGIAYAGVPAGCFLSTADQPDAWNSTCAQGQSITTPEHWASIAEAMYPDYSGSRPKMQIYHGNVDTTLYPQNYEETCKQWAGVFGYNYDAPESTESNTPEANWSRTTWGPNLQGILAGGVGHNIQIHGDEDMKWFGFTN

SEQ ID NO: 158 - protein, 371 aa, Neosartorya fumigata
MRALSVFVALFSFLALSSASPGQDVAKRVTSGSLQQVTNFGSNPSGTLMYIYVPNNLATKPGIVVAIHYCTGTAQAYYTGSPYAQLAEKYGFIVIYPQSPYSGTCWDVSSQSALTHNGGGDSNSIANMVTWTISQYNADTSKVFVTGSSSGAMMTNVMAATYPELFAAATVYSGVPAGCFYSSSNQVNGWNSSCAQGNVISTPEVWGGIAKAMYPGYTGPRPRMQIYHGSVDTTLYPQNYYETCKQWAGVFGYNYNSPQSTQSNTPQANYQTTIWGPNLQGIFATGVGHTVPIHGEQDMEWFGFTGGSSSTTTTATTPPTTSTTTSSGGSSTSTGVAEHWGQCGGNGWTGPTACASGYTCTVINEWYSQCL

SEQ ID NO: 159 - protein, 303 aa, Aspergillus niger
MLSTHLLFLATTLLTSLFHPIAAHVAKRSGSLQQITDFGDNPTGVGMYIYVPNNLASNPGIVVAIHYCTGTGPGYYSNSFYATLSEQYGFIVIYPSSPYSGGCWDVSSQATLTHNGGGNSNSIANMVTWTISEYGADSKKVFVTGSSSGAMMTNVMAATYPELFAAGTVYSGVSAGCFYSDTNQVDGWNSTCAQGDVITTPEHWASIAEAMYPGYSGSRPKMQIYHGSVDTTLYPQNYYETCKQWAGVFGYDYSAPESTEANTPQTNYETTIWGDNLQGIFATGVGHTVPIHGDKDMEWFGFA

SEQ ID NO: 160 - protein, 307 aa, Aspergillus oryzae; identical to SEQ ID NO: 156

SEQ ID NO: 161 - protein, 311 aa, Aspergillus terreus
MAPFSFILTVLLYALTCSARALGHAHALLPRAGSLEQVTDFGDNPTNVGMYIYVPNNLASSPGIVVAIHYSPEGTGTAEAYYTGSPYAQLAEQYGFIVIYPQSPYEGTCWDVSSQETLTHNGGGNSNSIANMVTWAISKYNADSSKVFVTGSSSGAMMTHQNVMAATYPELFAAATVYSGVPAGCFYSSSNQQDGWNSTCAQGQVITTPENWANVAKGMYPGYNGTRPKMQIYHGSVDTTLLPQNYYETCKQWAGVFGYNYDSPQQVQDNTPQSNYATTTWGDDLQGIFATGVGHTVPIRGDDDMAWFGFA

SEQ ID NO: 162 - protein, 304 aa, Emericella nidulans
MVKLQYLLSILLYAYSCTALMLDRRDPTPGQLSQVTDFGDNPTNVGFYIYVPQNLASNPAIIVAIHYCTGTAQAYYSGTPYAQYAETYGFIVIYPESPYSGTCWDVSSQSTLTHNGGGNSNSIANMVDWTINQYNADASRVYVTGTSSGAMMTNVMAATYPNLFAAGIAYAGVPAGCFYSEANVEDQWNSTCAQGQSISTPEHWAQIAQAMYSGYEGSRPKMQIYHGSADATLYPQNYYETCKQWAGVFGYNYDSPQEVQNDTPVAGWAKTIWGENLQGILADGVGHNIQIQGEEDLKWFGFTS

SEQ ID NO: 163 - protein, 368 aa, Neosartorya fischeri
MRALSVFFALFCFLALSSASPGQDVVKRVTSGSLQQVTNFGSNPSGTLMYIYVPKNLATKPGIVVAIHYCTGTAQAYYTGSPYAQLAEQYGFIVIYPQSPYSGTCWDVSSQSALTHNGGGDSNSIANMVTWTISQYNADTSKVFVTGSSSGAMMTNVMAATYPELFAAATVYSGVSAGCFYSSSNQVDAWNSSCAQGNVISTPEVWGGIAKAMYPGYTGPRPRMQIYHGSTDTTLYPQNYYETCKQWAGVFGYNYNSPQSTQSNTPQANYQTTIWGPNLQGIFATGVGHTVPIHGEQDMEWFGFAGGSSTTTTQPTTTSTTTSSGGSSTGTGVAAHWGQCGGNGWTGPTVCASGYTCTVVNAWYSQCL

SEQ ID NO: 164 - protein, 327 aa, Emericella nidulans [sequence omitted]

SEQ ID NO: 165 - protein, 325 aa, Emericella nidulans
MRNLSTWPTFAALLWSAPRVLAQCGLPSTYSWTSTGPLAEPKDGWASLKDFTAVPYNGQYLVYATYHDTGTSWGSMNFGLFSNWSDMATASQNAMTQSTVAPTLFYFEPKDVWILAYQWGPTAFSYLTSSDPTDANGWSSPQPLFSGSISDSDTGVIDQTVIGDSTTMYLFFAGDNGRIYRASMPIDQFPGDFGTESEIILSDERNNLFEAVQVYTVSGQSKDTYLMIVEAIGAQGRYFRSFTADSLGGSWTPQAATESAPFAGKANSGATWTDDISHGDLVRSTPDQTMSIDPCNLQLLYQGRDPSLNPGYDLLPYRPGLLTLK

SEQ ID NO: 166 - protein, 332 aa, Aspergillus niger
MKFLKAKGSLLSSGIYLIALAPFVNAKCALPSTYSWTSTDALATPKSGWTALKDFTDVVSNGKHIVYASTTDTQGNYGSMGFGAFSDWSDMASASQTATSFSAVAPTLFYFQPKSIWVLAYQWGSSTFTYRTSQDPTNVNGWSSEQALFTGKISGSSTGAIDQTVIGDDTNMYLFFAGDNGKIYRSSMSINDFPGSFGSQYEEILSGATNDLFEAVQVYTVDGGEGDSKYLMIVEAIGSTGHRYFRSFTASSLGGEWTAQAASEDQPFAGKANSGATWTDDISHGDLVRNNPDQTMTVDPCNLQLLYQGHDPNSNSDYNLLPWKPGVLTLKQ

SEQ ID NO: 167 - protein, 332 aa, Aspergillus niger; identical to SEQ ID NO: 166

SEQ ID NO: 168 - protein, 328 aa, Aspergillus oryzae
MKVTKKVLDQSLCCTALLALVGGAAAQCALPSSYSWTSTGALAEPKAGWAALKDFTNVVFNGQHIVYGSVADTSGNYGSMNFGPFSDWSEMASASQNAMNQGTVAPTLFYFAPKDVWILAYQWGPTSFSYKTSSDPTDANGWSAAQPLFSGTISDSDTGVIDQTVIGDDTNMYLFFAGDNGKIYRASMPIDNFPGDFGTQSEIILSDTKENLFEAVQVYTVDGQNKYLMIVEAMGANGRYFRSFTADSLDGEWTVQAGTESQPFAGKANSGATWTNDISHGDLVRNNPDQTMTVDPCNLQLLYQGRDPNASGDYNLLPWKPGVLTLQV

SEQ ID NO: 169 - protein, 328 aa, Aspergillus sojae
MKVTKKVLDQSLCCTALLALVGGAAAQCALPSSYSWTSTGALAEPKAGWAALKDFTNVVFNGQHIVYGSVADTSGNYGSMNFGPFSDWSEMASASQNAMSQGTVAPTLFYFAPKDVWILAYQWGPTSFSYKTSSDPTDANGWSAAQPLFSGTISDSDTGVIDQTVIGDDTDMYLFFAGDNGKIYRASMPIDNFPGDFGTQSEIILSDTKENLFEAVQVYTVDGQNKYLMIVEAMGANGRYFRSFTADSLDGEWTVQAGTESQPFAGKANSGATWTNDISHGDLVRNNPDQTMTVDPCNLQLLYQGRDPNASGDYNLLPWKPGVLTLQV

SEQ ID NO: 170 - protein, 326 aa, Aspergillus terreus
MRPRQSKVTQVLSGAVLLASGAAASCSLPSTYSWTSTEALAEPKSGWTALKDFTNVVSNGQHIVYASTTDSSGNYGSMAFSPFADWSDMASASQNAMSASAVAPTIFYFAPKDVWILAYQWGPTAFSYKTSSDPSDANGWSEAQPLFSGSISDSSTGVIDQTVIGDDTNMYLFFAGDNGRIYRASMSIDNFPGDFGTQSEVVLEDTTNNLFEAVQVYKVDGQDQYLMIVEAIGSAGRYFRSFTASSLDGEWTVQAGTEDQPFAGKANSGASWTNDISHGDLVRNNPDQTFTVDPCNLQLLYQGKDPNSSGDYNQLAWRPGVLTLKV

SEQ ID NO: 171 - protein, 332 aa, Aspergillus tubingensis
MKFFKAKGSLLSSGIYLIALTPFVNAKCALPSSYSWSSTDALATPKSGWTALKDFTDVVSDGKHIVYASTTDEAGNYGSMTFGAFSEWSNMASASQTATPFNAVAPTLFYFKPKSIWVLAYQWGSSTFTYRTSQDPTNVNGWSSEQALFTGKISDSSTNAIDQTVIGDDTNMYLFFAGDNGKIYRSSMSINDFPGSFGSQYEVILSGARNDLFEAVQVYTVDGGEGDTKYLMIVEAIGSTGHRYFRSFTASSLGGEWTAQAASEDQPFAGKANSGATWTEDISHGDLVRNNPDQTMTVDPCNLQLLYQGHDPNSSGDYNLLPWKPGVLTLKQ

SEQ ID NO: 172 - protein, 1006 aa, Neosartorya fumigata
MKLLSVCAIALLAAQAAGASIKHMLNGFTLMEHSDPAKRELLQKYVTWDEKSLFVNGERIMIFSGEVHPFRLPVPSLWLDVFQKIKALGFNCVSFYVDWALLEGKPGEYRAEGNFALEPFFDVAKQAGIYLLARPGPYINAEASGGGFPGWLQRVNGTLRTSDPAYLKATDNYIAHVAATIAKGQITNGGPVILYQPENEYSGACCDATFPDGDYMQYVIDQARNAGIVVPLINNDAWTGGHNAPGTGKGEVDIYGHDSYPLGFDCGHPSVWPKGNLPTTFRTDHLKQSPTTPYSLIEFQAGSFDPWGGPGFAACAALVNHEFERVFYKNDLSFGAAILNLYMTFGGTNWGNLGHPGGYTSYDYGSPLTESRNVTREKYSELKLIGNFVKASPSYLLATPGNLTTSGYADTADLTVTPLLGNGTGSYFVVRHTDYTSQASTPYKLSLPTSAGRLTVPQLGGTLTLNGRDSKIHVVDYNVAGTNIIYSTAEVFTWKNFGDSKVLILYGGPGEHHELAVSFKSDVQVVEGSNSEFKSKKVGDVAVVAWDVSPSRRIVQIGDLKIFLLDRNSVYNYWVPQLDKDDSSTGYSSEKTTASSIIVKAGYLVRTAYTKGSGLYLTADFNATTPVEVIGAPSNVRNLYINGEKTQFKTDKNGIWSTEVKYSAPKIKLPSMKDLDWKYLDTLQEVQSTYDDSAWPAADLDTTPNTLRPLTTPKSLYSSDYGFHTGYLIYRGHFVADGSETTFDVRTQGGSAFGSSVWLNESFLGSWTGLNANADYNSTYKLPQVEQGKNYVLTILIDTMGLNENWVVGTDEMKNPRGILSYKLSGRDASAITWKLTGNLGGEDYQDKIRGPLNEGGLYAERQGFHQPQPPSQKWKSASPLDGLSKPGIGFYTAQFDLDIPSGWDVPLYFNFGNSTKSAYRVQLYVNGYQYGKFVSNIGPQTSFPVPQGILNYQGTNWVALTLWALESDGAKLDDFELVNTTPVMTALSKIRPSKQPNYRQRKGAY

SEQ ID NO: 173 - protein, 1005 aa, Aspergillus flavus
MKLLSVAAVALLAAQAAGASIKHRLNGFTILEHPDPAKRDLLQDIVTWDDKSLFINGERIMLFSGEVHPFRLPVPSLWLDIFHKIRALGFNCVSFYIDWALLEGKPGDYRAEGIFALEPFFDAAKEAGIYLIARPGSYINAEVSGGGFPGWLQRVNGTLRSSDEPFLKATDNYIANAAAAVAKAQITNGGPVILYQPENEYSGGCCGVKYPDADYMQYVMDQARKADIVVPFISNDASPSGHNAPGSGTGAVDIYGHDSYPLGFDCANPSVWPEGKLPDNFRTLHLEQSPSTPYSLLEFQAGAFDPWGGPGFEKCYALVNHEFSRVFYRNDLSFGVSTFNLYMTFGGTNWGNLGHPGGYTSYDYGSPITETRNVTREKYSDIKLLANFVKASPSYLTATPRNLTTGVYTDTSDLAVTPLIGDSPGSFFVVRHTDYSSQESTSYKLKLPTSAGNLTIPQLEGTLSLNGRDSKIHVVDYNVSGTNIIYSTAEVFTWKKFDGNKVLVLYGGPKEHHELAIASKSNVTIIEGSDSGIVSTRKGSSVIIGWDVSSTRRIVQVGDLRVFLLDRNSAYNYWVPELPTEGTSPGFSTSKTTASSIIVKAGYLLRGAHLDGADLHLTADFNATTPIEVIGAPTGAKNLFVNGEKASHTVDKNGIWSSEVKYAAPEIKLPGLKDLDWKYLDTLPEIKSSYDDSAWVSADLPKTKNTHRPLDTPTSLYSSDYGFHTGYLIYRGHFVANGKESEFFIRTQGGSAFGSSVWLNETYLGSWTGADYAMDGNSTYKLSQLESGKNYVITVVIDNLGLDENWTVGEETMKNPRGILSYKLSGQDASAITWKLTGNLGGEDYQDKVRGPLNEGGLYAERQGFHQPQPPSESWESGSPLEGLSKPGIGFYTAQFDLDLPKGWDVPLYFNFGNNTQAARAQLYVNGYQYGKFTGNVGPQTSFPVPEGILNYRGTNYVALSLWALESDGAKLGSFELSYTTPVLTGYGNVESPEQPKYEQRKGAY

SEQ ID NO: 174 - protein, 1006 aa, Neosartorya fumigata
MKLLSVCAIALLAAQAAGASIKHMLNGFTLMEHSDPAKRELLQKYVTWDEKSLFVNGERIMIFSGEVHPFRLPVPSLWLDVFQKIKALGFNCVSFYVDWALLEGKPGEYRAEGNFALEPFFDVAKQAGIYLLARPGPYINAEASGGGFPGWLQRVNGTLRTSDPAYLKATDNYIAHVAATIAKGQITNGGPVILYQPENEYSGACCDATFPDGDYMQYVIDQARNAGIVVPLINNDAWTGGHNAPGTGKGEVDIYGHDSYPLGFDCGHPSVWPKGNLPTTFRTDHLKQSPTTPYSLIEFQAGSFDPWGGPGFAACAALVNHEFERVFYKNDLSFGAAILNLYMTFGGTNWGNLGHPGGYTSYDYGSPLTESRNVTREKYSELKLIGNFVKASPSYLLATPGNLTTSGYADTADLTVTPLLGNGTGSYFVVRHTDYTSQASTPYKLSLPTSAGRLTVPQLGGTLTLNGRDSKIHVVDYNVAGTNIIYSTAEVFTWKNFGDSKVLILYGGPGEHHELAVSLKSDVQVVEGSNSEFKSKKVGDVVVVAWDVSPSRRIVQIGDLKIFLLDRNSVYNYWVPQLDKDDSSTGYSSEKTTASSIIVKAGYLVRTAYTKGSGLYLTADFNATTPVEVIGAPSNVRNLYINGEKTQFKTDKNGIWSTEVKYSAPKIKLPSMKDLDWKYLDTLQEVQSTYDDSAWPAADLDTTPNTLRPLTTPKSLYSSDYGFHTGYLIYRGHFVADGSETTFDVRTQGGSAFGSSVWLNESFLGSWTGLNANADYNSTYKLPQVEQGKNYVLTILIDTMGLNENWVVGTDEMKNPRGILSYKLSGRDASAITWKLTGNLGGEDYQDKIRGPLNEGGLYAERQGFHQPQPPSQKWKSASPLDGLSKPGIGFYTAQFDLDIPSGWDVPLYFNFGNSTKSAYRVQLYVNGYQYGKFVSNIGPQTSFPVPQGILNYQGTNWVALTLWALESDGAKLDDFELVNTTPVMTALSKIRPSKQPNYRQRKGAY

SEQ ID NO: 175 - protein, 1007 aa, Aspergillus niger
MKLSSACAIALLAAQAAGASIKHRINGFTLTEHSDPAKRELLQKYVTWDDKSLFINGERIMIFSGEFHPFRLPVKELQLDIFQKVKALGFNCVSFYVDWALVEGKPGEYRADGIFDLEPFFDAASEAGIYLLARPGPYINAESSGGGFPGWLQRVNGTLRSSDKAYLDATDNYVSHVAATIAKYQITNGGPIILYQPENEYTSGCCGVEFPDPVYMQYVEDQARNAGVVIPLINNDASASGNNAPGTGKGAVDIYGHDSYPLGFDCANPTVWPSGDLPTNFRTLHLEQSPTTPYAIVEFQGGSYDPWGGPGFAACSELLNNEFERVFYKNDFSFQIAIMNLYMIFGGTNWGNLGYPNGYTSYDYGSAVTESRNITREKYSELKLLGNFAKVSPGYLTASPGNLTTSGYADTTDLTVTPLLGNSTGSFFVVRHSDYSSEESTSYKLRLPTSAGSVTIPQLGGTLTLNGRDSKIHVTDYNVSGTNIIYSTAEVFTWKKFADGKVLVLYGGAGEHHELAISTKSNVTVIEGSESGISSKQTSSSVVVGWDVSTTRRIIQVGDLKILLLDRNSAYNYWVPQLATDGTSPGFSTPEKVASSIIVKAGYLVRTAYLKGSGLYLTADFNATTSVEVIGVPSTAKNLFINGDKTSHTVDKNGIWSATVDYNAPDISLPSLKDLDWKYVDTLPEIQSSYDDSLWPAADLKQTKNTLRSLTTPTSLYSSDYGFHTGYLLYRGHFTATGNESTFAIDTQGGSAFGSSVWLNGTYLGSWTGLYANSDYNATYNLPQLQAGKTYVITVVIDNMGLEENWTVGEDLMKTPRGILNFLLAGRPSSAISWKLTGNLGGEDYEDKVRGPLNEGGLYAERQGFHQPEPPSQNWKSSSPLEGLSEAGIGFYSASFDLDLPKGWDVPLFLNIGNSTTPSPYRVQVYVNGYQYAKYISNIGPQTSFPVPEGILNYRGTNWLAVTLWALDSAGGKLESLELSYTTPVLTALGEVESVDQPKYKKRKGAY

SEQ ID NO: 176 - protein, 1005 aa, Aspergillus oryzae; identical to SEQ ID NO: 173

SEQ ID NO: 177 - protein, 1007 aa, Aspergillus saitoi
MKLSSACAIALLAAQAAGASIKHRINGFTLTEHSDPAKRELLQKYVTWDDKSLFINGERIMIFSGEFHPFRLPVKELQLDIFQKVKALGFNCVSFYVDWALVEGEPGEYRADGIFDLEPFFDAASEAGIYLLARPGPYINAESSGGGFPGWLQRVNGTLRSSDKAYLDATDNYVSHVAATIAKYQITNGGPIILYQPENEYTSGCCGVEFPDPVYMQYVEDQARNAGVVIPLINNDASASGNNAPGTGKGAVDIYGHDSYPLGFDCANPTVWPSGDLPTNFRTLHLEQSPTTPYAIVEFQGGSYDPWGGPGFAACSELLNNEFERVSYKNDFSFQIAIMNLYMIFGGTNWGNLGYPNGYTSYDYGSAVTESRNITREKYSELKLLGNFAKVSPGYLTASPGNLTTSGYADTTDLTVTPLLGNSTGSFFVVRHSDYSSEESTSYKLRLPTSASSVTIPQLGGTLTLNGRDSKIHVTDYNVSGTNIIYSTAEVFTWKKFADGKVLVLYGGAGEHHELAISTKSNVTVIEGSESGISSKQTSSSVVVGWDVSTTRRIIQVGDLKILLLDRNSAYNYWVPQLATDGTSPGFSTPEKVASSIIVKAGYLVRTAYLKGSGLYLTADFNATTSVEVIGVPSTAKNLFINGDKTSHTVDKNGIWSATVDYNAPDISLPSLKDLDWKYVDTLPEIQSSYDDSLWPAADLKQTKNTLRSLTTPTSLYSSDYGFHTGYLLYRGHFTATGNESTFAIDTQGGSAFGSSVWLNGTYLGSWTGLYANSDYNATYNLPQLQAGKTYVITVVINNMGLEENWTVGEDLMKTPRGILNFLLAGRPSSAISWKLTGNLGGEDYEDKVRGPLNEGGLYAERQGFHQPEPPSQDWKSSSPLEGLSEAGIGFYSASFDLDLPKGWDVPLFLNIGNSTTPSPYRVQVYVNGYQYAKYISNIGPQTSFPVPEGILNYRGTNWLAVTLWALDSAGGKLESLELSYTTPVLTALGEVESVDQPKYKKRKGAY

SEQ ID NO: 178 - protein, 1007 aa, Emericella nidulans
MRLLPVWTAALLAAQAAGVALTHKLNGFTITEHPDAEKRELLQKYVTWDDKSLFINGERIMIFGAEIHPWRLPVPSLWRDILQKVKALGFNCVSFYVDWALLEGKPGEYRAEGSFAWEPFFDAASDLGIYLIARPGPYINAEASGGGFPGWLQRLNGTIRSSDQSYLDATENYVSHIGGLIAKYQITNGGPVILYQPDNEYSGGCCGQEFPNPDYFQYVIDQARRAGIVVPTISNDAWPGGHNAPGTGKGEVDIYGHDNYPLGFDCANPDVWPEGNLPTDYRDLHLEISPSTPYALVEYQVGAFDPWGGPGFEQCAALTGYEFERVFHKNTFSFGVGILSLYMTFGGTNWGNLGHPGGYTSYDYGSPIKETREITREKYSELKLLGNFIKSSPGYLLATPGKLTNTTYTNTADLTVTPLLGNGTGSFFVLRHSDYSSQASTPYKLRLPTSAGQLTIPQLGGSLVLNGRDSKVHLVDYDVAGTKILYSTAEVFTWKKFHDGKVLVLYGGPGEHHELAVSSKAKVKVVEGLGSGISSKQIRGAVVVAWDVEPARRIVQIGDLKIFLLDRNSAYNYWVPQLGTETSIPYATEKAVAASVIVKAGYLVRTAYVKGRDLHLTADFNATTPVEVIGAPKTAENLFINGKKAHHTVDKNGIWSTEVGYSPPKIVLPVLEDLKWKSIDTLPEIQPSYDDSPWPDANLPTKNTIYPLRTPTSLYASDYGFHTGYLLFRGHFTANGRESNFSIQTQGGQAFGSSVWLSGTYLGSWTGDNDYQDYNATYTLPSLKAGKEYVFTVVVDNMGLNENWIVGQDEMKKPRGILNYELSGHEASDITWKLTGNFGGEDYVDKVRGPLNEGGLYAERHGYHQPYPPTKSKDWKSSTPLTGLSKPGISFYTASFDLDIKSGWDVPIYFEFGNSTTPAPAYRVQLYVNGWQYGKYVNNIGPQTRFPVPEGILNYKGTNWVAVTLWALEGSGAKLDSFKLVHGIPVRTALDVEGVELPRYQSRKGVY

SEQ ID NO: 179 - protein, 1006 aa, Neosartorya fischeri
MKLLSVCAVALLAAQAAGASIKHKLNGFTIMEHSDPAKRELLQKYVTWDEKSLFVNGERIMIFSGEVHPFRLPVPSLWLDVFQKIKALGFNCVSFYVDWALLEGKPGKYRAEGNFALEPFFDAAKQAGIYLLARPGPYINAEASGGGFPGWLQRVNGTLRTSDPAYLKATDNYIAHVAATVAKGQITNGGPVILYQPENEYSGACCNATFPDGDYMQYVIDQARNAGIVVPLINNDAWTGGHNAPGTGKGEVDIYGHDSYPLGFDCGHPSVWPKGNLPTTFRTDHLRESPTTPYSLIEFQAGSFDPWGGPGFAACAALVNHEFERVFYKNDLSFGAAILNLYMTFGGTNWGNLGHPGGYTSYDYGSPLTESRNVTREKYSELKLIGNFVKASPSYLLATPGNLTTSGYADTADLTVTPLLGNGTGSYFVVRHTDYTSQASTPYKLSLPTSAGRLTVPQLGGTLTLNGRDSKVHVVDYNVAGTNILYSTAEVFTWKKFGDSKVLVLYGGPGEHHELAVSLKSDVQVVEGSNSEFTSKKVEDVVVVAWDVSASRRIVQIGDLKIFLLDRNSAYNYWVPQLDKDDSSTGYSSEKTTASSIIVKAGYLVRTAYTKGSGLYLTADFNATTPVEVIGAPSNVRNLYINGEKTQFKTDKNGIWSTGVKYSAPKIKLPSMKDLDWKYLDTLPEVQSTYDDSAWPAADLDTTPNTLRPLTMPKSLHSSDYGFHTGYLIYRGHFVADGSETTFDVRTQGGSAFGSSVWLNEAFLGSWTGLNANADYNSTYRLPQVEKGKNYVLTVVIDTMGLNENWVVGTDEMKNPRGILSYKLSGRDASAITWKLTGNLGGEDYQDKIRGPLNEGGLYAERQGFHQPEPPSKKWKSASPLDGLSKPGIGFYTAQFDLDIPSGWDVPLYFNFGNSTKSAYRVQLYVNGYQYGKFVSNIGPQTSFPVPQGILNYQGTNWVALTLWALESDGAKLDDFELVNTTPVMTALSKIRPSKQPNYRQRKGAY

SEQ ID NO: 180 - protein, 1015 aa, Neosartorya fumigata
MAHIYRLLLLLLSNLWFSTAAQNQSETEWPLHDNGLSKVVQWDHYSFQVNGQRIFIFSGEFHYWRIPVPELWRDILEKVKATGFTAFAFYSSWAYHAPNNSTVDFSTGARDITPIFELAKELGMYMIVRPGPYVNAEASAGGFPLWLMTGEYGSLRNDDPRYTAAWTPYFANMSQITSKYQVTDGHNTLVYQIENEYGQQWIGDPKNRNPNKTAVAYMELLEASARENGITVPLTSNDPNMNSKSWGSDWSNAGGNVDVAGLDSYPSCWTCDVSQCTSTNGEYVPYKVIDYYDYFQEVQPTLPSFMPEFQGGSYNPWAGPEGGCPQDTSAEFANLFYRWNIGQRVTAMSLYMLYGGTNWGAIAAPVTATSYDYSAPISEDRSIGAKYSETKLLALFTRTAKDLTMTEAIGNGTQYTTNTAVRAFELRNPQTNAGFYVTFHTDTTVGGNQAFKLHVNTSVGALTVPKNEGLIQLNGHQSKIIVTDFTLGKRTLLYSTAEVLTYAVFENRPTLVLWVPTGESGEFAIKGAKSGKVENGDGCSGIKFKREKDYLVVNFSQAKGLSVLRLDNGVRVVLLDKAAAYRFWAPALTDDPNVQETETVLVHGPYLVRSASISKTTLALRGDSVEKTTLEIFAPHSVRKITWNGKEVQTSHTPYGSLKATLAAPPDIKLPALTSWRSNDSLPERLPSYDDSGPAWIEANHMTTSNPSPPATFPVLYADEYGFHNGVRLWRGYFNGSASGVFLNIQGGSAFGWSAWLNGHFLDSHLGTATTSQANKTLTFPSSILNPTENVLLIVHDDTGHDQTTGALNPRGILEARLLSNDTSSPPPEFTHWRLAGTAGGESNLDPIRGVFNEDGLFAERMGWHLPGFDDSAWTSENSATSASSALSFTGATVRFFRSVVPLNIPAGLDVSISFVLSTPTAAPKGYRAQLFVNGYQYGRYNPHIGNQVVFPVPPGILDYQGDNTIGLAVWAQTEEGAGIQVDWKVNYVADSSLSVAGFGKGLRPGWTEERLKFA

SEQ ID NO: 181 - protein, 1020 aa, Aspergillus flavus
MLISKTVLSGLALGASFVGVSAQQNSTRWPLHDNGLTDTVEWDHYSFLINGQRHFVFSGEFHYWRIPVPELWRDLLEKIKAAGFTAFSIYNHWGYHSPKPGVLDFENGAHNFTSIMTLAKEIGLYMIIRPGPYVNAEANAGGLPLWTTTGAYGKLRDNDPRYLEALTPYWANISKIIAPHLITNGGNVILYQIENEYAEQWLDEETHEPNTSGQEYMQYLEDVARENGIDAPLIHNLPNMNGHSWSKDLSNATGNVDVIGVDSYPTCWTCNVSECASTNGEYIPYKTLIYYDYFKELSPTQPSFMPEFQGGSYNPWGGPQGGCPDDLGPDFANLFYRNLISQRVSAISLYMLYGGTNWGWHASTDVATSYDYSSPISENRKLIEKYYETKVLTQFTKIAQDLSKVDRLGNSTKYSSNPAVSVAELRNPDTGAAFYVTQHEYTPSGTVEKFTVKVNTSEGALTIPQYGSQITLNGHQSKIIVTDFKFGSKTLLYSTAEVLTYAVIDGKEVLALWVPTGESGEFTVKGVNSAKFADKGRTANIEIHPGANNVTVSFMQRSGMSLVELGDGTRIVLLDRSAAHVFWSTPLNNDPAEAGNNTVLVHGPYLVRSAKLEGCDLKLTGDIQNSTEVSIFAPKSVCSVNWNGKKTSVKSAKGGVITTTLGGDAKFELPTISGWKSADSLPEIAKDYSATSKAWVVATKTNSSNPTPPAPNNPVLYVDENDIHVGNHIYRATFPSTDEPPTDVYLNITGGRAFSYSVWLNSDFIGSWLGTATTEQNDQTFSFSNATLSTDEDNILVVVMDNSAHDLRDGALNPRGITNATLIGPGSYSFTEWKLAGNAGFEDHLDPVRAPLNEGSLYAERVGIHLPGYEFDEAEEVSSNSTSLTVPGAGIRVFRTVVPLSVPQGLDVSISFRLTAPSNVTFTSAEGYTNQLRALLFVNGYQYGRFNPYIGHQIDFPVPPGVLDYNGDNTIAVTVWSQSVDGAEIKVDWNVDYVHETSFDMNFDGAYLRPGWIEERREYA

SEQ ID NO: 182 - protein, 1015 aa, Neosartorya fumigata; identical to SEQ ID NO: 180

SEQ ID NO: 183 - protein, 1017 aa, Aspergillus niger
MTRITKLCVLLLSSIGLLAAAQNQTETGWPLHDDGLTTDVQWDHYSFKVHGERIFVFSGEFHYWRIPVPGLWRDILEKIKAAGFTTFAFYSSWAWHAPNNHTVDFSTGARDITPIFELAKELGMYIIVRPGPYINAEASAGGFPLWLTTGDYGTLRNNDSRYTEAWKPYFEKMTEITSRYQITNGHNTFCYQIENEYGDQWLSDPSERVPNETAIAYMELLESSARENGILVPFTANDPNMNAMAWSRDWSNAGGNVDVVGLDSYPSCWTCDVSQCTSTNGEYVAYQVVEYYDYFLDFSPTMPSFMPEFQGGSYNPWAGPEGGCGDDTGVDFVNLFYRWNIAQRVTAMSLYMLYGGTNWGAIAAPVTATSYDYSSPISEDRSISSKYYETKLLSLFTRSARDLTMTDLIGNGTQYTNNTAVKAYELRNPTTNAGFYVTLHEDSTVGTNEAFSLRVNTSAGNLIVPRLGGSIRLNGHQSKIIVTDFTFGSETLLYSTAEVLTYAVIDKKPTLVLWVPTDESGEFAVKGAKSGSVVSKCQSCPAINFHQQGGNLIVGFTQSQGMSVVQIDNDIRVVLLDRTAAYKFWAPALTEDPLVPEDEAVVLIQGPYLVRSASLEKSTLAIKGDSINETAVEIFAPENVKTITWNGKQLKTSKSSYGSLKATIAAPASIQLPAFTSWKVNDSLPERLPTYDASGPAWVDANHMTTANPSKPATLPVLYADEYGFHNGVRLWRGYFNGTASGVFLNVQGGSAFGFSAYLNGHFLGSYLGNASIEQANQTFLFPNNITHPTTQNTLLVIHDDTGHDETTGALNPRGILEARLLPSDTTNNSTSPEFTHWRIAGTAGGESNLDPVRGAWNEDGLYAERVGWHLPGFDDSTWSSVSSSSSLSFTGATVKFFRTTIPLDIPRGLDVSISFVLGTPDNAPNAYRAQLFVNGYQYGRFNPYIGNQVVFPVPVGVLDYTGENTIGVAVWAQTEDGAGITVDWKVNYVADSSLDVSGLETGELRPGWSAERLKFA

SEQ ID NO: 184 - protein, 1022 aa, Aspergillus oryzae
MLISKTVLSGLALGASFVGVSAQQNSTRWPLHDNGLTDTVEWDHYSFLINGQRHFVFSGEFHYWRIPVPELWRDLLEKIKAAGFTAFSIYNHWGYHSPKPGVLDFENGAHNFTSIMTLAKEIGLYMIIRPGPYVNAEANAGGLPLWTTTGAYGKLRDNDPRYLEALTPYWANISKIIAPHLITNDGNVILYQIENEYAEQWLDEETHEPNTSGQEYMQYLEDVARENGIDAPLIHNLPNMNGHSWSKDLSNATGNVDVIGVDSYPTCWTCNVSECASTNGEYIPYLKLTYPQISYFKELSPTQPSFMPEFQGGSYNPWGGPQGGCPDDLGPDFANLFYRNLISQRVSAISLYMLYGGTNWGWHASTDVATSYDYSSPISENRKLIEKYYETKVLTQFTKIAQDLSKVDRLGNSTKYSSNPAVSVAELRNPDTGAAFYVTQHEYTPSGTVEKFTVKVNTSEGALTIPQYGSQITLNGHQSKIIVTDFKFGSKTLLYSTAEVLTYAVIDGKEVLALWVPTGESGEFTVKGVNSAKFADKGRTANIEIHPGTNNVTVSFMQRSGMSLVELGDGTRIVLLDRSAAHVFWSTPLNNDPAEAGNNTVLVHGPYLVRSAKLEGCDLKLTGDIQNSTEVSIFAPKSVCSVNWNGKKTSVKSAKGGVITTTLGGDAKFELPTISGWKSADSLPEIAKDYSATSKAWVVATKTNSSNPTPPAPNNPVLYVDENDIHVGNHIYRATFPSTDEPPTDVYLNITGGRAFGYSVWLNSDFIGSWLGTATTEQNDQTFSFSNATLSTDEDNILVVVMDNSAHDLRDGALNPRGITNATLIGPGSYSFTEWKLAGNAGFEDHLDPVRAPLNEGSLYAERVGIHLPGYEFDEAEEVSSNSTSLTVPGAGIRVFRTVVPLSVPQGLDVSISFRLTAPSNVTFTSAEGYTNQLRALLFVNGYQYGRFNPYIGHQIDFPVPPGVLDYNGDNTIAVTVWSQSVDGAEIKVDWNVDYVHETSFDMNFDGAYLRPGWIEERREYA

SEQ ID NO: 185 - protein, 1022 aa, Aspergillus terreus
MARFPQLLFLLLASIGLLSAAQNHSDSEWPLHDNGLSTVVQWDHYSFHVHGQRIFVFSGEFHYWRIPVPGLWRDILEKIKAAGFTAFAFYSSWGYHAPNNHTVDFSTGARDITPIYELAKELGMYIIVRPGPYVNAEASAGGYPLWVTTGAYGSLRNDDARYTAAWKPYFAKMSEITSQYQVTDGHNTFCYQIENEYGQQWIGDPVDRNPNQTAVAYMELLEASARENGIVVPLTANDPNMNTKSWGSDWSHAGGNVDVVGLDSYPSCWTCDVTQCTSTNGEYVPYKVMQYYDYFQEVQPTMPGFMPEFQGGSYNPWAGPEGGCPGDTGVDFANLFYRWNIAQRVTAMSLYMLYGGTNWGAIAAPVTATSYDYSSPISEDRSIGSKYYETKLLALFTRSATDLTMTDRIGNGTHYTNNPAVAAYELRNPVTNGAFYVTIHADSTVGTDESFRLNVNTSAGALTVPSKGSIRLNGHQSKIIVTDFRFGPSHTLLYSTAEVLTHAVMDKKATLVLWVPTGESGEFAVKGAKSGKVERCPQCSNATFTRKKDVLVVNFTQAGGMSVLQLNNGVRVVLLDRAAAYKFWAPPLTDDPFAPETDLVLVQGPYLVRSASLSGSTLALRGDSANETALEVFASKKVHTVTWNGKRIKTSRSSYGSLTASLAAPPAVSLPALSSAQWKSQDSLPERLPSYDDSGPAWVDANHMTTQNPRTPDTLPVLYADEYGFHNGIRLWRGSFTDAASGVYLNVQGGAAFGWSAYLNGHFLGSHLGTATTSQANKTLLFPAGTLRKNTTNTILVIHDDTGHDQTTGALNPRGILAARLLAPSDSSTAPNFTQWRVAGTAGGESDLDPVRGVYNEDGLFAERMGWHLPGFDDADWPANNSTTTRGAQVSLSVTGATVRFFRAVVPLHLPRGVDASISFMLGTPAGASTAYRAQLFVNGYQYGRFYPHIGNQVVYPVPAGVLDYDGENTIGVAVWAQSEAGAEMSLDWRVNYVADSSLDAVRVAAEGALRPGWSEERLQYA

SEQ ID NO: 186 - protein, 1025 aa, Emericella nidulans
MATAFWLLLFLLGSLHVLTAAQNSSQSEWPIHDNGLSKVVQWDHYSFYINGQRIFLFSGEFHYWRIPVPALWRDILEKIKAIGFTGFAFYSSWAYHAPNNQTVDFSTGARDITPIYDLAKELGMYIIVRPGPYVNAEASAGGFPLWLTTGAYGSTRNDDPRYTAAWEPYFAEVSEITSKYQVTDGHYTLCYQIENEYGQQWIGDPRDRNPNQTAIAYMELLQASARENGITVPLTGNDPNMNTKSWGSDWSDAGGNLDTVGLDSYPSCWSCDVSVCTGTNGEYVPYKVLDYYDYFQEVQPTMPFFMPEFQGGSYNPWDGPEGGCTEDTGADFANLFYRWNIGQRVSAMSLYMMFGGTNWGGIAAPVTASSYDYSAPISEDRSIGSKYYETKLLALFTRCAKDLTMTDRLGNGTQYTDNEAVIASELRNPDTNAAFYVTTHLDTTVGTDESFKLHVNTSKGALTIPRHGGTIRLNGHHSKIIVTDFNFGSETLLYSTAEVLTYAVFDRKPTLVLWVPTGESGEFAIKGAKSGSVAKCSGCSNIKFHRDSGSLTVAFTQGEGISVLQLDNGVRVVLLDRQKAYTFWAPALTDNPLVPEGESVLVSGPYLVRTARLARSTLTLRGDSKGETLEIFAPRKIKKVTWNGKAVEATRTSYGSLKAILAKPPSVELPTLNGWKYSDSLPERFPTYDDSGAAWVEIDANHMTTPNPNKPATLPVLYADEYGFHNGVRLWRGYFNSSASGVYLNIQGGAAFGWSAWLNGHFLGSHLGSASIQQANGTLDFPANTLNTEGTPNVLLVVHDDTGHDQTTGVLNPRGILEARLLSEASDNNDDDSPGFTHWRVAGTAGGESDLDPVRGVYNEDGLYAERVGWHLPGFDDSKWATVNGTSLSFTGATVRFFRTVIPPLSIPENTDVSISFVFSTPNVNNTSAGNTSAFRAQLFVNGYQYGRYNPYVGNQVVYPVPPGILDYNGENTIGVAVWAQTEAGARLNLDWRVNYVLGSSLDAGRLDLSFVAIAYVYIFECLQL

SEQ ID NO: 187 - protein, 1015 aa, Neosartorya fischeri
MAHIYRLLLLLLSNLWFSAAAQNQSETEWPLHDNGLSKVVQWDHYSFQVNGQRIFIFSGEFHYWRIPVPELWRDILEKVKATGFTAFAFYSSWAYHAPNNRTVDFSTGARDITPIFELAKELGMYMIVRPGPYVNAEASAGGFPLWLTTGEYGSLRNDDPRYTAAWTPYFANMSQITSKYQVTDGHNTLVYQIENEYGQQWIGDPKDRNPNKTAVAYMELLEASALENGITVPLTSNDPNMNSKSWGSDWSNAGGNVDVAGLDSYPSCWTCDVSQCTSTNGEYVPYKVIDYYDYFQEVQPTLPSFMPEFQGGSYNPWAGPEGGCPQDTGAEFANLFYRWNIGQRVTAMSLYMLYGGTNWGAIAAPVTATSYDYSAPISEDRSIGAKYSETKLLALFTRTAKDLTMTEAIGNGTQYTTNTAVRAFELRNPQTNAGFYVTFHNDTTVGGNQAFKLHVNTSVGALTVPKNEGVIQLNGHQSKIIVTDFTLGKRTLLYSTAEVLTYAVFENRPTLVLWVPTGESGEFAIKGTKSGKVENGDGCSGINFKREKDYLVVNFSQAKGLSVLRLDNGVRVVLLDKAAAYRFWAPALTDDPIVQETETVLVHGPYLVRSASVSKSTLALRGDSVEKTTLEIFAPHSVRKITWNGKEVKTSQTPYGSLKATLAAPPTIKLPALTSWRSNDSLPERLPSYDDSGPAWIEANHMTTSNPSPPATLPVLYADEYGFHNGVRLWRGYFNGSASGVFLNIQGGSAFGWSAWLNGHFLDSHLGTATTSQANKTLTFSSSILNPTENVLLIVHDDTGHDQTTGALNPRGIIEARLLSNDTSSPAPGFTQWRIAGTAGGESNLDPIRGVFNEDGLFAERMGWHLPGFDDSAWTPENSTTSASSALSFTGATVRFFRTVVPLDIPAGLDVSISFVLSTPSAAPKGYRAQLFVNGYQYGRYNPHIGNQVVFPVPPGILDYQGDNTIGLAVWAQTEEGAGIQVDWKVNYVADSSLSVAGFGKGLRPGWTEERLKFA

SEQ ID NO: 188 - protein, 985 aa, Aspergillus clavatus
MRILSLLFLLLLGFLAGNRVVSATDHGKTTDVTWDRYSLSVKGERLFVFSGEFHYQRLPVPEMWLDVFQKLRANGFNAISVYFFWGYHSASEGEFDFETGAHNIQRLFDYAKEAGIYVIARAGPYCNAETTAGGYALWAANGQMGNERTSDDAYYAKWRPWILEVGKIIAANQITNGGPVILNQHENELQETSYEADNTLVVYMKQIARVFQEAGIVVPSSHNEKGMRAVSWSTDHHDVGGAVNIYGLDSYPGGLSCTNPSSGFNLVRTYYQWFQNSSYTQPEYLPEFEGGWFQPWGGHDYDTCATELSPEFADVYYKNNIGSRVTLQNIYMVFGGTNWGHSAAPVVYTSYDYSAPLRETREIRDKLKQTKLIGLFTRVSSDLLKTHMEGNGTGYTSDSSIYTWALHNPDTNAGFYVLAHKTSSSRSVTEFSLNVTTSAGAISIPDIQLDGRQSKIIVTDYQFGKSSALLYSSAEVLTYANLDVDVLVLYLNVGQKGLFVFKDERSKLSFQTYGNTNVTASVSSHGTQYIYTQAEGVTAVKFSNGVLAYLLDKESAWNFFAPPTTSNPQVAPDEHILVQGPYLVRGVTINHDTVEIIGDNANTTSLEVYAGNLRVKVVKWNGKAIKSRRTAYGSLVGRAPGAEDARISPPSLDSWSAQDTLPDIQPDYDDSRWTVCNKTASVNAVPLLSLPVLYSGDYGYHAGTKVYRGRFDGRNVTGANVTVQNGVASGWAAWLNGQFVGGVAGAIDLAVTSAVLSFNSSLLHDRDNVLTVVTDYTGHDQNSVRPKGTQNPRGILGATLIGGGKFTSWRIQGNAGGEKNIDPVRGPINEGGLYGERMGWHLPGYKAPRSAAKSSPLDGISGAEGRFYTTTFTLKLDRDLDVPIGLQLGAPAGTQAVVQVFMNGYQFGHYLPHIGPQSLFPFPPGVINNRGENTLAISMWALTDAGAKLDQVELVAYGKYRSGFDFNQDWGYLQPQWKDNRRQYA

SEQ ID NO: 189 - protein, 983 aa, Neosartorya fumigata
MRIFSFLFLLLLGILTGQGLVSGTDNGKTTDVTWDKYSLSVKGQRLFVFSGEFHYQRLPVPELWLDVFQKLRANGFNAISVYFFWSFHSASEGEFDFENGAHDIQRLFDYAKEAGLYVIARAGPYCNAETSAGGFALWAANGQMGNERTSDEAYYEKWRPWILEVGKIIAKNQITNGGPVILNQHENELVETTYDPNHTLVVYMKQIAQVFEEAGIVVPSSHNEKGMRGVSWSTDYHNVGGAVNIYGLDSYPGGLSCTNPNSGFNLVRTYHQWFQNYSFTQPSYLPEFEGGWFQPWGGSFYDTCATELSPEFPDVYYKNNIGSRVTLHSIYMTYGGTNWGHSAAPVVYTSYDYAAPLRETREIRDKLKQTKLIGLFTRVSKDLLKTYMEGNGTGYTSDSSIYTWSLRNPDTNAGFYVLAHSTSSTRDVTTFTLNVTTSAGAISIPDIELNGRQSKIIVTDYNFGTNSTLLFSSAEVLTYANLDVNVLVFYLNVGQKGTFVFKDEPKLAFQTYGNSNLTTSESSYGTQYSYTQGKGVTAVKFSNGVLAYFLDKESAWNFFAPPTTSSPQVAPNEHILVQGPYLVRGASVNHGTVEITGDNANTTSIEVYTGNSQVKKIKWNGKTIETRKTAYGSLIGTAPGAEDVKIQLPSLDSWKAQDTLPEIQPDYDDSKWTVCNKTTSVNAIAPLSLPVLYSGDYGYHAGTKVYRGRFDGRNVTGANVTVQNGAAAGWAAWVNGQYAGGSAGSPNLAATSAVLTFNSSSLKDQDNVLTVVTDYTGHDQNSVRPKGTQNPRGILGATLIGGGNFTSWRIQGNAGGEKNIDPVRGPMNEGGLYGERMGWHLPGYKVPKSASKSSPLDGVSGAEGRFYTTTFKLKLDKDLDVPIGLQLGAPEGTKAVVQVFMNGYQFGHYLPHTGPQSLFPFPPGVINNRGENTLAISMWALTDAGAKLDKVELVAYGKYRSGFDFNQDWGYLQPGWKDRSQYA

SEQ ID NO: 190 - protein, 984 aa, Aspergillus flavus
MRLLSFIYLVWLALLTGTPQVSATDNGKTSDVAWDKYSLSVKGERLFVFSGEFHYQRLPVPELWLDVFQKLRANGFNTISVYFFWSYHSASEDVFDFTTGAHDIQRLFDYAKQAGLYVIARAGPYCNAETSAGGFALWAANGQMGSERTSDEAYYKKWKPWILEVGKIIAANQITNGGPVILNQHENELQETTYDSNDTKVIYMEQVAKAFEEAGVVVPSSHNEKGMRTVSWSTDYKNVGGAVNVYGLDSYPGSLSCANPNSGFNLLRTYYQWFQNYSYTQPEYLAEFEGGWFQPWGGSFYDSCASELSPEFADVYYKNNIGSRVTLHNIYMTFGGTNWGHSAAPVVYTSYDYGSPLRETREIRDKLKQTKLLGLFTRVSKDLLKTYMEGNGTSYTSDDSIYTWALRNPDSDAGFYVVAHNTSSSREVTTFSLNITTSAGALTIPDIELDGRQSKIIVTDYSIGSESSLLYSSAEVLTYATLDVDVLVFYLNAGQKGAFVFKDAPADLKYQTYGNSNLSALETSQGTQYSYTQGEGVTAVKFSNGVLVYLLDKETAWNFFAPPTVSSPTVAPNEHILVFGPYLVRGASIKHDTVEIVGDNSNSTSIEIYTGDEHVKKVSWNGNLIDTRATAYGSLIGTVPGAEDIEISLPSLSSWKAQDTLPEISPDYDDSRWTICNKTTSVNSVAPLSLPVLYSGDYGYHTGTKIYRGRFDGQNATGANVTVQNGVAAGWAAWLNGAYVGGFSGDPDKVASWEVLKFNHSSLRSRDNVLTIITDYTGHDQNSQKPIGTQNPRGIMGATLIGGGNFTLWRIQGNAGGEKNIDPVRGPMNEGGLYGERMGWHLPGYQVPESALDSSPLEGVSGAEGRFYTTSFQLDLEEDLDVPIGLQLSAPAGTEAVVQIFMNGYQFGHYLPHIGPQSLFPFPPGVIYNRGQNSLAISMWALTDAGARLEQVELKAYAKYRSGFDFNRDWTYLQPGWKDRTEYA

SEQ ID NO: 191 - protein, 983 aa, Neosartorya fumigata; identical to SEQ ID NO: 189

SEQ ID NO: 192 - protein, 994 aa, Aspergillus niger
MKLQSILSCWAILVAQIWATTDGLTDLVAWDPYSLTVNGNRLFVYSGEFHYPRLPVPEMWLDVFQKMRAHGFNAVSLYFFWDYHSPINGTYDFETGAHNIQRLFDYAQEAGIYIIARAGPYCNAEFNGGGLALYLSDGSGGELRTSDATYHQAWTPWIERIGKIIADNSITNGGPVILNQIENELQETTHSASNTLVEYMEQIEEAFRAAGVDVPFTSNEKGQRSRSWSTDYEDVGGAVNVYGLDSYPGGLSCTNPSTGFSVLRNYYQWFQNTSYTQPEYLPEFEGGWFSAWGADSFYDQCTSELSPQFADVYYKNNIGQRVTLQNLYMLYGGTNWGHLAAPVVYTSYDYSAPLRETRQIRDKLSQTKLVGLFTRVSSGLLGVEMEGNGTSYTSTTSAYTWVLRNPNTTAGFYVVQQDTTSSQTDITFSLNVNTSAGAFTLPNINLQGRQSKVISTDYPLGHSTLLYVSTDIATYGTFGDTDVVVLYARSGQVVSFAFKNTTKLTFEEYGDSVNLTSSSGNRTITSYTYTQGSGTSVVKFSNGAIFYLVETETAFRFWAPPTTTDPYVTAEQQIFVLGPYLVRNVSISGSVVDLVGDNDNATTVEVFAGSPAKAVKWNGKEITVTKTDYGSLVGSIGGADSSSITIPSLTGWKVRDSLPEIQSSYDDSKWTVCNKTTTLSPVDPLSLPVLFASDYGYYTGIKIYRGRFDGTNVTGANLTAQGGLAFGWNVWLNGDLVASLPGDADETSSNAAIDFSNHTLKQTDNLLTVVIDYTGHDETSTGDGVENPRGLLGATLNGGSFTSWKIQGNAGGAAGAYELDPVRAPMNEGGLLAERQGWHLPGYKAKSSDGWTDGSPLDGLNKSGVAFYLTTFTLDLPKKYDVPLGIQFTSPSTVDPVRIQLFINGYQYGKYVPYLGPQTTFPIPPGIINNRDKNTIGLSLWAQTDAGAKLENIELISYGAYESGFDAGNGTGFDLNGAKLGYQPEWTEARAKYT

SEQ ID NO: 193 - protein, 984 aa, Aspergillus oryzae
MRLLSFIYLVWLALLTGTPQVSATDNGKTSDVAWDKYSLSVKGERLFVFSGEFHYQRLPVPELWLDVFQKLRANGFNTISVYFFWSYHSASEDVFDFTTGAHDIQRLFDYAKQAGLYVIARAGPYCNAETSAGGFALWAANGQMGSERTSDEAYYKKWKPWILEVGKIIAANQITNGGPVILNQHENELQETTYDSNDTKVIYMEQVAKAFEEAGVVVPSSHNEKGMRTVSWSTDYKNVGGAVNVYGLDSYPGSLSCANPNSGFNLLRTYYQWFQNYSYTQPEYLAEFEGGWFQPWGGSFYDSCASELSPEFADVYYKNNIGSRVTLHNIYMTFGGTNWGHSAAPVVYTSYDYGSPLRETREIRDKLKQTKLLGLFTRVSKDLLKTYMEGNGTSYTSDDSIYTWALRNPDSDAGFYVVAHNTSSSREVTTFSLNITTSAGAMTIPDIELDGRQSKIIVTDYSIGSESSLLYSSAEVLTYATLDVDVLVFYLNAGQKGAFVFKDAPADLKYQTYGNSNLSALETSQGTQYSYTQGEGVTAVKFSNGVLVYLLDKETAWNFFAPPTVSSPTVAPNEHILVFGPYLVRGASIKHDTVEIVGDNSNSTSIEIYTGDEHVKKVSWNGNLIDTRATAYGSLIGTVPGAEDIEISLPSLSSWKAQDTLPEISPDYDDSRWTICNKTTSVNSVAPLSLPVLYSGDYGYHTGTKIYRGRFDGQNATGANVTVQNGVAAGWAAWLNGAYVGGFSGDPDKVASWEVLKFNHSSLRSRDNVLTIITDYTGHDQNSQKPIGTQNPRGIMGATLIGGGNFTLWRIQGNAGGEKNIDPVRGPMNEGGLYGERMGWHLPGYQVPESALDSSPLEGVSGAEGRFYTTSFQLDLEEDLDVPIGLQLSAPAGTEAVVQIFMNGYQFGHYLPHIGPQSLFPFPPGVIKNRGQNSLAISMWALTDAGARLEQVELKAYAKYRSGFDFNRDWTYLQPGWKDRTEYA

SEQ ID NO: 194 - protein, 983 aa, Neosartorya fischeri
MRIFSFLFLLLLGILTGQGLVSGTDNGKTTDVTWDKYSLSVKGQRLFVFSGEFHYQRLPVPELWLDVFQKLRANGFNAISVYFFWSFHSASEGEFDFENGAHDIQRLFDYAKEAGLYVIARAGPYCNAETSAGGFALWAANGQMGNERTSDEAYYEKWRPWILEVGKIIAKNQITNGGPVILNQHENELTETTYDPNHTLVVYMKQIAQVFEEAGIVVPSSHNEKGMRGVSWSTDYHNVGGAVNIYGLDSYPGGLSCTNPNSGFRLVRTYYQWFQNYSSTQPSYMPEFEGGWFQPWGGSFYDTCATELSPEFPDVYYKNNIGSRVTLHSIYMTYGGTNWGHSAAPVVYTSYDYAAPLRETREIRDKLKQTKLIGLFTRVSTDLLKTYMEGNGTGYTSDSSIYTWSLRNPDTNAGFYVLAHSTSSARDVTTFSLNATTSAGAISIPDIELNGRQSKIIVTDYNFGTNSTLLFSSAEVLTYANLDVNVLVFYLNVGQKGTFALKDEPKLAFQTYGNSNVTTSESSYGTQYSYTQGEGVTAVKFSNGVLAYLLDKESAWNFFAPPTTSSPQVAPNEHILVQGPYLVRGASINHGTVEITGDNANTTSIEVYTGNSQVKKVKWNGKTIETRKTAYGSLIGTVPGAEDVKIRLPSLDSWKAQDTLPEIQPDYDDSTWTVCNKTTSVNAIAPLSLPVLYSGDYGYHAGTKVYRGRFDGRNVTGANVTVQNGAAAGWAAWVNGQYAGGSAGSPSLAATSAVLTFNGLSLKDRDNVLTVVTDYTGHDQNSVRPKGTQNPRGILGATLTGGGNFTSWRIQGNAGGEKNIDPVRGPMNEGGLYGERMGWHLPGYKVPKSASKSSPLDGVSGAEGRFYTTTFKLKLDKDLDVPIGLQLGAPEGTKAVVQVFMNGYQFGHYLPHTGPQSLFPFPPGVINNRGENTLAISMWALTDAGAKLDKVELVAYGKYRSGFDFNQDWGYLQPGWKDRSQYA

SEQ ID NO: 195 - protein, 1011 aa, Neosartorya fumigata
MKSLLKRLIALAAAYSVAAAPSFSHHSSQDAANKRELLQDLVTWDQHSLFVRGERLMIFSGEFHPFRLPVPGLWFDVFQKIKSLGFNAVSFYTDWGLMEGNPGHVVTDGIWSLDEFFTAAREAGLYLIARPGPYINAETSAGGIPGWVLRRKGIIRSNSEDYLRATDTYMATLGKIIAKAQITNGGPVILVQPENEYTTWPNVSESEFPTTMNQEVMAYAEKQLRDAGVVVPTVVNDNKNLGYFAPGTGLGETDLYGIDAYPMRYDCGNPYVWPTYRFPRDWQHEHRNHSPTTPFAIMEFQGGSGDGWGGVTEDGCAILVNNEAVRVVYKNNYGFGVRVFNIYMTYGGTNWGNLGYYGGYTSYDYGAAITEDRQIWREKYSEEKLQANFLKVSPAYLTSTPGNGVNGSYTGNKDITVTPLFGNGTTTNLYLVRHADFTSTGSAQYNLSISTSVGNVTIPQLGGSLSLNGRDSKFHITDYDVGGFNLIYSSAEVFTWAKGDNKKRVLVLYGGAGELHEFALPKHLPRPTVVEGSYVKIAKQGSAWVVQWEVAAQRRVLRAGKLEIHLLWRNDAYQHWVLELPAKQPIANYSSPSKETVIVKGGYLLRSAWITDNDLHLTGDVNVTTPLEVISAPKRFDGIVFNGQSLKSTRSKIGNLAATVHYQPPAISLPDLKRLDWKYIDSLPEISTEYNDEGWTPLTNTYTNNTREFTGPTCLYADDYGYHGGSLIYRGHFTANGDESWVFLNTSGGVGFANSVWLNQTFLGSWTGSGRNMTYPRNISLPHELSPGEPYVFTVVIDHMGQDEEAPGTDAIKFPRGILDYALSGHELSDLRWKMTGNLGGEQYQDLTRGPLNEGAMYAERQGYHLPSPPTSSWKSSNPIKEGLTGAGIGFYATSFSLDLPEGYDIPLSFRFNNSASAARSGTSYRCQLFVNGYQFGKYVNDLGPQTKFPVPEGILNYNGVNYVAVSLWALESQGALIGGLDLVASTPILSGYRKPAPAPQPGWKPRRGAY

SEQ ID NO: 196 - protein, 1011 aa, Neosartorya fumigata; identical to SEQ ID NO: 195

SEQ ID NO: 197 - protein, 1011 aa, Neosartorya fischeri
MKFLLRRFIALAAASSVVAAPSVSHLSLQDAANRRELLQDLVTWDQHSLFVRGERLMIFSGEFHPFRLPVPGLWFDVFQKITSLGFNAVSFYTDWGLMEGNPGHVVTDGIWSLDEFFTAASEAGIYLIARPGPYINAETSAGGIPGWVLRLKGIIRSNSEDYLRATDTYMATLGKIIAKAQITNGGPVILVQPENEYTTWPNVSESEFPTTMNKEVMAYAEKQLRDAGVVVPTVVNDNKNLGYFAPGTGLGETDLYGIDAYPMRYDCGNPYVWPTYRFPRDWQHTHRNHSPTTPFAIMEFQGGSGDGWGGVTEDGCAILVNNEAVRVVYKNNYGFGVGVFNIYMTYGGTNWGNLGYHGGYTSYDYGAAITEDRQIWREKYSEEKLQANFLKVSPAYLTATPGNGVNGSYTGNKDIAVTPLFGNGTTTNFYLVRHADFTSTGSVQYQLSVSTSVGNVTIPQLGGSLSLNGRDSKFHVTDYDVGEFNLIYSSAEIFTWAKGDNKKRVLVLYGGAGELHEFALPKHLPRPTVVDGSDVKMAKKGSAWVVQWEVTAQRRVLRAGKLEIHLLWRNDAYQHWVLELPAKQPIANYSSPSKETVLVKGGYLLRSACITNNKLHLTGDVNATTPLEVISAPKRFDGIVFNGQSLKSTRSKIGNLAATVRYQPPAISLPDLKRLDWKYLDSLPEISPDYSDEGWMSLTNTYTNNTRKFTGPTCLYADDYGYHGGSLIYRGHFKANGDESWVFLNTSGGVGFANSVWLNQTFLGSWTGSGNNMTYPRNISLPHELSPGKPYVFTVVIDHMGQDEEAPGTDAIKFPRGILDYALSGHEVSDLKWKMTGNLGGEQYQDSTRGPLNEGAMYAERRGYHLPNPPTSSWKSSSPINDGLTGAGIGFYATSFSLDLPEGYDIPLSFLFNNSASDARSGTSYRCQLFVNGYQFGKYVNDLGPQTNFPVPEGILNYNGVNYVAVSLWALEPQGALVGGLELVASTPILSAYRKPVPAPQPGWKPRRGAY

SEQ ID NO: 198 - protein, 867 aa, Aspergillus clavatus
MRFSWLEVAVTAASLANANVCIPLFPWYVSSPPFYPSPWANGQGEWAEAHQRAVEIVSQMTLTEKVNLTTGTGWMMEECVGQTGSVPRLGINWGLCGQDSPLGIRFSDLNSAFPAGINVAATWDKTLAYLRGKAMGEEFNDKGIDIQLGPAAGPLGKYPDGGRIWEGFSPDPALTGVLFAETIKGIQDAGVIATAKHYILNEQEQFRQVAEAQGYGYNITETLSSNVDDKTMHELYLWPFADAVRAGVGAIMCSYNQINNSYGCQNSQTLNKLLKAELGFQGFVMSDWSAHHSGVGAALAGLDMSMPGDISFDDGLSFWGANMTVGVLNGTIPAWRVDDMAVRIMTAYYKVGRDRLRVPPNFSSWTRDEYGYEHAAVSEGAWKKVNDFVNVQRDHAQLIREVGSASTVLLKNVGALPLTGKERKVGIFGEDAGSNPWGPNGCENRGCDNGTLAMAWGSGTAEFPYLVTPEQAIQSEVIKNGGNVFPVTHNGALTQMANIASQSSVSLVFVNADAGEGFISVDGNIGDRKNLTLWKNGEEVIKTVASHSNNTVVVIHSVGPILVDEWHDNPNITAILWAGLPGQESGNSIADVLYGRVNPSAKTPFTWGKTRESYGAPLVTKPNNGNGAPQDDFSEGVFIDYRYFDKRNETPVYEFGFGLSYTSFGYSHLRVQPLNGSTYVPATGTTGPAPAYGSIGSAADYLFPEGLKRITKFIYPWLNSTDLKASSADPNYGWEDSEYIPEAATDGSPQPILKAGGAPGGNPTLYHDLVKVSATITNTGNVAGYEVPQLYVSLGGPNEPRVVLRKFDRIHLAPGEQKVWTTTLTRRDLANWDVEAQDWVITKYPKRVYVGSSSRKLPLRAPLPRVQ

SEQ ID NO: 199 - protein, 873 aa, Neosartorya fumigata
MRFGWLEVAALTAASVANAQVFDNSHGNNQELAFSPPFYPSPWADGQGEWADAHRRAVEIVSQMTLAEKVNLTTGTGWEMDRCVGQTGSVPRLGINWGLCGQDSPLGIRFSDLNSAFPAGTNVAATWDKTLAYLRGKAMGEEFNDKGVDILLGPAAGPLGKYPDGGRIWEGFSPDPALTGVLFAETIKGIQDAGVIATAKHYILNEQEHFRQVGEAQGYGYNITETISSNVDDKTMHELYLWPFADAVRAGVGAVMCSYNQINNSYGCQNSQTLNKLLKAELGFQGFVMSDWSAHHSGVGAALAGLDMSMPGDISFDDGLSFWGTNLTVSVLNGTVPAWRVDDMAVRIMTAYYKVGRDRLRIPPNFSSWTRDEYGWEHSAVSEGAWTKVNDFVNVQRSHSQIIREIGAASTVLLKNTGALPLTGKEVKVGVLGEDAGSNPWGANGCPDRGCDNGTLAMAWGSGTANFPYLVTPEQAIQREVISNGGNVFAVTDNGALSQMADVASQSSVSLVFVNADSGEGFISVDGNEGDRKNLTLWKNGEAVIDTVVSHCNNTIVVIHSVGPVLIDRWYDNPNVTAIIWAGLPGQESGNSLVDVLYGRVNPSAKTPFTWGKTRESYGAPLLTEPNNGNGAPQDDFNEGVFIDYRHFDKRNETPIYEFGHGLSYTTFGYSHLRVQALNSSSSAYVPTSGETKPAPTYGEIGSAADYLYPEGLKRITKFIYPWLNSTDLEDSSDDPNYGWEDSEYIPEGARDGSPQPLLKAGGAPGGNPTLYQDLVRVSATITNTGNVAGYEVPQLYVSLGGPNEPRVVLRKFDRIFLAPGEQKVWTTTLNRRDLANWDVEAQDWVITKYPKKVHVGSSSRKLPLRAPLPRVY

SEQ ID NO: 200 - protein, 861 aa, Aspergillus flavus
MKLGWIEVAALAAASVVSAKDDLAYSPPFYPSPWADGQGEWAEVYKRAVDIVSQMTLTEKVNLTTGTGWQLERCVGQTGSVPRLNIPSLCLQDSPLGIRFSDYNSAFPAGVNVAATWDKTLAYLRGQAMGEEFSDKGIDVQLGPAAGPLGAHPDGGRNWEGFSPDPALTGVLFAETIRGIQDAGVIATAKHYIMNEQEHFRQQPEAAGYGFNVSDSLSSNVDDKTMHELYLWPFADAVRAGVGAVMCSYNQINNSYGCENSETLNKLLKAELGFQGFVMSDWTAHHSGVGAALAGLDMSMPGDVTFDSGTSFWGANLTVGVLNGTIPQWRVDDMAVRIMAAYYKVGRDTKYTPPNFSSWTRDEYGFAHNHVSEGAYERVNEFVDVQRDHADLIRRIGAQSTVLLKNKGALPLSRKEKLVALLGEDAGSNSWGANGCDDRGCDNGTLAMAWGSGTANFPYLVTPEQAIQNEVLQGRGNVFAVTDSWALDKIAAAARQASVSLVFVNSDSGEGYLSVDGNEGDRNNITLWKNGDNVVKTAAENCNNTVVIIHSVGPVLIDEWYDHPNVTGILWAGLPGQESGNSIADVLYGRVNPGAKSPFTWGKTRESYGSPLVKDANNGNGAPQSDFTQGVFIDYRHFDKFNETPIYEFGYGLSYTTFELSDLHVQPLNASRYTPTSGMTEAAKNFGEIGDASEYVYPEGLERIHEFIYPWINSTDLKASSDDSNYGWEDSKYIPEGATDGSAQPLLPASGGAGGNPGLYEDLFRVSVKVKNTGNVAGDEVPQLYVSLGGPNEPKVVLRKFERIHLAPSQEAVWTTTLTRRDLANWDVSAQDWTVTPYPKTIYVGNSSRKLPLQASLPKAQ

SEQ ID NO: 201 - protein, 873 aa, Neosartorya fumigata
MRFGWLEVAALTAASVANAQVFDNSHGNNQELAFSPPFYPSPWADGQGEWADAHRRAVEIVSQMTLAEKVNLTTGTGWEMDRCVGQTGSVPRLGINWGLCGQDSPLGIRFSDLNSAFPAGTNVAATWDKTLAYLRGKAMGEEFNDKGVDILLGPAAGPLGKYPDGGRIWEGFSPDPALTGVLFAETIKGIQDAGVIATAKHYILNEQEHFRQVGEAQGYGYNITETISSNVDDKTMHELYLWPFADAVRAGVGAVMCSYNQINNSYGCQNSQTLNKLLKAELGFQGFVMSDWSAHHSGVGAALAGLDMSMPGDISFDDGLSFWGTNLTVSVLNGTVPAWRVDDMAVRIMTAYYKVGRDRLRIPPNFSSWTRDEYGWEHSAVSEGAWTKVNDFVNVQRSHSQIIREIGAASTVLLKNTGALPLTGKEVKVGVLGEDAGSNPWGANGCPDRGCDNGTLAMAWGSGTANFPYLVTPEQAIQREVISNGGNVFAVTDNGALSQMADVASQSSVSLVFVNADSGEGFISVDGNEGDRKNLTLWKNGEAVIDTVVSHCNNTIVVIHSVGPVLIDRWYDNPNVTAIIWAGLPGQESGNSLVDVLYGRVNPSAKTPFTWGKTRESYGAPLLTEPNNGNGAPQDDFNEGVFIDYRHFDKRNETPIYEFGHGLSYTTFGYSHLRVQALNSSSSAYVPTSGETKPAPTYGEIGSAADYLYPEGLKRITKFIYPWLNSTDLEDSSDDPNYGWQDSEYIPEGARDGSPQPLLKAGGAPGGNPTLYQDLVRVSATITNTGNVAGYEVPQLYVSLGGPNEPRVVLRKFDRIFLAPGEQKVWTTTLNRRDLANWDVEAQDWVITKYPKKVHVGSSSRKLPLRAPLPRVY

SEQ ID NO: 202 - protein, 860 aa, Aspergillus kawachii
MRFTLIEAVALTAVSLASADELAYSPPYYPSPWANGQGDWAQAYQRAVDIVSQMTLAEKVNLTTGTGWELELCVGQTGGVPRLGVPGMCLQDSPLGVRDSDYNSAFPSGMNVAATWDKNLAYLRGKAMGQEFSDKGADIQLGPAAGPLGRSPDGGRNWEGFSPDPALSGVLFAETIKGIQDAGVVATAKHYIAYEQEHFRQAPEAQGYGFNISESGSANLDDKTMHELYLWPFADAIRAGAGAVMCSYNQINNSYGCQNSYTLNKLLKAELGFQGFVMSDWAAHHAGVSGALAGLDMSMPGDVDYDSGTSYWGTNLTVSVLNGTVPQWRVDDMAVRIMAAYYKVGRDRLWTPPNFSSWTRDEYGYKYYYVSEGPYEKVNHYVNVQRNHSELIRRIGADSTVLLKNDGALPLTGKERLVALIGEDAGSNPYGANGCSDRGCDNGTLAMGWGSGTANFPYLVTPEQAISNEVLKNKNGVFTATDNWAIDQIEALAKTASVSLVFVNADSGEGYINVDGNLGDRRNLTLWRNGDNVIKAAASNCNNTIVIIHSVGPVLVNEWYDNPNVTAILWGGLPGQESGNSLADVLYGRVNPGAKSPFTWGKTREAYQDYLVTEPNNGNGAPQEDFVEGVFIDYRGFDKRNETPIYEFGYGLSYTTFNYSNLEVQVLSAPAYEPASGETEAAPTFGEVGNASNYLYPDGLQKITKFIYPWLNSTDLEASSGDASYGQDSSDYLPEGATDGSAQPILPAGGGPGGNPRLYDELIRVSVTIKNTGKVAGDEVPQLYVSLGGPNEPKIVLRQFERITLQPSEETKWSTTLTRRDLANWNVEKQDWEITSYPKMVFVGSSSRKLPLRASLPTVH

SEQ ID NO: 203 - protein, 860 aa, Aspergillus niger
MRFTSIEAVALTAVSLASADELAYSPPYYPSPWANGQGDWAEAYQRAVDIVSQMTLAEKVNLTTGTGWELELCVGQTGGVPRLGIPGMCAQDSPLGVRDSDYNSAFPAGVNVAATWDKNLAYLRGQAMGQEFSDKGADIQLGPAAGPLGRSPDGGRNWEGFSPDPALSGVLFAETIKGIQDAGVVATAKHYIAYEQEHFRQAPEAQGYGFNITESGSANLDDKTMHELYLWPFADAIRAGAGAVMCSYNQINNSYGCQNSYTLNKLLKAELGFQGFVMSDWAAHHAGVSGALAGLDMSMPGDVDYDSGTSYWGTNLTISVLNGTVPQWRVDDMAVRIMAAYYKVGRDRLWTPPNFSSWTRDEYGFKYYYVSEGPYEKVNQFVNVQRNHSELIRRIGADSTVLLKNDGALPLTGKERLVALIGEDAGSNPYGANGCSDRGCDNGTLAMGWGSGTANFPYLVTPEQAISNEVLKNKNGVFTATDNWAIDQIEALAKTASVSLVFVNADSGEGYINVDGNLGDRRNLTLWRNGDNVIKAAASNCNNTIVIIHSVGPVLVNEWYDNPNVTAILWGGLPGQESGNSLADVLYGRVNPGAKSPFTWGKTREAYQDYLYTEPNNGNGAPQEDFVEGVFIDYRGFDKRNETPIYEFGYGLSYTTFNYSNLQVEVLSAPAYEPASGETEAAPTFGEVGNASDYLYPDGLQRITKFIYPWLNSTDLEASSGDASYGQDASDYLPEGATDGSAQPILPAGGGAGGNPRLYDELIRVSVTIKNTGKVAGDEVPQLYVSLGGPNEPKIVLRQFERITLQPSKETQWSTTLTRRDLANWNVETQDWEITSYPKMVFAGSSSRKLPLRASLPTVH

SEQ ID NO: 204 - protein, 861 aa, Aspergillus oryzae
MKLGWIEVAALAAASVVSAKDDLAYSPPFYPSPWADGQGEWAEVYKRAVDIVSQMTLTEKVNLTTGTGWQLERCVGQTGSVPRLNIPSLCLQDSPLGIRFSDYNSAFPAGVNVAATWDKTLAYLRGQAMGEEFSDKGIDVQLGPAAGPLGAHPDGGRNWEGFSPDPALTGVLFAETIKGIQDAGVIATAKHYIMNEQEHFRQQPEAAGYGFNVSDSLSSNVDDKTMHELYLWPFADAVRAGVGAVMCSYNQINNSYGCENSETLNKLLKAELGFQGFVMSDWTAHHSGVGAALAGLDMSMPGDVTFDSGTSFWGANLTVGVLNGTIPQWRVDDMAVRIMAAYYKVGRDTKYTPPNFSSWTRDEYGFAHNHVSEGAYERVNEFVDVQRDHADLIRRIGAQSTVLLKNKGALPLSRKEKLVALLGEDAGSNSWGANGCDDRGCDNGTLAMAWGSGTANFPYLVTPEQAIQNEVLQGRGNVFAVTDSWALDKIAAAARQASVSLVFVNSDSGEGYLSVDGNEGDRNNITLWKNGDNVVKTAANNCNNTVVIIHSVGPVLIDEWYDHPNVTGILWAGLPGQESGNSIADVLYGRVNPGAKSPFTWGKTRESYGSPLVKDANNGNGAPQSDFTQGVFIDYRHFDKFNETPIYEFGYGLSYTTFELSDLHVQPLNASRYTPTSGMTEAAKNFGEIGDASEYVYPEGLERIHEFIYPWINSTDLKASSDDSNYGWEDSKYIPEGATDGSAQPRLPASGGAGGNPGLYEDLFRVSVKVKNTGNVAGDEVPQLYVSLGGPNEPKVVLRKFERIHLAPSQEAVWTTTLTRRDLANWDVSAQDWTVTPYPKTIYVGNSSRKLPLQASLPKAQ

SEQ ID NO: 205 - protein, 861 aa, Aspergillus terreus
MKLSILEAAALTAASVASAQDDLAYSPPYYPSPWADGHGEWSNAYKRAVDIVSQMTLTEKVNLTTGTGWELERCVGQTGSVPRLGIPSLCLQDSPLGIRMSDYNSAFPAGINVAATWDKTLAYQRGKAMGEEFSDKGIDVQLGPAAGPLGRSPDGGRNWEGFSPDPALTGVLFAETIKGIQDAGVIATAKHYILNEQEHFRQVGEAQGYGFNITETVSSNVDDKTMHELYLWPFADAVRAGVGAVMCSYNQINNSYGCQNSLTLNKLLKAELGFQGFVMSDWSAHHSGVGAALAGLDMSMPGDISFDSGTSFYGTNLTVGVLNGTIPQWRVDDMAVRIMAAYYKVGRDRLWTPPNFSSWTRDEYGFAHFFPSEGAYERVNEFVNVQRDHAQVIRRIGADSVVLLKNDGALPLTGQEKTVGILGEDAGSNPKGANGCSDRGCDKGTLAMAWGSGTANFPYLVTPEQAIQNEVLKGRGNVFAVTDNYDTQQIAAVASQSTVSLVFVNADAGEGYLNVDGNMGDRKNLTLWQNGEEVIKTVTEHCNNTVVVIHSVGPVLIDEWYAHPNVTGILWAGLPGQESGNAIADVLYGRVNPGGKTPFTWGKTRASYGDYLLTEPNNGNGAPQDNFNEGVFIDYRRFDKYNETPIYEFGHGLSYTTFELSGLQVQLINGSSYVPTTGQTSAAQTFGKVEDASSYLYPEGLKRISKFIYPWLNSTDLKASTGDPDYGEPNFEYIPEGATDGSPQPRLPASGGPGGNPGLYEDLFQVSVTITNTGKVAGDEVPQLYVSLGGPNEPKRVLRKFERLHLAPGQQKVWTTTLNRRDLANWDVVAQDWKITPYAKTIFVGTSSRKLPLAGRLPRVQ

SEQ ID NO: 206 - protein, 861 aa, Aspergillus terreus
MKLSILEAAALTAASVVSAQDDLAYSPPYYPSPWADGHGEWSNAYKRAVDIVSQMTLTEKVNLTTGTGWELERCVGQTGSVPRLGIPSLCLQDSPLGIRMSDYNSAFPAGINVAATWDKKLAYQRGKAMGEEFSDKGIDVQLGPAAGPLGRSPDGGRNWEGFSPDPALTGVLFAETIKGIQDAGVIATAKHYILNEQEHFRQVGEAQGYGFNITETVSSNVDDKTMHELYLWPFADAVRAGVGAVMCSYNQINNSYGCQNSLTLNKLLKAELGFQGFVMSDWSAHHSGVGAALAGLDMSMPGDISFDSGTSFYGTNLTVGVLNGTIPQWRVDDMAVRIMAAYYKVGRDRLWTPPNFSSWTRDEYGFAHFFPSEGAYERVNEFVNVQRDHAQVIRRIGADSVVLLKNDGALPLTGQEKTVGILGEDAGSNPKGANGCSDRGCDKGTLAMAWGSGTANFPYLVTPEQAIQNEVLKGRGNVFAVTDNYDTQQIAAVASQSTVSLVFVNADAGEGFLNVDGNMGDRKNLTLWQNGEEVIKTVTEHCNNTVVVIHSVGPVLIDEWYAHPNVTGILWAGLPGQESGNAIADVLYGRVNPGGKTPFTWGKTRASYGDYLLTEPNNGNGAPQDNFNEGVFIDYRRFDKYNETPIYEFGHGLSYTTFELSGLQVQLINGSSYVPTTGQTSAAQAFGKVEDASSYLYPEGLKRISKFIYPWLNSTDLKASTGDPEYGEPNFEYIPEGATDGSPQPRLPASGGPGGNPGLYEDLFQVSVTITNTGKVAGDEVPQLYVSLGGPNEPKRVLRKFERLHIAPGQQKVWTTTLNRRDLANWDVVAQDWKITPYAKTIFVGTSSRKLPLAGRLPRVQ

SEQ ID NO: 207 - protein, 863 aa, Emericella nidulans
MKLGWLEAAALTAASVASAQVKQDDLPVSPPYYPSPWSNGEGEWAEAYNRAVQIVSQMTLDEKVNLTTGTGMSEKCVGQTGSVPRLGINSICLQDGPLGIRFTDYNSAFPAGVNVAATWDRQLAYIRGHAMGQEFSDKGIDVQLGPAAGPLGRFPDGGRNWEGFSPDPVLSGVLFAETIKGIQDAGVIATAKHYLLNEQEHFRQVPEANGYGYNITETLSENVDDKTLHELYLWPFADAVRAGVGAIMCSYQHLNNTQACQNSHLLNKLLKAELGFQGFVMSDWSATHSGVGSALAGMDMTMPGDIAFNDGLSYYGPNLTISVLNGTVPQWRVDDMAVRVMAAFYKVGRDRLATPPNFSSWTRAEKGYEHASIDGGAYGTVNEFVDVQQDHASLIRRVGADSIVLLKNEGSLPLTGKERNVAILGEDAGSNPYGANGCDDRGCAQGTLAMGWGSGTANFPYLVTPEQAIQQEVLKGRGNVFAVTDNWALDKVNKTASESTVSLVFVNAGAGEGFISVDGNEGDRKNLTLWKNGENLIKAAASNCNNTIVVIHSVGAVLVDQFYEHPNVTAILWAGLPGQESGNSLVDVLYGRVNPNGKSPFTWGKTREAYGAPLLTEANNGNGAPQTDHTEGVFIDYRHFDRTNQTPIYEFGHGLSYTTFKYSNLTVQKLNAPAYSPASGQTKAAPTFGTIGEAEDYVFPDSITRVREFIYPWINSTDLKESSGDPNYGWDDEDYIPEGAKDGSPQDVLPSGGGAGGNPRLYDDLFRITAIIKNTGPVAGTEVPQLYVSLGGPNEPKVVLRGFDKLVIQPGEERVFTTTLTRRDLSNWDMEKDDWVITSYPKKVFVGSSSRKLPLRASLPAVQ

SEQ ID NO: 208 - protein, 873 aa, Neosartorya fischeri
MRFGWLEVAALTAASVANAQVFDDSHGNNQELAFSPPFYPSPWADGQGEWADAHRRAVEIVSQMTLAEKVNLTTGTGWEMDRCVGQTGSVPRLGINWGLCGQDSPLGIRFSDLNSAFPAGTNVAATWDKTLAYLRGKAMGEEFNDKGVDILLGPAAGPLGKYPDGGRIWEGFSPDPALTGVLFAETIRGIQDAGVIATAKHYIMNEQEHFRQVSEAQGYGYNITETLSSNVDDKTMHELYLWPFADAVRAGVGAVMCSYNQINNSYGCQNSQTLNKLLKAELGFQGFVMSDWSAHHSGVGSALAGLDMSMPGDISFDDGLSFWGTNLTVSVLNGTVPAWRVDDMAVRIMTAYYKVGRDRLRIPPNFSSWTRDEYGWEHFAVSEGAWTKVNDFVNVQRSHSQIIREIGAASTVLLKNKGALPLTGKEVKVGVLGEDAGSNPWGANGCPDRGCDNGTLAMAWGSGTANFPYLVTPEQAIQREVISNGGNVFAVTDNGALSQMADVASQSSVSLVFVNADSGEGYINVDGNEGDRKNLTLWKNGEAVIDTVVSHCNNTIVVIHSVGPVLIDRWYDNPNVTAIIWAGLPGQESGNSLVDVLYGRVNPSAKTPFTWGKTRKSYGAPLLSEPNNGNGAPQDDFNEGVFIDYRHFDKRNETPIYEFGHGLSYTTFGYSHLRVQALNSSSSAYVPTSGETKPAPTYGEIGSAADYLYPEGLKRITKFIYPLLNSTDLEDSSDDPNYGWEDSEYIPEGARDGSPQPLLKAGGAPGGNPTLYQDLVRVSATITNTGNVAGYEVPQLYVSLGGPNEPRVVLRKFDRIFLAPGEQKVWTTTLNRRDLANWDVEAQDWVITKHPKKVHVGSSSRKLPLRAPLPRVY

SEQ ID NO: 209 - protein, 634 aa, Aspergillus flavus
MRIDCTVASLTALASGCQALSTRPYVPRGHSLSRRDDSAPIYRDASYCIDERVDDLLARMTIEEKAGQLFHTRLMDGPLDDEGSGNNAHNSTSNMIGEKHMTHFNLASDITNATETAEFINRIQELALQTRLGIPVTVSTDPRHSFTENVGTGFKAGVFSQWPESIGLAALRDPYVVRKFAEVAKEEYIAVGIRAALHPQVDLSTEPRWARISNTWGENSTLTSELLVEYIKGFQGDKLGPQSVKTVTKHFPGGGPVENGEDSHFAYGKNQTYPGNNLEEHLKPFKAAIAAGATEIMPYYSRPIGTEYEPVAFSFNKRIVTELLRNELGFEGIVLTDWGLITDGYIAGQYMPARAWGVENLTELERAARILDAGCDQFGGEERPELIVQLVQEGTVSEDRIDVSVRRLLREKFVLGLFDNPFVDPESAGRVVGNDYFVRLGREAQRRSYTLLSNNEDIVPLKKIEQSTKFYIEGFNASFIESWNYTVVDSPEEADYALLRYNAPYEPRPGGFEANMHAGSLAFNDTEKARQAKIYSTVPTIVDIVMDRPAVIPEIIEQAKAVFASYGSDSNAFLDVVFGVSAPEGKLPFDLPSSMEAVEAQMEDVPFDTRNPVFKFGHGLSYANPCASSSSKCS

SEQ ID NO: 210 - protein, 638 aa, Aspergillus oryzae
MKVLAPGYLAEASLTALASGCQALSTRPYVPRGYSLSRRNDSTPIYKDASYCIDERVDDLLARMTIEEKAGQLFHTRLMDGPLDDEGSGNNAHNSTSNMIGEKHMTHFNLASDITNATETAEFINRIQELALQTRLGIPVTVSTDPRHSFTENVGTGFKAGVFSQWPESIGLAALRDPYVVRKFAEVAKEEYIAVGIRAALHPQVDLSTEPRWARISNTWGENSTLTSELLVEYIKGFQGDKLGPQSVKTVTKHFPGGGPVENGEDSHFAYGKNQTYPGNNLEEHLKPFKAAIAAGATEIMPYYSRPIGTEYEPVAFSFNKRIVTELLRNELGFDGIVLTDWGLITDGYIAGQYMPARAWGVENLTELQRAARILDAGCDQFGGEERPELIVQLVQEGIISEDRIDVSVRRLLKEKFVLGLFDNPFVDAEAAGRVVGNDYFVRLGREAQRRSYTLLSNNEDIVPLKKIEKSTKFYIEGFNASFIESWNYTVVDSPEEAEYALLRYNAPYEPRPGGFEANMHAGSLAFNDTEKARQAKIYSAVPTIVDIVMDRPAVIPEIIEQAKAVFASYGSDSNAFLDVVFGVSAPEGKLPFDLPSSMEAVEAQMEDVPFDTRNPVFKFGHGLSYANPCASSSSKCS

SEQ ID NO: 211 - protein, 618 aa, Emericella nidulans
MRVDSTVLALVALATDCLGLAIKSNEPELLRRDALPIYKNASYCVDERVRDLLSRMTLEEKAGQLFHKQLSEGPLDDDSSGNSTETMIGKKHMTHFNLASDITNATQTAEFINLIQKRALQTRLGIPITISTDPRHSFTENVGTGFQAGVFSQWPESLGLAALRDPQLVREFAEVAREEYLAVGIRAALHPQVDLSTEPRWARISGTWGENSTLTSELIVEYIKGFQGEGKLGPKSVKTVTKHFPGGGPMENGEDSHFYYGKNQTYPGNNIDEHLIPFKAALAAGATEIMPYYSRPIGTNWEAVGFSFNKEIVTDLLRGELGFDGIVLTDWGLITDTYIGNQYMPARAWGVEYLSELQRAARILDAGCDQFGGEERPELIVQLVREGTISEDRIDVSVARLLKEKFLLGLFDNPFVNASAANNIVGNEHFVNLGRDAQRRSYTLLTNNQTILPLAKPGEGTRFYIEGFDSAFMSARNYTVVNTTEEADFALLRYNAPYEPRNGTFEANFHAGSLAFNATEKARQAKIYSSLPTIVDIILDRPAVIPEVVEQAQAVLASYGSDSEAFLDVVFGVSKPEGKLPFDLPRSMDAVEAQAEDLPFDTENPVFRYGHGLEYEDN

SEQ ID NO: 212 - protein, 752 aa, Aspergillus flavus
MRFVSLAVGAALLGAAGASSISSNVGLLKANGVALGNWEAAYEKASAFVSGLTTDQKLALITGSNVESTNGNFTPLYFLDGDMGLQDFYYVSAFSLSSALAMTWDRDAIYEQAKAVGSEFYNKGVQVVAGPTSQPLGRTPWGGRGVEGFGPDPYLNGLATGLTTKGYVDAGVIPGGKHFLLYEQETNRTSSFGSSGEGSPYSSNADDKTIHETYLWPFYDAVKNGAGAVMCAMTKVNGTMACENSDLLMKMLKTELGFPGMVWPDMNGQNSAKGSALGGEDYGSSSIWSTSTMESFLSNGTLSEARLNDMAIRNLIGYYYVNLDNGRQPTRQTTDVYVDVRANHSKLIRENGAKSMALLKNEGVLPLSKPRVMSIFGAHAGPIMGGPNSNVDVMGSGPTYQGHLATGSGSGMASMPYLITPYGALTNKAAQDGTVLRWVLNDTYSSGGGSSLVPSSTSSTAVEPSFENFATGSDICLVFINALAGEGADRTELYNADQDAMVNTVADNCNNTVAVVNTVGPRLLDQWIEHDNVTAVLYGSLLGQESGNSIVDLLYGDVNPSGRLVHTIAKNESDYNVGLCYTAQCNFTEGVYLDYRYFDAHNITPRYPFGHGLSYTTFHYSSLAIKAPSSITKAPKGNLTVGGPSDLWDVVGTVSARIANNGTLSGAEVPQLYLGFPDSADQPVRQLRGFDRVELSAGQEAVVTFNLRRRDISYWNVKTQQWMVAGGKYTVFVGGSSRDLRLNGTFFLWVGS

SEQ ID NO: 213 - protein, 754 aa, Aspergillus niger
MKVLSFIVAAALLGLTGASSNSSPGLLKSDGVVLGDWESAYQKASSFVAGLTTDQKLALITGSSVNSTNGSFSGLTFLDGDMGLQNFFYVSAFSLSSALAMTWDRDAIYAQAKAVGSEFYNKGIQVVAGPTSQPLGRTPWGGRIVEGFGPDPYLNGLASGLTAKGYIDAGVIPGAKHFLLYEQETNRTGGGGGGGGDSGSAPYSSNADDKTLHETYLWPFYDAVKHGLGAVMCAMTKVNGTLSCQNSDLLMKHLKTELGFPGLVWPDTNGQSSALESAVNGEDYGSSSIWSTSTMETLLSNGSLSEARLDDMAVRNLMGYYYVNLDNGLQPEEQSEDAYVDVRGNHSKLIRENGAKSMALLKNKNALPLRKPRVMSVFGAHAGPVLGGPNTAMDIEGSGPTYQGHLATGTGSAQASLPYLVPPYVALTNRIIEDGTMMRWVLNDTYSSSSTSGLITEGTDSTAVDPSFADYATNSDACLVFLNALSGEGADRTELYNDDQDTMVNTVADNCNNTIVIINTVGPRLMDQWIEHDNVTAVLYGSLLGQESGNSIVDILYGDVNPSGRLIHTIAKNESDYNVKICYTAQCNFTEGVYLDYRYFDAHNVTPRYPFGHGLSYTTFSYSDLNIEKPSTLSKYPTGEKAVGGNSDLWDIVGNVSVKVANTGSLDGAEVPQLYLGFPTAAQQPVRQLRGFERVEIASGKQSQVTFQLRRRDISYWDVPAQQWLVASGDYKVYVGASSRDLKLNGTFTVQTSS

SEQ ID NO: 214 - protein, 752 aa, Aspergillus oryzae
MRFVSLAVGAALLGAAGASSISSNVGLLKANGVALGNWEAAYEKASAFVSGLTTDQKLALITGSNVESANGNFTPLYFLDGDMGLQDFYYVSAFSLSSALAMTWDRDAIYEQAKAVGSEFYNKGVQVVAGPTSQPLGRTPWGGRGVEGFGPDPYLNGLATGLTTKGYVDAGVIPGGKHFLLYEQETNRTSSFGSSGEGSPYSSNADDKTIHETYLWPFYDAVKNGAGAVMCAMTKVNGTMACENSDLLMKMLKTELGFPGMVWPDMNGQNSAKGSALGGEDYGSSSIWSTSTMESFLSNGTLSEARLNDMAIRNLIGYYYVNLDNGRQPTRQTTDVYVDVRANHSKLIRENGAKSMALLKNEGVLPLSKPHVMSIFGAHAGPIMGGPNSNVDVMGSGPTYQGHLATGSGSGMASMPYLITPYDALTNKAAQDGTVLRWVLNDTYSSGGGSSLVPSSTSSTAVEPSFENFATGSDICLVFINALAGEGADRTELYNADQDAMVNTVADNCNNTVAVVNTVGPRLLDQWIEHDNVTAVLYGSLLGQESGNSIVDLLYGDVNPSGRLVHTIAKNESDYNVGLCYTAQCNFTEGVYLDYRYFDAHNITPRYPFGHGLSYTTFHYSSLAIKAPSSITKAPKGNLTVGGPSDLWDVVGTVSARIANNGTLSGAEVPQLYLGFPDSADQPVRQLRGFDRVELSAGQEAVVTFNLRRRDISYWNLKTQQWMVAGGKYTVFVGGSSRDLRLNGTFFLWVGS

SEQ ID NO: 215 - protein, 812 aa, Emericella nidulans
MRVPSLSVLSFLLGTALAAASNFEAGLLSSGKVSLGDWKSAHEKASQFVAKLNTTEKIKLITGSSVTTTNGETFTALDILDGDMGAQAYYYVSAFSLSSALAMTWDKEAMYEQGRAIAAEFYGKGIQMVAGPTSQPLGRTPWGGRLVESFGPDPYLNGIATGLETRAYADVGVIAGAKHFILNEQETNRTGGMGGGGGAPGGGGMGRGAEFSSSVPGGMSPTSSAGAIPSSTSTPGGSGMGGGMAGSSAFSSSSSSGAPYSSNADDKTLHETYLWSFYDAVHSGLGGVMCAMTKVNGTLSCQSSSLLLDILKTELGFPGMVWPDTNGQQDALASAANGLDYGSSSLWSESTIEGYLESNNITEARLNDMAIRNLMGYYYVNLDNGTQPSTAAQDDYVDVRANHAKLIRSHGSKSMVLLKNKNNTLPLYKPHKMAIFGSHARAAVAGPNMQFSVEGSGPTYDGHIATDSGSGQASLPYLITPENALNIKASQDGTMLRWIANDTYSSSTGSALVMQGSSSTSVTPSVSAYSENMDVCLVFINALAGEGADRTELRNTDQDNLINEVADNCDNTVVVINTVGARILDSWIEHENVTAVLYGSLLGQESGNSIVDVLYGDVNPSGRLTYTIAKTESDYNVDICYTAQCNFTEGNYIDYRYFDAYNVTPRYEFGYGLSYTDFAYSNLHIQGPSALSTYPTGQLAVGGYEDLWDTVAKVTVTIRNAGSLDGAEVPQLYISYPDVAKQPVRQLRGFHNVYIKKGQSTKVTFELRRRDISYWDVQHQKWAVAPGTYEAWVGASSRDLRTHGSFVVKTKA

SEQ ID NO: 216 - protein, 869 aa, Neosartorya fumigata
MRVLSAIALVASLASSALSAPASESRVSTQLRSRDAEGYSSPPYYPAPNGGWLSSWADAYEKAQRVVRDMTLAEKVNLTTGTGIFMGPCVGQTGSALRFGIPNLCLQDSPLGVRNSDHNTAFPAGITVGATFDKDLMYARGVELGKEFRGKGINVLLGPSVGPIGRKPRGGRNWEGFGADPSLQAIGGAQTIKGIQSQGVIATIKHYIGNEQEMYRMSNVGQRAYSSNIDDRTLHEVYLWPFAEGIRAGVGAVMTAYNEVNSSACSQNSKLLNEILKDELGFQGFVMTDWLGQYGGVSSALAGLDMAMPGDGAIPLLGTAYWGSELSRSILNGSVPVSRLNDMVTRIVAAWYKMGQDGDFPLPNFSSNTQDATGPLYPGALFSPSGVVNQYVNVQADHNITARAIARDAITLLKNDDNILPLKKDDALKVFGTDAGPNPDGLNSCADMGCNKGVLTMGWGSGTSRLPYLVTPQEAIANISSNAAFFITDKFPSNVAVSSGDVAVVFISADSGENYITVEGNPGDRTSAGLNAWHNGDKLVKDAAAKFSKVVVVVHTVGPILMEEWIDLPSVKAVLVAHLPGQEAGWSLTDVLFGDYSPSGHLPYTIPRAESDYPSSVGLLSQPIVQIQDTYTEGLYIDYRHFLKANITPRYPFGHGLSYTTFSFSQPTLSVRTALDSTYPPTRPPKGPTPTYPTAIPDPSEVAWPKNFDRIWRYLYPYLDDPASAAKNSSKTYPYPAGYTTVPKPAPRAGGAEGGNPALFDVAFAVSVTVTNTGSRPGRAVAQLYVELPDSLGETPSRQLRQFAKTKTLAPGTSETLTMEITRKDISVWDVVVQDWKAPVRGEGVKIWLGESVLDMRAVCEVGGACRVI

SEQ ID NO: 217 - protein, 866 aa, Aspergillus flavus
MAAFPAYLALLSYLVPGALSHPEAKTLTSRASTEAYSPPYYPAPNGGWISEWASAYEKAHRVVSNMTLAEKVNLTSGTGIYMGPCAGQTGSVPRFGIPNLCLHDSPLGVRNSDHNTAFPAGITVGATFDKDLMYERGVGLGEEARGKGINVLLGPSVGPIGRKPRGGRNWEGFGADPSLQAFGGSLTIKGMQSTGAIASLKHLIGNEQEQHRMSSVITQGYSSNIDDRTLHELYLWPFAESVRAGAGSVMIAYNDVNRSACSQNSKLINGILKDELGFQGFVVTDWLAHIGGVSSALAGLDMSMPGDGAIPLLGTSYWSWELSRSVLNGSVPVERLNDMVTRIVATWYKMGQDKDYPLPNFSSNTEDETGPLYPGALFSPSGIVNQYVNVQGNHNVTARAIARDAITLLKNNDNVLPLKRNNTLKIFGTDAGTNSDGINSCTDKGCNKGVLTMGWGSGTSRLPYLITPQEAIANISSNAGFHITDTFPSGVTAGPDDIAIVFINSDSGENYITVDGNPGDRTLAGLHAWHNGDNLVKAAAEKFSNVVVVVHTVGPILMEEWIDLDSVKAVLVAHLPGQEAGWSLTDILFGDYSPSGHLPYTIPHSESDYPESVGLIAQPFGQIQDDYTEGLYIDYRHFLKANITPRYPFGHGLSYTTFNFTEPNLSIIKALDTAYPAARPPKGSTPTYPTAKPDASEVAWPKNFNRIWRYLYPYLDNPEGAAANSSKTYPYPDGYTTEPKPAPRAGGAEGGNPALWDVTFSVQVKVTNTGSRDGRAVAQLYVELPSSLGLDTPSRQLRQFEKTKILAAGESEVLTLDVTRKDLSVWDVVVQDWKAPVNGEGVKIWVGESVADLRVGCVVGEGCSTL

SEQ ID NO: 218 - protein, 869 aa, Neosartorya fumigata
MRVLSAIALVASLASSALSAPASESRVSTQLRSRDAEGYSSPPYYPAPNGGWLSSWADAYEKAQRVVRDMTLAEKVNLTTGTGIFMGPCVGQTGSALRFGIPNLCLQDSPLGVRNSDHNTAFPAGITVGATFDKDLMYARGVELGKEFRGKGINVLLGPSVGPIGRKPRGGRNWEGFGADPSLQAIGGAQTIKGIQSQGVIATIKHYIGNEQEMYRMSNVGQRAYSSNIDDRTLHEVYLWPFAEGIRAGVGAVMTAYNEVNSSACSQNSKLLNEILKDELGFQGFVMTDWLGQYGGVSSALAGLDMAMPGDGAIPLLGTAYWGSELSRSILNGSVPVSRLNDMVTRIVAAWYKMGQDGEFPLPNFSSNTQDATGPLYPGALFSPSGVVNQYVNVQADHNITARAIARDAITLLKNDDNILPLKKDDALKVFGTDAGPNPDGLNSCADMGCNKGVLTMGWGSGTSRLPYLVTPQEAIANISSNAAFFITDNFPSNVAVSSGDVAVVFISADSGENYITVEGNPGDRTSAGLNAWHNGDKLVKDAAAKFSKVVVVVHTVGPILMEEWIDLPSVKAVLVAHLPGQEAGWSLTDVLFGDYSPSGHLPYTIPRAESDYPSSVGLLSQPIVQIQDTYTEGLYIDYRLFLKANITPRYPFGHGLSYTTFSFSQPTLSVRTALDSTYPPTRPPKGPTPTYPTAIPDPSEVAWPKNFGRIWRYLYPYLDDPASAAKNSSKTYPYPAGYTTVPKPAPRAGGAEGGNPALFDVAFAVSVTVTNTGSRPGRAVAQLYVELPDSLGETPSRQLRQFAKTKTLAPGTSETLTMEITRKDISVWDVVVQDWKAPVRGEGVKIWLGESVLDMRAVCEVGGACRVI

SEQ ID NO: 219 - protein, 866 aa, Aspergillus oryzae
MAAFPAYLALLSYLVPGALSHPEAKTLTSRASTEAYSPPYYPAPNGGWISEWASAYEKAHRVVSNMTLAEKVNLTSGTGIYMGPCAGQTGSVPRFGIPNLCLHDSPLGVRNSDHNTAFPAGITVGATFDKDLMYERGVGLGEEARGKGINVLLGPSVGPIGRKPRGGRNWEGFGADPSLQAFGGSLTIKGMQSTGAIASLKHLIGNEQEQHRMSSVITQGYSSNIDDRTLHELYLWPFAESVRAGAGSVMIAYNDVNRSACSQNSKLINGILKDELGFQGFVVTDWLAHIGGVSSALAGLDMSMPGDGAIPLLGTSYWSWELSRSVLNGSVPVERLNDMVTRIVATWYKMGQDKDYPLPNFSSNTEDETGPLYPGALFSPSGIVNQYVNVQGNHNVTARAIARDAITLLKNNENVLPLKRNDTLKIFGTDAGTNSDGINSCTDKGCNKGVLTMGWGSGTSRLPYLITPQEAIANISSNAEFHITDTFPLGVTAGPDDIAIVFINSDSGENYITVDGNPGDRTLAGLHAWHNGDNLVKAAAEKFSNVVVVVHTVGPILMEEWIDLDSVKAVLVAHLPGQEAGWSLTDILFGDYSPSGHLPYTIPHSESDYPESVGLIAQPFGQIQDDYTEGLYIDYRHFLKANITPRYPFGHGLSYTTFNFTEPNLSIIKALDTAYPAARPPKGSTPTYPTAKPDASEVAWPKNFNRIWRYLYPYLDNPEGAAANSSKTYPYPDGYTTEPKPAPRAGGAEGGNPALWDVTFSVQVKVTNTGSRDGRAVAQLYVELPSSLGLDTPSRQLRQFEKTKILAAGESEVLTLDVTRKDLSVWDVVVQDWKAPVNGEGVKIWVGESVADLRVGCVVGEGCSTL

SEQ ID NO: 220 - protein, 867 aa, Aspergillus terreus
MAPSSLKWTLLCALPWTLASPASYNVHHARDSDAQAFSPPYYPTPHGGWIADWAEAYEKASQLVRNMTLAEKVNLTTGTGMYMGPCAGQTGSVPRFGIPNLCMHDGPLGVRNTDHNTAFPPGITVGATFDKDLMRSRGVALGEEGRGKGVNVLLGPSVGPIGRKPRGGRNWEGFGADPSLQAIAGSLTIEGMQSTGLIACIKHFIANEQEMHRMSSVVTQGYSSNVDDRTLHELYLWPFAEGVRAGVGSLMAAYNDVNNSASSQNSKMLNDILKDELGFQGFVMSDWFGNYGGVSAALAGLDVSMPGDGAIPLLGDSYWGSELSRSILNGTVPVDRLNDMATRILASWYKMGQDQDYPLPNFSANTEDAEGPLYPGAVFSPKGVVNKFVNVQGDHNVTARAIARDAITLLKNNNNILPLHRNDSLKIFGTDAGTNPDGINSCSDKGCNKGVLTMGWGSGSSKLPYLVTPQEAIANISSHAEFHITDSFPSDVSAGPNDIAIVFINSDSGENYITVEGNPGDRTSAGLNAWHNGDDLVKAAAEKFRQVVVVYHTVGPVLMEEWIDLEPVKAVLVAHLPGQEAGWSLTDVLFGDYSPSGHLPYTIPRSESDYPDSVSLIQQPFGRIQDDYTEGLYIDYRHFAKAGITPRFPFGYGLSYTNFNFSRASISAQSSLDTAYPAPRSPKGSTPEYSTAIPPAAEAAWPKNFNRIWRYLYPYLDNPEGARANSSRKYPYPDGYSTVQKPGPRAGGGEGGNPALFDVAFSVQVQVTNTGARKGRAVAQLYVELPDSLGVDTPSRQLRQFEKTKILAPGESQVLTMEITRKDLSVWDVVAQDWKAPVNGEGVKMWIGESVADMRVLCTVGEGCSTL

SEQ ID NO: 221 - protein, 868 aa, Emericella nidulans
MAHRWLILALVAAAAPRALASPGPSLNERQSDDEPFSPPYYPAPNGGWVSTWAEAYEKAHSIVSNLTLAEKVNLTTGTGIFMGPCAGQTGSVPRLGIPNLCLHDSPLGVRNTDHNTAFPPGITVGATFDKSLMYERGVGLGEEARGKGVNVLLGPSVGPLGRKPRGGRNWEGFGFDPVLQGIGGAETIKGMQSTGLIACIKHFVGNEQEMHRMSSVVTQGYSSNIDDRTLHELYIWPFAEGVRAEVGSVMIAYNDVNKSSCSQNSKLINGVLKDELGFQGFVVTDWLAHYGGVSSALAGLDMDMPGDGAVPLFGNSYWGPELSRSILNGTVPVERLNDMVTRILATWYKMGQDQDYPLPNFSSNTEDEKGLLYPGAVISPIGVVNQYVNVQGNHNITARAIARDAITLLKNEGDLLPLRRNDSLKVFGTDAGPDPQGLNSCADKGCNRGVLTMGWGSGTSKLPYLITPQEAIANITPTAEFFITDSFPSSVDANDEDIAIVFINSDSGENYITVDGNPGDRKTSGLHAWHNGDELVKAAAERFSQVVVVIHTVGPIILEEWIDLDSVKAVLIAHLPGQEAGYSLTDVLFGDYSPSGHLPYTIPYQESNYPSSVGLLQQPFGQIQDYYTEGLYIDYRHFLKEDITPRYAFGHGLSYTTFEFSEPALSVVTPLDSAYPPSRPAKGPTPTYPNTIPPASEAAWPAKFNRIWRYIYPYLNNPQADAAVANSSKTYPYPDGYSTDPQPPPRAGGAEGGNPALWDVAFSVQVTVTNTGQHSGRAVAQLYVELPDSLGLDTPSRQLRQFEKTKVLETGQSETLTLEVTRKDVSVWDVEVQDWKTVVGGEGVKIHIGESVLDIRTECEVGGRCVTL

SEQ ID NO: 222 - protein, 869 aa, Neosartorya fischeri
MRVLSAIALVASLVPSALSAPASESRVSTQLQSRDAAGYSSPPYYPAPNGGWLSSWADAYEKAQRVVRNMTLAEKVNLTTGTGIFMGPCVGQTGSALRFGIPNLCLQDSPLGVRNSDHNTAFPAGITVGATFDKDLMYARGVELGEEFRGKGINVFLGPSVGPIGRKPRGGRNWEGFGADPSLQAIGGAQTIKGIQSRGVIATIKHYIGNEQEMYRMSNIGQRAYSSNIDDRTLHELYLWPFAEGIRAGVGAVMTAYNEVNSSACSQNSKLLNEILKDELGFQGFVMTDWLGQYGGVSSALAGLDMAMPGDGAIPLLGNAYWGSELSHSILNGSVPVSRLNDMVTRIVATWYKMGQDGDFPLPNFSSNTQDATGPLYPGALFSPSGVVNQYVNVQADHNITARAIARDAITLLKNDDNILPLKRNDSLKVFGTDAGPNPDGLNSCADMGCNKGVLTMGWGSGTSRLPYLVTPQEAIANISSNAAFFITDNFPSNVAVSSGDVAVVFISADSGENYITVEGNPGDRTSAGLNAWHNGDKLVKDAAAKFSKVVVVVHTVGPILMEEWIDLPSVKAVLVAHLPGQEAGWSLTDVLFGDYSPSGHLPYTIPRAESDYPSSVGLLSQPIVQIQDTHTEGLYIDYRHFLKSSITPRYPFGHGLSYTTFSFSQPTLSVRTALDSAYPPTRPPKGPTPTYPTTIPNPSEVAWPKNFDRIWRYLYPYLDDPAGAAKNSSKTYPYPAGYTTVPKPAPRAGGAEGGNPALFDVAFAVSVTVTNTGTRPGRAVAQLYVELPDSLGETPSRQLRQFAKTKTLAPGASETLTMEFTRKDISVWDVVVQDWKAPVRGEGVKIWLGESVLDMRAVCEVGGACRVI

SEQ ID NO: 223 - protein, 815 aa, Aspergillus flavus
MASIAHLVVSGLLAATAVNGQNYGGSGRSDDAFSYVQPRNTTILGQYGHSPAVLPSPNATGAGGWEEALAKAQQFVAQLTLEEKADMVTGQPGPCVGNIVAIPRLGFKGLCLQDGPLAIRVADYASVFSAGVTAASTWDKDILYERGVAMGEEFKGKGAHVALGPVAGPLGRSGYGGRNWEGFAADPYLTGVAMERTIQGYQDAGVQACAKHFIGNEQETQRNPNYNPNGTLTDVIQEAISSNIDDRTIHELYLWPFANAARAKVASVMCSYQRLNGSYACQNSKVLNGLLKEELGFQGYVQSDWGGTHSGVSSIEGGLDMNMPGGLGQYGQTPEAGSFFGKNVTFAVNNGTVDISRVDDMIVRIMTPYYWLGQDQGYPEIDPSSADLNTFSPRSTWLREFNLTGERSRDVRGDHGELIRRHGAEATILLKNENKALPLKAPKSIAVFGNDAGDTTEGAVNKATFEFGTLAAGGGSGTGRFTYLVTPLEALKARGKQDNTLVQWWLNNTLIADSDVTSLWVPTPPDACLVFLKTWAEEGSDREYLSVDWNGNEVVDSVASKCNNTIVVTHSSGINELPFANHPNVTAIVAAHYPGQESGNSIVDILYGDVNPSGKLPYTIAKNGSDYNAPPTTAVETTGADDWQAWFDEKLEIDYRYFDAHNISVLYEFGFGLSYTTFSLSDIKTEPLAESISSVPEQLPIQPGGNPALWESVYNVSVTVTNTGDVKGATVPQLYVTFPDSAPAGTPPKQLRGFDKVSLAPGESQTVGFELMRRDLSYWDVVSQEWLIPEGEFTIRVGFSSRDLSQETKITPVTA

SEQ ID NO: 224 - protein, 815 aa, Aspergillus oryzae; identical to SEQ ID NO: 223

SEQ ID NO: 225 - protein, 817 aa, Aspergillus terreus
MANIAHLIVSGLLAATVAHGQQYEGSSRSEDAFSYVQPRNTTILGQYGHSPAVLPSPNSTGSGGWQAAHTKARHFVSQLTLEEKADMVTGQPGPCVGNIVAIPRLGFNGLCLQDGPLAIRVADYASVFSAGVTAASTWDRDVLYERAFAMGQEFRAKGAHIALGPVAGPLGRSAYGGRNWEGFAADPYLTGVAMELSVKGYHDAGVQATPKHFIGNEQETQRNPIYNPNGTITDVLQEAVSSNIDDRTMHELYLWPFANAAHAKAAAFMCSYQRLNGSYACQNSKALNGLLKEELGFQGYVMSDWGGTHSGVASIESGLDMNMPGGLGPYGTIPQAGSFYGGNVTQGVKNGTIDEARVDDMIIRIMTPYYWLGQDKDFPSVDPSSADLNTFSPRSTWLRQFNLTGERNRDVRGDHAKIIRRQAAEATVLLKNEKNALPLKSPKSLAIFGNDAGEPTMGAVNQANFEFGTLAAGGGSGTGRFTYVVSPLEAIQSRAKQANTLVQYWMNNTDIATTDVTTLWVPAPPDACLVFLKTWAEEGEDREYLHVDYDGNDVVSSVASKCNNTIVVTHSSGINELPFADHPNVTAILAAHYPGQESGNSIVDVLYGDVNPSGRLPYTIARNGSEYNAPPTTEVTTTGAEDWQAWFNEKLEIDYRYFDAHNISVLYEFGFGLSYTTFNLSEINAEPLVESISSVPEQRPIQPGGNPALWENVYNVSVVVTNTGDVEGKAVPQLYVTFPDSTPAGTPPKQLRGFDKVALKPGQSQAASFQLMRRDLSYWDVVSQQWLIPEGEFVISVGFSSRDLREVVRVTPVSGST

SEQ ID NO: 226 - protein, 819 aa, Emericella nidulans
MTSASQILVWGLLAASGAQAQNYGGGSSRSDDAFSYVQPKNTTILGAYGHSPAVYPSPNTTGSGGWETALAQAQDFVAQLTLEEKANMVTGQPGPCVGNIIAIPRLNFSGLCLQDGPLAIRVTDMASVFSAGVTAAASWDRKILYERGYAMGQEFKAKGAHVALGPVAGPLGRSAYSGRNWEGFAADPYLTGVAMEETIQGYQDAGVQACPKHFIGNEQETMRNPTFNDSAPLGTVIQEAVSSNIDDRTMHELYLWPFANAVHAKAASIMCSYQRINGSYGCENSKTLNGLLKGELGFQGYVMSDWGATHSGVAGIKSGQDMDMPGGLGAYGQTFINRSFFGGNVTAAVNNGTLEESRIDDMILRIMTPYFWLGQDQDYPTVDPSTADYNTFSPRNTWYQDFNLTGERSRDVRGNHAALIRKQAAEATVLLKNKNNALPLKAPKTLAVFGNDASDITNGPYNDATYEYGTLAAGGGSGTGRFTYLVSPLTAINARAQKDNTSLVQFWLNNTQIATSDVQADLLRVPTPPTACLVFVKTWAEEGADREHLRLDYNGTEVVEAVAAACNNTIVVTHSSGINELPFANHPNVTAILAAHFPGQESGNSIVDVLYGDVNPSGRLPYTIARNGSDYNAPPTTAVTTSGREDWQSWFDEKLEIDYRYFDAHNIPVLYEFGFGLSYTTFNISDIYATRVVDSITSAPEDRAIQPGGNPELWETIYNVTVSVTNTGDVEGATVPQLYVTFPDSTPEGTPPKQLRGFDKVSLQPGESTKVIFELMRRDLSYWDTVSQQWLIPEGDFTIRVGFSSRNLKEVTTITPVSE

SEQ ID NO: 227 - protein, 817 aa, Neosartorya fischeri
MASIAHLIFSGLLAATVANSQQYEGSSRNEDAFNYVQPRNTTIFGQYGHSPAVLPSPNSTGLGEWHAAYAKAREFVSLLTLEEKADMVTGQPGPCVGNIVAIPRLGFNGLCLQDGPMAIRVADYASVFSAGVTAASTWDRDILYERAFAMGQEFRAKGAHIALSPVAGPLGRSAYGGRNWEGFAADPYLTGIAMELSVQGYHDAGVQATPKHFIGNEQETQRNPTFDPNGTVTDVLQEALSSNIDDRTMHELYLWPFANAAHAKAASFMCSYQRLNGSYACQNSKVLNGLLKEELGFQGYVMSDWGGTHSGVASIEAGLDMNMPGGLGPYGTIPEAGSFFGGNVTQAVKNGTVDEARVDDMIVRIMTPYYWLGQDQDFPSVDPSSADLNTFSPRSTWLREFNLTGERSRDVRGDHAKLIRRHGAEATILLKNENNALPLKSPKALAIFGNDAGEPTMGAVNKANFEFGTLAAGGGSGTGRFTYVVSSLEAIKSRAKRANTLVQYWLNNTEVATTDVTTLWVPTPPDACLVFLKTWAEEGEDREHLSVDYDGNNVVFSVARKCNNTIVITHSSGINELPFADHPNVTAILAAHYPGQESGNSIVDVLYGDVNPSGRLPYTIARNGSDYNAPPTTEIATTGKEDWQAWFDEKLEIDYRYFDAHNISVLYEFGFGLSYTTFNLSDINAEPLVKSISSVPEQLPIQPGGNPALWENVYNVSVVVTNSGDVKGKAVPQLYVTFPDNTPAGTPPKQLRGFDKVPLKPGESRAVSFQLMRRDLSYWDVVSQQWLIPEGEFVIRVGFSSRDLREMIRITPVTDST

SEQ ID NO: 228 - protein, 829 aa, Aspergillus clavatus
MTAKFDVDHVLNSISEDDKIALLSGTDFWHTYSIPEHNVPPIRTTDGPNGVRGTKFFAGVPAACLPCGTALGATWDRDLLHKAGVLLGQECLAKGAHCWLGPTINMQRSPLGGRGFESFAEDPHLSGTMAKSIILGCESTGVISAVKHYVGNDQEHERRAVDVMVTPRALREIYLRPFQIVARDAHSGALMTSYNKINGKHVVENPAMYDIIRKEWKWDPLIMSDWLGTYTTIDSLNAGLDLEMPGPSRYRGKYIESAVQARLVKQSTIDQRARKVLEFAARASQAPASAVESGRDYPEDRALNREICGNSIVLLKNEDTLLPLPKKIKKIALIGSHVKTPAISGGGSASLQPYYAVSLYDAIIEVLPDTEIIYETGAYAHKMLPVIDRMLSNAVIRFYNEPADKERTLLSTEPVNNTAFQLMDYNTPGLNRTLFWATLDGEFTPDVSGLWDFGLTVFGTATLYIDDEMVIDNTTQQTRGTAFFGKGTIQEVGAKELTAGRTYKIRIEFGSANTSPIKAIGVVHFGGGAAHLGAFLHMDPEQMVRDAVKAASEADYTILCTGLNRDWESEGFDRPDMDLPPRIDALISAVLDVAGDKTIIVNQSGTPVMMPWSDRARAIIQAWYGGNETGHGIADVLFGDVNPCAKLPLSWPADVRHNPAYLNSLSVGGRMLYGEDIYVGYRFYEKIGQVTLFPFGHGLSYTLFEVSPKVTVSPTAFTVETPLSATVRIKNTGPVAGAQILQLYVAAPTSATPRPVKELQGFSKVFLQSGEEKTVVISVDKYATSFWDGIEDMWKSEAGVYQVLIGTSSQDIVARGEFTVDETTFWTGV

SEQ ID NO: 229 - protein, 829 aa, Neosartorya fumigata
MTPKFDIDYVLANITEDDKIALLSGSDFWHTHAIPKFNVPPIRTTDGPNGIRGTKFFAGVPAACLPCGTALGATWDRDLLHQAGVLLGKECLAKGAHCWLGPTINMQRSPLGGRGFESFAEDPHLSGIMAKSIILGCESTGVISTVKHYVGNDQEHERRAVDVLVTPRALREIYLRPFQIVARDAHPGALMTSYNKINGKHVVENPAMLDIVRKDWHWDPLIMSDWLGTYTTIDSLNAGLDLEMPGPTRYRGKYIESAMQARLIKQSTISKRARKVLEFVERASRAPVSADETGRDFPEDRALNRTLCANSIVLLKNDGNLLPIPKTVKKIALIGSHVKTPAISGGGSASLEPYYAVSLYDAVVEALPDAEILYEAGAYAHRMLPVIDRMLSNAVIHFYNEPPEKERTLLATEPVVNTAFQLMDYNAPGLNRALFWATLIGEFTPDVSGLWDFGLTVFGTATLFIDDEMVIDNATRQTRGTAFFGKGTVQEVGQKQLTAGQTYKIRIEFGSANTSPMKAIGVVHFGGGAAHLGACLHMDPEQMVANAVRVAAEADYTIVCTGLNRDWESEGFDRPDMDLPPGIDALISSVLDVAADRTVIVNQSGTPVTMPWAHRARGIVQAWYGGNETGHGIADVLFGDVNPSGKLPLSWPADVRHNPTYLNNMSVGGRMLYGEDVYIGYRFYEKVGREVLFPFGHGLSYTTFHVSPEATVSPIVFSSDSPPTATVLVKNTGPMAGAQTLQLYIAAPNSTTPRPVKELHGFTKVFLQSGEERSVSIHIDRYATSFWDEIEDMWKSEEGVYQVLIGTSSQEIVSRGEFRVEQTRYWRGV

SEQ ID NO: 230 - protein, 827 aa, Aspergillus flavus
MALDIDYVLSHISQEDKIALLAGIDFWHTHPIPELNVPSIRSTDGPNGIRGTKFFAGVPAACLPCGTALASTWDQNLLREVGVLIGKECLAKGAHCWLGPTINMPRSPLGGRGFESFAEDPHLAGAMAASMITGCESTGVISAVKHFVGNDQEHERRAVDVLVTQRALREIYLRPFQIVARDAGPGALMTSYNKINGKHVVESKEMLDMVRQEWKWNPLIMSDWLGTYTTIDSMNAGLDLEMPGPSRYRGRYVESALQARLIKESTIDSRARKVLEFVQQASRAPVSAVETGRDYPEDRALNRNLCANSIVLLKNQNDILPLPKTIKKIALVGSHVRTPAISGGGSASLEPYYTVSLYDAVSEALPHTEILYEVGAYAHKMLPVIDRLLTNAVMHFYNEPVGTERILRATQRMSKTAFQLMDFNAPELNRGLFYATLTGDFTPDVSGVWDFGLTVFGTGLLYVDDELVVDNTTHQTRGTAFFGKGTVQELGSKTLNAEQTYKIRIEYGSANTSPMKAIGVVHFGGGAAHLGACLHVDSAEMVRSAVKAAAEADYTILCTGLNHEWESEGFDRSHMDLPPGIDALITSVLDVAANKTVIVNQSGTPVTMPWADRARGIVQAWYGGNETGHGIADVIFGDVNPSGKLPLSWPVDVKHNPAYLNYASVGGRVLYGEDVYVGYRYYEKVGREVLFPFGHGLSYTTFTVSPDVVFSQEVFRPEEPPTAAVKIKNTGKVAGAQVLQLYISAPHSPTPRPTKELHGFTKVLLQPGEERVAHIRMDKYATNFWDEIEGMWKSEEGIYEALIGTSSQNILAKGTFRVDRTRYWLGL

SEQ ID NO: 231 - protein, 829 aa, Neosartorya fumigata
MTPKFDIDYVLANITEDDKIALLSGSDFWHTHAIPKFNVPPIRTTDGPNGIRGTKFFAGVPAACLPCGTALGATWDRDLLHQAGVLLGKECLAKGAHCWLGPTINMQRSPLGGRGFESFAEDPHLSGIMAKSIILGCESTGVISTVKHYVGNDQEHERRAVDVLVTPRALREIYLRPFQIVARDAHPGALMTSYNKINGKHVVENPAMLDIVRKDWHWDPLIMSDWLGTYTTIDSLNAGLDLEMPGPTRYRGKYIESAMQARLIKQSTISKRARKVLEFVERASRAPVSADETGRDFPEDRALNRTLCANSIVLLKNDGNLLPIPKTVKKIALIGSHVKTPAISGGGSASLEPYYAVSLYDAVVEALPDAEILYEAGAYAHRMLPVIDRMLSNAVIHFYNEPPEKERTLLATEPVVNTAFQLMDYNAPGLNRALFWATLIGEFTPDVSGLWDFGLTVFGTATLFIDDEMVIDNATRQTRGTAFFGKGTVQEVGQKQLTAGQTYKIRIEFGSANTSPMKAIGVVHFGGGAAHLGACLHMDPEQMVANAVRVAAEADYTIVCTGLNRDWESEGFDRPDMDLPPGIDALISSVLDVAADRTVIVNQSGTPVTMPWAHRARGIVQAWYGGNETGHGIADVLFGDVNPSGKLPLSWPADVRHNPTYLNNMSVGGRMLYGEDVYIGYRFYEKVGREVLFPFGHGLSYTTFHVSPEATVSPIVFSSDSPPTATVLVKNTGPMAGAQTLQLYIAAPNSATPRPVKELHGFTKVFLQSGEERSVSIHIDRYATSFWDEIEDMWKSEEGVYQVLIGTSSQEIVSRGEFRVEQTRYWRGV

SEQ ID NO: 232 - protein, 827 aa, Aspergillus oryzae
MALEIDYVLSHISQEDKIALLAGIDFWHTHPIPELNVPSIRSTDGPNGIRGTKFFAGVPAACLPCGTALASTWDQNLLREVGVLIGKECLAKGAHCWLGPTINMPRSPLGGRGFESFAEDPHLAGAMAASMITGCESTGVISAVKHFVGNDQEHERRAVDVLVTQRALREIYLRPFQIVARDAGPGALMTSYNKINGKHVVESKEMLDMVRQEWKWNPLIMSDWLGTYTTIDSMNAGLDLEMPGPSRYRGRYVESALQARLIKESTIDSRARKVLEFVQQASRAPVSAVETGRDYPEDRALNRNLCANSIVLLKNQNDILPLPKTIKKIALVGSHVRTPAISGGGSASLEPYYTVSLYDAVSEALPHTEILYEVGAYAHKMLPVIDRLLTNAVMHFYNEPVGTERILRATQPMSKTAFQLMDFNAPELNRGLFYATLTGDFTPDVSGVWDFGLTVFGTGLLYVDDELVVDNTTHQTRGTAFFGKGTVQELGSKTLNAGQTYKIRIEYGSANTSPMKAIGVVHFGGGAAHLGACLHVDSAEMVRSAVKAAAEADYTILCTGLNHEWESEGFDRSHMDLPPGIDALITSVLDVAANKTVIVNQSGTPVTMPWADRARGIVQAWYGGNETGHGIADVIFGDVNPSGKLPLSWPVDVKHNPAYLNYASVGGRVLYGEDVYVGYRYYEKVGREVLFPFGHGLSYTTFTVSPDVVFSQEVFRPEEPPTAAVKIKNTGKVAGAQVLQLYISAPHSPTPRPTKELHGFTKVLLQPGEERVAHIRMDKYATNFWDEIEGMWKSEEGIYEALIGTSSQNILAKGTFRVDRTRYWLGL

SEQ ID NO: 233 - protein, 831 aa, Emericella nidulans
MTRTFDIDYVLANISDQDKIALLSGIDFWHTHPIPQFNVPSVRVTDGPNGIRGTKFFAGVPAACLPCGTALGATWDRDLLRRAGELLGDECIAKGAHCWLGPTVNMQRSPLGGRGFESFSEDPYLAGVAAASMIVGCESKGIIATVKHFVGNDQEHERRAVDVIVTPRALREIYLRPFQIVARDARPGALMTSYNKVNGKHVVEDPKMYDLIRKDWGWDPLVMSDWYGTYTTIDSTNAGLDLEMPGVSRYRGKYIESAMQARLIKSSTLDARARKVLEFVQRASRTKVSEVEKGRNHPEDRALMRTLCSNSIVLLKNEENILPLPKNVKKIALIGSHIKTPAISGGGSAALKPYYASTLYDAVREALPNAEVLYETGAHAHNMLPVIDRLLSNAVIHFYNEPMTQPNRKCLGTEPVTTTAFQFMDYKLAGLNRALFWSTLIGDFTPDQSGIWDFGLSVFGTANLYINDELIIDNTTKQTKGTSFFGKGTREEIGSMKLTAGQTYKIRIEFGSANTTTMKTTGMVNFGGGAANLGASLRLDAEEMINRAVKAAEDADYAIICTGLNQDWESEGFDRPHMDLPPVGIDKMISGVLDIAAHKTVIVNQSGTPVTMPWASRAKSIVHSWYGGNETGHGIADILFGDVNPSGKLSLSWPIDVRHNPAYLNYASVGGRVLYGEDIYVGYRFYEKTGREVLFPFGHGLSYTTFAVSPEALVSPGTFTPENPSNATVKIKNIGGAAGAQVLQLYVAAPNSPTPRPQKELQGFEKVFLRPGEEKTVIIRLDKYATSFWDEIEGMWKSEAGVYEVLIGTSSEDIVARGQFEVNQTRYWSGL

SEQ ID NO: 234 - protein, 829 aa, Neosartorya fischeri
MTAKFDVDYVLANITEDDKIALLSGSDFWHTHAIPKFNVPPIRTTDGPNGIRGTKFFAGVPAACLPCGTALGATWDRDLLHQAGVLLGKECLAKGAHCWLGPTINMQRSPLGGRGFESFAEDPHLSGIMAKSIILGCESTGVISTVKHYVGNDQEHERRAVDVLVTPRALREIYLRPFQIVARDAHPGALMTSYNKINGKHVVENPAMLDIVRKDWNWDPLIMSDWLGTYTTIDSMNAGLDLEMPGPTRYRGKYIESAMQARLIKQSTINKRARKVLEFVQRASRAPVSADETGRDFPEDRALNRTLCANSIVLLKNDGNLLPIPKTVKKIALIGSHVKTPAISGGGSASLEPYYAVSLYDAVVEALPDAKILYEAGAYAHKMLPVIDRMLSNAVIHFYNEPPEKERTLLATEPVVNTAFQLMDYNAPGLNRGLFWATLIGEFTPDVSGLWDFGLTVFGTATLFVDDEMVIDNTTRQTRGTAFFGKGTVQEVGQKQLTAGQTYKIRIEFGSANTSPMKAIGVVHFGGGAAHLGACLHMDPEQMVANAVKVAAEADYTIVCTGLNRDWESEGFDRPDMDLPPGIDALISSVLDLAADRTVIVNQSGTPVTLPWADRARGVVQAWYGGNETGHGIADVLFGDVNPCGKLPLSWPVDVKHNPAYLNNMSVGGRMLYGEDVYMGYRFYEKVGREVLFPFGHGLSYTTFSVSPEATVSPSVFSSDSPPTARVLVKNTGPVAGAQILQLYIAAPNSATPRPVKELHGFTKVFLQPGEERTVAIHIDKYATSFWDEIEDMWKSEEGVYQVLIGTSSQEIVSRGEFRVEQTRYWRGV

SEQ ID NO: 235 - protein, 838 aa, Aspergillus clavatus
MVQFDVEKTLEELTLGEKVALTAGTDFWHTAAVPRLNIPSLRMSDGPNGVRGTRFFNGTRAACFPCSTALGATWDTELLYEVGRLMAEESIAKGSHIILGPTINTQRSPLGGRGFESFAEDGVLSGLLAGNYCKGLQDKGVAATLKHFVCNDQEHERLAVDSIVTMRAMREIYLMPFHLAMRLCKTACVMTAYNKINGTHVSENKQIITDILRKEWGWDGLVMSDWFGTYSTSDAINAGLDLEMPGPTRWRGTALAHAVSSNKAFEYVLDERVRNVLNLHNFVEPLGIPENAPEEALNRPEDQALLRRAAAESVVLMKNEDNILPLKKEKSILVIGPNAKTAAYCGGGSASLDAYYTVAPFDGVKAKSEGEVSFSQGVYSYNELPVLGPLLKTEEGEKGFKFRVYNEPSSNPNRELLDELRLENSLGFLMDYKHPKVTSFLFYADMEGYFTPEEDGIYDFGVTVQGTGKLYIDGELVVDNSKNQRQGTAFFGNATVEEKGSKELKAGQTYKVVVEFGSAPTSDLDMRGVVVFGPGGFRFGAARRVGQEELISKAAELASQADQVVIFAGLTSEWETEGHDRDHMDLPAGSDEMISRVLDANPNAVVVIQSGTPVTMPWAHKTKALLQAWFGGNECGNGIADVLYGDVNPSAKLPLSFPVRLQDNPSYLNFRSERGRVLYGEDVYVGYRYYEKVDLAPLFPFGHGLSYTTFSRSDLSLATVPEKRQLEDGEPITATVTVTNTGDVAGAEVVQLWIVPPPTGVNRPVRELKGFAKVFLNPGESKTVEIVVEKKLATSWWDEQREKWASEKGTYKVLVTGTGDEVLKSSFEVEKTRFWLGL

SEQ ID NO: 236 - protein, 838 aa, Neosartorya fumigata
MVQLDVEKTIEELTLGEKVALTAGIDFWHTAAVPRLNIPSLRMSDGPNGVRGTRFFNGVPAACFPCATALGATWDTKLLYEVGRLMGEESIAKGAHVVLGPTINTQRSPLGGRGFESFAEDGVLSGILAGHYCKGLQETGVAATLKHFVCNDQEHERLAVDSIVTMRAMREIYLLPFQLAMRICKTACVMTAYNKVNGTHVSENKQIITDILRKEWGWDGLVMSDWFGTYSTCDAINAGLDLEMPGPTRWRGTALAHAVSSNKAFEFVMDERVRNILNLHNFVEPLGIPENAPEKALNRPEDQALLRRAAAESVVLMKNQDNILPLKKEKPILVIGPNAKTAAYCGGGSASLDAYYTVTPFEGVAAQSQGEVTFSQGVYSYKELPLLGPLLKTDDGKKGFKFRVYNEPPSEPNRQLIDELHLESSSGFLMDYKHPKIKTFTFYVDMEGYFTPEEDGIYDFGVTVVGTGKLFVDDELVVDNSKNQRQGTAMFGNATVEEKGSKELKAGQTYKVVLQFGTAPTSDLDMRGVVIFGPGGFRFGAARRVSQEELISKAAELASQASQVVIFAGLTSEWETEGYDRDHMDLPPGSDEMISRVLDANPDTVVVIQSGTPVTMPWAHKAKALLQAWFGGNECGNGIADVLYGNVNPAAKLPLSFPVRLQDNPSYLNFRSERGRVLYGEDIYVGYRYYEKVDLAPLFPFGHGLSYTTFSRSDLSLATTPEKPQLEDGEPITVTVSVTNTGSVAGAEIVQLWVAPPPTGVNRPVRELKGFTKVFLQPGETKKVEIVVEKKLATSWWDEQREKWASEKGTYEVLVTGTGDEVLKSSFEVEKTRYWLGL

SEQ ID NO: 237 - protein, 839 aa, Aspergillus flavus
MPRLDVEKTIEELSLGEKVALTAGIDFWHTASVPRLNIPTLRMSDGPNGVRGTRFFNGVPAACFPCATALGATWDTELLHEIGQLMGEESIAKGSHIILGPTINTQRSPLGGRGFESFAEDGVLSGLLAGYISKGIQEKGVAATLKHFVCNDQEHQRMAVDSIVTQRALREIYLLPFQLAMRICRTACVMTAYNKVNGTHVSQNKEIITDILRKEWGWDGLVMSDWFGTYSTSDAINAGLDLEMPGKTRWRGTALAHAVSSNEVAEFVMDERVRNVLNLVNFVDGLNIPENAPEKALNRPQDQALLRRAAAESVVLMKNEEDILPLKKEKSILVIGPNSKVAAYCGGGSASLDAYYTVNPFEGVSAQSKGEVKFSQGVYSHKDLPLLGPLLKTADGKTGFSFKVYNEHPSESNRELIEQLHLVSSSGFLMDYVNPKIKSLTYYVDMEGLFTPEEDGVYDFGVTVVGTGQLFIDGELVVDNTKNQRQGSAFFGSATVEEKGSKELKAGQTYKVLFQFGTAPTSDLDTRGVVVFGPGGFRFGASRRVGQEELISNAVKLASEAEQVVVFAGLTSEWETEGYDRDHMDLPPGSDEMISRVLDVNPNAVVVIQSGTPVTMPWANKTKALLHAWFGGNECGNGIADVLYGDVNPSGKLPITFPVRLQDNPSYVNFRSERGRVLYGEDVYVGYRYYEKVDLAPLFPFGHGLSYTTFTRSDLTLTTTPEKPQYEESGEPITATVTVTNTGKVAGAEIVQLWVAPPATEVNRPVRELKGFTKVFLQPGEQKKVEIVVEKKLATSWFDEMREKWASEKGEYGVLVTGTGEGVLKSSFKVEKTRYWLGL

SEQ ID NO: 238 - protein, 838 aa, Neosartorya fumigata
MVQLDVEKTIEELTLGEKVALTAGIDFWHTAAVPRLNIPSLRMSDGPNGVRGTRFFNGVPAACFPCATALGATWDTKLLYEVGRLMGEESIAKGAHVVLGPTINTQRSPLGGRGFESFAEDGVLSGILAGHYCKGLQETGVAATLKHFVCNDQEHERLAVDSIVTMRAMREIYLLPFQLAMRICKTACVMTAYNKVNGTHVSENKQIITDILRKEWGWDGLVMSDWFGTYSTCDAINAGLDLEMPGPTRWRGTALAHAVSSNKAFEFVMDERVRNILNLHNFVEPLGIPENAPEKALNRPEDQALLRRAAAESVVLIKNQDNILPLKKEKPILVIGPNAKTAAYCGGGSASLDAYYTVTPFEGVAAQSQGEVTFSQGVYSYKELPLLGPLLKTDDGKKGFKFRVYNEPPSEPNRQLIDELHLESSSGFLMDYKHPKIKTFTFYVDMEGYFTPEEDGIYDFGVTVVGTGKLFVDDELVVDNSKNQRQGTAMFGNATVEEKGSKELKAGQTYKVVLQFGTAPTSDLDMRGVVIFGPGGFRFGAARRVSQEELISKAAELASQTSQVVIFAGLTSEWETEGYDRDHMDLPPGSDEMISRVLDANPDTVVVIQSGTPVTMPWAHKAKALLQAWFGGNECGNGIADVLYGNVNPAAKLPLSFPVRLQDNPSYLNFRSERGRVLYGEDIYVGYRYYEKVDLAPLFPFGHGLSYTTFSRSDLSLATTPEKPQLEDGEPITVTVSVTNTGSVAGAEIVQLWVAPPPTGVNRPVRELKGFTKVFLQPGETKKVEIVVEKKLATSWWDEQREKWASEKGTYEVLVTGTGDEVLKSSFEVEKTRYWLGL

SEQ ID NO: 239 - protein, 818 aa, Aspergillus niger
MARVDFWHTASIPRLNIPALRMSDGPNGVRGTRFFNGIPAACFPCATALGATWDAHLLHEVGQLMGDESIAKGSHIVLGPTINIQRSPLGGRGFESFAEDGVLSGILAGNYCKGLQEKGVAATLKHFVCNDQEHERLAVSSIVTMRALREIYLLPFQLAMRICPTACVMTAYNKVNGTHVSENKELITDILRKEWNWDGLVMSDWFGTYTTSDAINAGLDLEMPGKTRWRGSALAHAVSSNKVAEFVLDDRVRNILNLVNWVEPLGIPEHAPEKALNRPQDRDLLRRAAAESVVLMKNEDNILPLRKDKPILVIGPNAQIAAYCGGGSASLDPYYTVSPFEGVTAKATSEVQFSQGVYSHKELPLLGPLLKTQDGKPGFTFRVYNEPPSHKDRTLVDELHLLRSSGFLMDYINPKIHSFTFFVDMEGYFTPTESGVYDFGVTVVGTGRLLIDNETVVDNTKNQRQGTAFFGNATVEERGSKHLNAGQTYKVVLEFGSAPTSDLDTRGIVVFGPGGFRFGAARQVSQEELISNAVSQASQASQVIIFAGLTSEWETEGNDREHMDLPPGTDEMISRVLDANPDNTVVCLQSGTPVTMPWVHKAKALVHAWFGGNECGNGIADVLFGDVNPSAKLPVTFPVRLQDNPSYLNFRSERGRVLYGEDVYVGYRYYEKTNVKPLYPFGHGLSYTTFSRSDLKITTSPEKSTLTDGEPITATVQVKNTGTVAGAEIVQLWVLPPKTEVNRPVRELKGFTKVFLQPGEEKQVEIVVEKKLATSWWDEQRGKWASEKGTYGVSVTGTGEEELSGEFGVERTRYWVGL

SEQ ID NO: 240 - protein, 839 aa, Aspergillus oryzae
MPRLDVEKTIEELSLGEKVALTAGIDFWHTASVPRLNIPTLRMSDGPNGVRGTRFFNGVPAACFPCATALGATWDTELLHEIGQLMGEESIAKGSHIILGPTINTQRSPLGGRGFESFAEDGVLSGLLAGYISKGIQEKGVAATLKHFVCNDQEHQRMAVDSIVTQRALREIYLLPFQLAMRICRTACVMTAYNKVNGTHVSQNKEIITDILRKEWGWDGLVMSDWFGTYSTSDAINAGLDLEMPGKTRWRGTALAHAVSSNEVAEFVMDERVRNVLNLVNFVDGLNIPENAPEKALNRPQDQALLRRAAAESVVLMKNEEDILPLKKEKSILVIGPNSKVAAYCGGGSASLDAYYTVTPFEGVSAQSKGEVKFSQGVYSHKDLPLLGPLLKTADGKTGFSFKVYNEHPSESNRELIEQLHLVSSSGFLMDYVNPKIKSLTYYVDMEGLFTPEEDGVYDFGVTVVGTGQLFIDGELVVDNTKNQRQGSAFFGSATVEEKGSKELKAGQTYKVLFQFGTAPTSDLDTRGVVVFGPGGFRFGASRRVGQEELISNAVKLASEAEQVVVFAGLTSEWETEGYDRDHMDLPPGSDEMISRVLDVNPNAVVVIQSGTPVTMPWANKTKALLHAWFGGNECGNGIADVLYGDVNPSGKLPITFPVRLQDNPSYVNFRSERGRVLYGEDVYVGYRYYEKVDLAPLFPFGHGLSYTTFTRSDLTLTTTPEKPQYEESGEPITATVTVTNTGKVAGAEIVQLWVAPPATEVNRPVRELKGFTKVFLQPGEQKKVEIVVEKKLATSWFDEMREKWASEKGEYEVLVTGTGEGVLKSSFKVEKTRYWLGL

SEQ ID NO: 241 - protein, 839 aa, Aspergillus terreus
MTRLDVEKTIEELTLGEKVALTAGIDFWHTASVPRLNIPTLRMSDGPNGVRGTRFFNGVPAACFPCATALGATWDTELLHECGRLMGEESIAKGSHIILGPTINTQRSPLGGRGFESFAEDGVLSGNLAGYMSKGIQEKGVAATLKHFVCNDQEHERLAVDSIVTMRAMREIYLMPFQLAMRICPTACVMTAYNKVNGTHVSENKQIITDILRKEWGWDGLVMSDWFGTYSTSEAINAGLDLEMPGKTRWRSTPLAHAVSSNKVAEFVMDERVRNVLNLVNFVEPLGIPENCPEKALNRPQDQALLRRAAAESIVLMKNDDNILPLKKDKPILVIGPNAKIAAYCGGGSASLDPYYTVTPFEGVSAKSTGAVTFSQGVYSHKQLPELGPLMKSADGKKGFSFRVYKEPVSAPSRELVDELHLVSSSGFLMDYVHPKIDSLTFYVDMEGYFTPEEDGVYDFGVTVVGTGKLLIDGETVVDNTKNQRPGSAFFGTATVEEQGSKELKAGQTYKVVLEFGTAPTSDLDTRGVVVFGPGGFRFGASRRVSQEELIAKAADAAAQAEQVVIFAGLTSEWETEGHDRDHMDLPPGSDEMIQRVLAANPNTAVVIQSGTPVTMPWAAQTKALVQAWFGGNECGNGIADVLYGDVNPAGKLPLSFPVRLQDNPSYLNFRSERGRVLYGEDVYVGYRYYEKVNLAPLFPFGHGLSYTTFERSDLTLATVPEKPQYETAGEPITASVTVTNTGPVAGAEVVQLWVRPPPTGVNRPVRELKGFAKVMLNPGEQKRVDIVVEKKLATSWWDEQREMWASEKGQYEVQVTGTGADVLTSSFAVEKTRFWLGL

SEQ ID NO: 242 - protein, 839 aa, Emericella nidulans
MPQLDVDKTIEELRLGEKIDLVSGIDFWHTASVPRLNIPSLRMSDGPNGVRGTRFFNGVPAACFPCATALGATWDTELLHKVGHLMGEEAIAKGAHVILGPTINTQRSPLGGRGFESFAEDGVLAGHLAGYCSKGIQEKGVAACLKHFVCNDQEHERLAVDSIVTDRATREIYLLPFQIAMRICKTATVMTAYNKINGTHVSENKKYITDILRKEWGWDGLVMSDWFGTYSCTSESIIAGLDIEMPGKTRWRGDALAHAVSSNKVHEFVLDERVRNVLNLVNYVEPLGIPENAEEKVLNRPEDQALLRRAAAESIVLLKNEDNILPFNKEKSIAVIGPNAKIAAYCGGGSASLDAYYTITPFEGVSAQSKGEVHFAQGSYSYKDLPLIGHLLKTDDGKTGFKFRVYDEPASSSNRELLHELHLVSSQGFLMDYRHPKIKSYLYYVDMEGYFTPEESGVYDFGVVVVGTGKLLVDDEVVVDNTKNQRLGSAFFGNGTVEEKGSKELMAGQKYKITFQFGTAPTSDIDTRGVVIFGPGGFRFGAARRQTQEELISKAVEVASKADQVVVFAGLTSEWETEGYDRPDMDLPPGSDELISKILEVKPNAAIVIQSGTPVTMPWAPKAKALLQAWFGGNECGNGIADVLYGNVNPSGKLPLTFPVRLQDNPSYLNFRSERGRVLYGEDIYVGYRYYEKAQLPPLFPFGHGLSYTTFTREKLELNTSPEKDKLQDGEPITARVTVTNTGKVAGAETVQLWVVPPPTEVNRPVRELKGFAKVHLEPGESKDVEIVVEKKLATSWWDEKREAWASEKGVYWVQVTGTGEGVLTAEFEVKKTRFWTGL

SEQ ID NO: 243 - protein, 838 aa, Neosartorya fischeri
MVQLDVEKTIEELTLGEKVALTAGIDFWHTAAVPRLNIPSLRLSDGPNGVRGTRFFNGVPAACFPCATALGATWDTKLLHEVGRLMGEESIAKGTHVVLGPTINIQRSPLGGRGFESFAEDGVLSGILAGHYCKGLQETGVAATLKHFVCNDQEHERLAVDSIVTMRAMREIYLLPFQLAMRICKTACVMTAYNKINGTHVSENKQIITDILRKEWGWDGLVMSDWFGTYSTSDAINAGLDLEMPGPTRWRGTALAHAVSSNKAFEFVVDERVRNILNLHNFVEPLGIPENAPEKALNRPEDQALLRRAAAESVVLMKNQDNILPLKKEKPILVIGPNAKTAAYCGGGSASLDAYYTVTPFEGVSAQSQGEVKFSQGVYSYKELPLLGPLLKTDDGKKGFKFRVYNEPPSEPNRQLIDELHLESSSGFLMDYKHPKIKTFTFYVDMEGYFTPEEDGIYDFGVTVVGTGKLFVDDELVVDNSKNQRQGTAMFGNATVEEKGSKELKAGQTYKVVLQFGTAPTSDLDMRGVVIFGPGGFRFGAARRVSQEELISKAAELASQASQVVIFAGLTSEWETEGHDRDHMDLPPGSDEMISRVLDANPNAVVVIQSGTPVTMPWAHKAKALLQAWFGGNECGNGIADVLYGAVNPAAKLPLSFPVRLQDNPSYLNFRSERGRVLYGEDVYVGYRYYEKVDLAPLFPFGHGLSYTTFSRSDLSLATTPEKPQLEDGEPITATVSVTNTGSVAGAEIVQLWVAPPPTGVNRPVRELKGFAKVFLQPGETKKVEIVVEKKLATSWWDEQREKWASEKGTYEVLVTGTGDEVLKTSFEVGKTRYWLGL

SEQ ID NO: 244 - protein, 865 aa, Neosartorya fumigata
MGSIDTVGMGQRAIDQIISELSLNEKVALLSGVDAWHTFAIPRLGIPSIRTTDGPNGARGTRYFNGVPSACLPCGTALGATFDRDLIFSLGQLLAAECRAKGAHVLLGPTINIQRGPLGGRGFESFSEDPVLSGLAAASYCSGVQDGGVVPTLKHLVCNDQEHERVAVSALVTPRALREIYLLPFQLAIQGARPGAVMTSYNKVNGLHASENPGLIRDILRGEWGYEGAVISDWFGTYSVADAVNAGLDLEMPGPTRFRGPALMHALTSNKVSEKTLNERVRKVLELVQLASRAGVPEYAPERKLNRPEDRALLRRAAGESVVLLKNDKNDSTNSPILPLDREKTTLVIGPNADLAAYCGGGSASLLAYYTVTPRQGIADKCGAEQVVFSQGCYGHKELPLLGEHLRTIETGQPGYTFRVYTEPPPASGSFKGSDSRTPVDELHMTNSSAFLMDYSHPQISGDTYYATLEGTFEPPESGVYEFGLTVAGTGLLYIDGVLVVDNKTVQRAGTSFFGIGTVEERGERYLEAGKKHHVFVEFGTAPTSNLQHHHGVVSFGPGGLRLGGCRKLDTDTAIQQAVQSAAQADQVVVCVGLSGDWESEGFDRPHMDLPPGTEELVNAVLAVQPNAVIVVQSGTPVTMPWADKAKALLQAWYGGNEAGNGIADVLFGDVNPSAKLPLTFPRELSQNPSYLSYRSERGRVLYSEDIYVGYRYYDTTGQPPLFRFGHGLSYSTFHLRDLTVRETAPYAANIKESSLRVSVTVSNTSARPGAEVVLVYVRPPAAACSVGRPVRELKGYEKVMLQPGETREVSITIPLGLATSFWDEGCDAWLSEKGLYFVEAVGTGEGNTLVAPLTVQVSRVWNGL

SEQ ID NO: 245 - protein, 865 aa, Neosartorya fumigata
MGSIDTVGMGQRAIDQIISELSLNEKVALLSGVDAWHTFAIPRLGIPSIRTTDGPNGARGTRYFNGVPSACLPCGTALGATFDRDLIFSLGQLLAAECRAKGAHVLLGPTINIQRGPLGGRGFESFSEDPVLSGLAAASYCSGVQDGGVVPTLKHLVCNDQEHERVAVSALVTPRALREIYLLPFQLAIQGARPGAVMTSYNKVNGLHASENPGLIRDILRGEWGYEGAVISDWFGTYSVADAVNAGLDLEMPGPTRFRGPALMHALTSNKVSEKTLNERVRKVLELVQLASRAGVPEYAPERKLNRPEDRALLRRAAGESVVLLKNDKNDSTNSPILPLDREKTTLVIGPNADLAAYCGGGSASLLAYYTVTPRQGIADKCGAEQVVFSQGCYGHKELPLLGEHLRTIETGQPGYTFRVYTEPPPASGSFKGSDSRTPVDELHMTNSSAFLMDYSHPQISGDTYYATLEGTFEPPESGVYEFGLTVAGTGLLYIDGVLVVDNKTVQRAGTSFFGIGTVEERGERYLEAGKKHHVFVEFGTAPTSNLQHHHGVVSFGPGGLRLGGCRKLDTDTAIQQAVQSAAQADQVVVCVGLSGDWESEGFDRPHMDLPPGTDELVNAVLAVQPNAVIVVQSGTPVTMPWADKAKALLQAWYGGNEAGNGIADVLFGDVNPSAKLPLTFPRELAQNPSYLSYRSERGRVLYSEDIYVGYRYYDTTGQPPLFRFGHGLSYSTFHLRDLTVRETAPYAANIKESSLRVSVTVSNTSARPGAEVVLVYVRPPAAACSVGRPVRELKGYEKVMLQPGETREVSITIPLGLATSFWDEGCDAWLSEKGLYFVEAVGTGEGNTLVAPLTVQVSRVWNGL

SEQ ID NO: 246 - protein, 850 aa, Emericella nidulans
MYRQEATTVTILAQAPPNWPAPAFDISGFTSAFRPSRRAQRSNTTMGSIDTNSTDAWHTFAIPRLGIPAMRITDGPNGARGTRYFNGVPSACLPCGTALGATFDTDLLFKLGRLLAAECKAKGAHVLLGPTINIQRGPLGGRGFESFSEDPVLSGNSAASYCAGVKDLGIVPTLKHLVCNDQEHERIAVSAMVTERALREIYLMPFQLAIKNARPGALMTSYNKVNGLHASEDPGLLNHIIRKEWGFEGLIMSDWFGTYSVASAVNAGLDLEMPGPTRFRGPALMHALTSNKVSEKTLDDRVRKVLELVQLTSRAGIPEYAPAQKLDRVEDRVLLRQAAADSIVLLKNANEVLPLDPRKKTLVIGPNADIAAYCGGGSASLLAYYTVTPRQGIAEKCEEVVFSQGCYGHKELPLLGDHLKTETGERGYTFRVYTEPATYEDRQPVDVLHMTNSCAFLMDYSHPKISGDTYYATLEGRFEPTESGVYELGLTVAGTGLLYIDGELVIDNKTKQRHGTSFFGIGTVEERGERYLEAGRQHHVFVEYSTAPTSNLKHHGVVSFGPGGVRLGGCRKLDAETAIKQAVQLAAETEQVVVCVGMNGNWESEGFDRPHMDLPPGTDNLVRAVIEAQPNAVIVVQSGTPVTMPWADQAKALVQAWYGGSEGGNGIADVLFGDVNPSAKLPLTFPRDIAHNPSYLSYRSERGRVLYSEDVYVGYRYYDKVKQAPLFHFGHGLSYTTFKLSGLNVQETDPQASDISAEVVQIYVRPPTTASVGRPVRELKGYEKTMLHPGETKEISVTVPMGVATSFWDEGRSAWLSEKGTYAIEVVGTGERNMLSAPLCVQVSRYWNGL

SEQ ID NO: 247 - protein, 864 aa, Neosartorya fischeri
MGSLDTVDMGQRAIDQIISELSLNEKVSLLSGVDAWHTFAIPRLGIPSIRTTDGPNGARGTRYFNGVPSACLPCGTALGATFDKDLIFSLGQLLAAECKAKGAHVLLGPTINIQRGPLGGRGFESFSEDPVLSGLAAASYCSGVQDGGVVPTLKHLVCNDQEHERVAVSALVTPRALREIYLLPFQLAIRGARPGAVMTSYNKVNGLHASESPGLIRDILRGEWGYEGAVISDWFGTYSVADAVNAGLDLEMPGPTRFRGPALMHALTSNKVSEKTLNERVRKVLELVQLASRSRVPEYAPERKLNRPEDRALLRRAAGESVVLLKNDKNDNNNSPILPLDREKKTLVIGPNADIAAYCGGGSASLLAYYTVTPRQGIADKCGADQVVFSQGCYGHKELPLLGEHLRTIETGEPGYTFRVYTEPPAASGSFKGNGSRKPVDELHMTNSSAFLMDYSHPQISGDTYYATLEGTLEPPESGVYEFGLTVAGTGLLYIDGVLVVDNKTVQRAGTSFFGIGTVEERGERYLEAGKKHHVFVEFGTAPTSNLQHHGVVSFGPGGLRLGGCRKLDTDAAIQQAVQSAAQTDQVVVCVGLSGDWESEGFDRPHMDLPPGTDELVNAVLEVQPNAVIVVQSGTPVTMPWADKAKALLQAWYGGNEAGNGIADVLFGDVNPSAKLPLTFPRELSQNPSYLSYRSERGRVLYSEDIYVGYRYYDKARQPPLFRFGHGLSYTTFHLSDLAVRETAPYAANIKESSLRVSVTVSNTGARPGAEVVLVYVRPPPATCSVGRPVRELKGYEKVMLQPGETREVSIAIPVGYATSFWDEGCDAWLSEKGLYFVEAVGTGECNTLVAPLSVQVSRMWNGL

SEQ ID NO: 248 - protein, 766 aa, Neosartorya fumigata
MGEICPRREDFDIDYILKNASLLEKVSLLAGYDFWHTAPLPRFNVPSVRVSDGPNGVRGTKFFDGVRAACLPCGTGLAATWDQSLLYDAGVLIGQDVYPTAAYIRGAQSTGVISTIKHFAANDQEHERISVNAVMSERALREVHLLPFQIAIADSAPGAVMTCYNKVNGQHLSESKEMLDGLLRREWGWKGLIMSDWFGTYSTAEALNAGLDLEMPGPTRLRGPLLELAISSRKVSRATLDERARTVLEFVQRARKAEVSAVESTRDFPEDRRLNRKLAADSIVLLKNESGLLPLNPQTLTSVALIGPNMKTAAFCGGGSASLQPYYSTSPYQGITSQLPPGVEVLYETGATSYAFIPELAASEVRTPEGQPGLGMRFYRDPPSVQERRVVEETIIQESSWQLMGFSNPELDRLFHADIEAELIAPATGPFQFGLAVYGSASLFLDDQLIIDNTTVQRGGTFFFGKGTLEETATVDLVQGQSYQIKVQFASGPSSKLVKPGVVNFGGGAGRLGMVQVVDPERAIARAVEAAKRADITILGVGLTRDHESEGFDRSHMDLPPAVASLVTAVLDVAPDAILLTQSGTPFSMLPWADLVKTHLHAWFGGNELGNGIADVLFGVVNPSGKLPLSFPRRIEDTPTYLNFGSERGQVTYGEGIYVGYKLLRKSPTSCALSIRVRSAPVHPCCFRSNSLLTRFVPQARFVVHLLCVLRFDGRHRVRYTECSKLGRRGRSGSSPAVYRGRSNNVVNRTSHQGAQRISKGGFAAR

SEQ ID NO: 249 - protein, 767 aa, Neosartorya fumigata
MGEICPRREDFDIDYILKNASLLEKVSLLAGYDFWHTAPLPRFNVPSVRVSDGPNGVRGTKFFDGVRAACLPCGTGLAATWDQSLLYDAGVLIGQECLAKGAHCWLVPTVCIQRSPLGGRGFESFAEDPYATGKLAAAYIRGAQSTGVISTIKHFAANDQEHERISVNAVMSERALREVHLLPFQIAIADSAPGAVMTCYNKVNGQHLSESKEMLDGLLRREWGWKGLIMSDWFGTYSTAEALNAGLGLEMPGTTRLRGPLLELAISSRKVSRATLDERARTVLEFVQRARKAEVSAVESTRDFPEDRRLNRKLAADSIVLLKNESGLLPLNPQTLTSVALIGPNMKTAAFCGGGSASLQPYYSTSPYQGITSQLPPGVEVLYETGATSYAFIPELEASEVRTPEGQPGLRMRFYRDPPSVQERRVLMGFSNPELDRLFYADIEAELIAPATGPFQFGLAVYGSASLFLNDQLIIDNTTVQRGGTFFFGKGTLEETATVDLVQGQSYQIKVQFASGPSSKLVKPGVVNFGGGAGRLGMVQVVDPERAIARAVEAAKRADITILGVGLTRDHESEGFDRSHMDLPPAVASLVTAVLDVAPDAILLTQSGTPFSMLPWADLVKTHLHAWFGGNELGNGIADVLFGVVNPSGKLPLSFPRRIEDTPTYLNFGSERGQVTYGEGIYVGYKLLRKSPTSCALSIRARFVVHLLCVLRFDGRHRVRYTECSKLGRRGRSGSSPAVYRGRSNNVVNRTSHQGAQRISKGGFAAR

SEQ ID NO: 250 - protein, 838 aa, Emericella nidulans
MGEISPRGGDFDIDYILENASSLEKISLLAGHDFWHTAPLPRFNVPSVRVSDGPNGVRGTKFFDGVRAACLPCGTGLAATWDQSLLFDAGVLIGQECLAKGAHCWLGPTVCIQRSPLGGRGFESFAEDPYATGKLAAAYIRGAQSTGVISTIKHFAANDQEHERISVNAVMSERALREVHLLPFQIAIADAAPGAVMTCYNKINGQHVSESKEMLDGLLRKEWGWKGLIMSDWFGTYSTAEALNAGLDLEMPGPTRLRGPLLELAISSRKVSRSTLDERARTVLEFVKRANKAEVSTVESTRDFPEDRRLNRKLAADSIVLLKNESGLLPLNLKALKSAALIGPNMKTAAFCGGGSASLQPYYSISPYQGIMNQLPPGVEIIYETGASSYVFIPELEASEVRTPEGQPGLRMRFYREPPSVKERRVVEETILQESSWQLMGFSNPQLDRLFYADIEAELIAPATGPFEFGLAVYGSGSLFIDDQLIIDNTTVQRGGNFFFGKGTREEKATVDLVKGQLYKIRVEFASGPSSKLMKPGVVNFGGGAGRLGMVQAIDPELAIARAVEAAKRADVTILGVGLTRDHESEGFDRSHMDLPPAVASLVTAVLDVAPDAILMTQSGTPFNMLPWADNVKTHLHAWFGGNELGNGIADVLFGVVNPSGKLPLSFPRRIEDTPTYLNFGSERGQVTYGEGIYVGYRYYEKVLRDVLYPFGHGLSYTSFAYSDFAVDTASATLNVRNSGDVAGAEVVQLYIAADATTSSIARPVKELKGFAKVTLQPGETCSVSIPFDRFTTAFWDQEAHVWTCEKGQYRVMVGSSSQNILLEGVLEIKETTTWSGL

SEQ ID NO: 251 - protein, 739 aa, Neosartorya fumigata
MQTLFLSLLAAAVTVHAYGSGGSNWDQAYSRAKDALQKLNQTEKVGLVTGVKWMGGPCVGNTYKPESIDYPSLCLQDSPLGIRFANPVTAFPAGINAGATWDTQLLYARGAAMGAEAKGLGIHVQLGPVAGPLGKNPNGGRNWEGFSVDPYLSGVAMEKTIRGMQDSGVQACAKHWLGNEQEHYRDTISSNIGDRAAHELYVWPFMDAVKAGVASVMCSYNKVNGTWACESDALNNKLMKEELGFPGYIMSDWNAQHSTVNSAVSGLDMTMPGSDFSNPPGSIFWGSNLEAAVADGSVPQSRLDDMVTRILAAWYLVGQDQGYPPVAFSSWNGGKANVDVTADHGTVARAVARDSIVLLKNGHGTLPLRKPKSLAIVGSDAIVNPAGPNACSDRGCNNGTLAMGWGSGTAEFPYLVGPLDAIQKRAAADGTKIVPSTTDDPTAGASAAAAAETAIVFINSDSGEGYITVEGNLGDRNNLDPWHNGNELVKAVAAASKNVIVVIHSVGPIILETILAQPSVKAIVWAGLPGQESGNALVDVIYGDTTPSGKLPYTIAKQAADYGASWINAETDDFPEGLYVDYRHFDAKGIAPRYEFGYGLSYTTFKYSGLWVNMDASAGAANGQVVPGGPADLFEVVGQVSVSVRNNGRVAGAEVAQLYLGLPDSAPATPPKQLRGFQKLMLQPGQTGRATFKLTRRDLSYWDVQQQKWVVPSGTFKVYVGSSSRDIREEGSFRVRRGW

SEQ ID NO: 252 - protein, 739 aa, Neosartorya fumigata
MQTLFLSLLAAAVTVHAYGSGGSNWDQAYSRAKDALQKLNQTEKVGLVTGVKWMGGPCVGNTYKPESIDYPSLCLQDSPLGIRFANPVTAFPAGINAGATWDTQLLYARGAAMGAEAKGLGIHVQLGPVAGPLGKNPNGGRNWEGFSVDPYLSGVAMEKTIRGMQDSGVQACAKHWLGNEQEHYRDTISSNIGDRAAHELYVWPFMDAVKAGVASVMCSYNKVNGTWACESDALNNKLMKEELGFPGYIMSDWNAQHSTVNSAVSGLDMTMPGSDFSNPPGSIFWGSNLEAAVADGSVPQSRLDDMVTRILAAWYLVGQDQGYPPVAFSSWNGGKANVDVTADHGTVARAVARDSIVLLKNGHGTLPLRKPKSLAIVGSDAIVNPAGPNACSDRGCNNGTLAMGWGSGTAEFPYLVGPLDAIQKRAAADGTKIVPSATDDPTAGASAAAAAETAIVFINSDSGEGYITVEGNLGDRNNLDPWHNGNELVKAVAAASKNVIVVIHSVGPIILETILAQPSVKAIVWAGLPGQESGNALVDVIYGDTTPSGKLPYTIAKQAADYGASWINAETDDFPEGLYVDYRHFDAKGIAPRYEFGYGLSYTTFKYSGLWVNMDASAGAANGQVVPGGPADLFEVVGQVSVSVRNNGRVAGAEVAQLYLGLPDSAPATPPKQLRGFQKLMLQPGQTGRATFKLTRRDLSYWDVQQQKWVVPSGTFKVYVGSSSRDIREEGSFRVRRGW

SEQ ID NO: 253 - protein, 736 aa, Aspergillus terreus
MNYRVPSLKATALAMAALTQALTTWDAAYEKALADLASLTQSEKVGVVSGITWEGGPCVGNTYAPESIAYPSLCLQDGPLGIRFANPVTAFPAGINAGATWDRELLRARGAAMGEEAKGLGVHVQLAPVAGALGKIPSAGRNWEGFTSDPYLSGIAMAETIHGMQGSGVQACAKHYILNEQEHSRETISSNVDDRTMHEVYLWPFYDAVKANVASVMCSYNKINGTWACENEGILDTLLKQELGFRGYVMSDWNAQHSTVASANTGLDMTMPGSDFSQPPGSIYWNENLAEAVANGSVPQARVDDMVTRILAAWYLLEQDQGYPAVAFDSRNGGKASVDVTADHADIARTVARDSIVLLKNSNNTLPLRNPSSIAVVGSDAIVNPDGPNACTDRGCNVGTLAQGWGSGTAEFPYLVAPLDAIQERSSGNGTKVVTSTTDDATAGADAAASADIAIVFISSDSGEGYITVEGHQGDRNNLDPWHGGNDLVKAVAAVNKKTIVVVHSTGPVVLETILAQPNVVAVVWAGIPGQESGNALADVLYGDVSPSGKLPYTIGKSEADYGTTWVANGADDDFPEGLFIDYRHFDKNEIEPRYEFGFGLSYTRFNFSNLAINIDATSGPTSGAVDVGGAADLYDSVGTISATVTNVGGVSGAEVAQLYIGFPSSAPETPPKQLRGFQKLPLAGGADGVAEFELTRRDISYWDVGQQKWVVPEGSFQVYVGASSRDIRLDGSFTV

SEQ ID NO: 254 - protein, 737 aa, Emericella nidulans
MRSLIRSGALNAFLAASLATGQVLTWDEAYTKATSDLSLLSQEEKVGIVTGVTWQGGPCVGNTYEPTSIPYPSLCLQDGPLSVRFANPVTVFPAGINAGATWDRELIRARGVAMGAESRGLGVHVQLGPVAGALGKIPSAGRNWEGFSNDPYLAGIAMAEAIQGMQSSGVQACAKHYLLNEQEYNRDTISSNADDRTIHELYLWPFYDAVKANVASVMCSYNKINGTWACEHDALLNGLLKGELGFKGHVLSDWNAQHSTVQSANTGLDMTMPGSDFSTPPGSIYWGDNLAAAIADGSVPQERLDDMVTRILAAWYLVGQDQGHPPVAFSSWDGGAASVNVTTPEHGELARTIARDSIVLLKNTNGSLPLAKPASLAVIGSDAIVNPDGANACADRGCNKGTLAQGWGSGTAEFPYLVAPLDAIEEKLAGAGTAIITSTTDDATSGAEAAAAAETAIVFITSDSGEGYITVEGHEGDRNNLDPWHNGNLLVQAVARTNTPTIVVLHSVGPVTLETILAEPNVVAVVWAGLPGQESGHALTDVLFGDYAPSGKLPFTIGKSEEDYGADWTTSQVDDFAEGLFIDYRHFDQYGIEPRYEFGFGLSYTSFNYSTLSTSISTTPGPTTGETIVGGPSDLFAPIGTVSAYVANTGHVAGAEVVQLYIGYPDSAPSIPPKQLRGFDKLHLVPGESGIATFELTRRDISYWDVGLQKWVVASGTFEVFVGASSRDIRLTGSFTV

SEQ ID NO: 255 - protein, 739 aa, Neosartorya fischeri
MQNLFLSLLAAAVTVHAYGSGGSNWDQAYSRAKDALQKLSQTEKVGLVTGVKWMGGPCVGNTYKPESIDYPSLCLQDSPLGIRFANPVTAFPAGINAGATWDTQLLYARGAAMGAEAKGLGVHVQLGPVAGPLGKNPNGGRNWEGFSVDPYLSGVAMEKTIRGMQDSGVQACAKHWLGNEQEHYRDTISSNIGDRAAHELYVWPFMDAVKADVASVMCSYNKVNGTWACESDAINNKLMKEELGFPGYIMSDWNAQHSTVNSAVSGLDMTMPGSDFSNPPGSIFWGSNLEAAVADGSVPQSRLDDMVTRILAAWYLVGQDKGYPPVAFSSWNGGKANVDVTADHGTVARAVARDSIVLLKNDQRTLPLRKPKSLAIVGLDAIVNPAGPNACSDRGCNNGTLAMGWGSGTAEFPYLVGPLDAIQKRAAADGTKIVPSTTDDPTAGASAAAAAETAIVFINSDSGEGYITVEGNLGDRNNLDPWHNGNELVKAVAAASKNVIVVVHSVGPIILETILAQPSVKAIVWAGLPGQESGNALVDVIYGDTAPSGKLPYTIAKQAADYGASWINAETDDFTEGLYIDYRHFDAKGIAPRYEFGYGLSYTTFKYSGLWVNVYTSAGAANGKVVPGGPADLFEVVGQVSVFVRNNGRVAGAEVAQLYIGLPDSAPATPPKQLRGFQKMMLQPGQMGRATFELTRRDLSYWDVQQQKWVVPSGTFKVYVGSSSRDIREEGSFRVRRGW

SEQ ID NO: 256 - protein, 769 aa, Neosartorya fumigata
MHSNVGLAGLAGLLATASVCLSAPADQNITSDTYFYGQSPPVYPSPEGTGTGSWAAAYAKAKKFVAQLTPEEKVNLTAGTDANNGCSGNIAAIPRLNFPGLCVSDAGNGLRGTDYVSSWPSGLHVGASWNKALARQRAVQMATEFRKKGVNVLLGPVVGPLGRVAEAGRNWEGFSNDPYLSGALVYETVDGAQSVGVATCTKHYILNEQETNRNPGMEDGVEVAAVSSNIDDKTMHELYLWPFQDAVLAGSASIMCSYNRVNNSYGCQNSKTLNGLLKTELGFQGYAMTDWGAQHAGIAGANAGLDMVMPSTETWGANLTTAISNGTMDASRLDDMATRIIASWYQMNQDSDFPSPGAGMPSDMYAPHQRVIGRDASSKQTLLRGAIEGHVLVKNNHSALPLKSPQLLSVFGYDAKGPNALKQNFNWLSYSPAIQENHTLWVGGGSGANNAAYIDAPIDAIQRQAYEDGTSVLYDISSEDPEVDPTTDACLVFINSYATEGWDRPGLADNSSDTLVKNVARKCANTIVTIHNAGIRVVGEWIDHENVTAVIFAHLPGQDSGRALVELLYGRANPSGKLPYTVAKKAEDYGSLLHPSLPETPYGLFPQSDFDEGVYIDYRAFDRANITAQFEFGFGLSYTSFDYSGLQISNPKQSPQYPPSAAIQQGGNPHLWDNIVTVSAEIKNTGRVAGAEVAQLYIGIPNGPVRQLRGFEKVDVSAGETTQVQFALNRRDLSTWDVEAQQWSLQRGTYRVYVGRSSRDLPLTGSFTL

SEQ ID NO: 257 - protein, 768 aa, Aspergillus flavus
MHAIAGLTGFLAGVSLSYAAPTQENITSDAYFYGQSPAVYPSPEGTGSGAWASAYEKAKAFVANLTPEEKVNLTAGTDADNGCSGNIPAIPRLNFPGLCVSDAGNGLRSTDHVNAWSSGIHTGASWNKDLAQKRGLHMGSEYHKKGVNVLLGPVVGPLGRIAEGGRNWEGFSVDPYHSGLLVYETIRGIQAAGVGTSTKHYIANEQETNRNPESTDGIDVAAVSSNIDDKTMHELYLWPFQDVVRAGSVSIMCSYQRINNSYGCQNSKTLNGLLKTELGFQGYVMTDWGAQHGGIASSNAGLDMVMPSSTLWNSNLTDAIANGTMEASRLDDMATRIIASWYQMNQDAGFPSPGIGMPADVYAPHQAIIGKSSDSRKVLLQSAIEGHVLVKNKNNTLPLKSPEMISVFGYDAKGPDSLGFALEWLSYSPAIQPNHTLIVGGGSGGNSPAYISAPLDALQQQVIEDGSSILWNISAQDPEVDPNTDACLVFINSYATEGYDRAGLVDEGSDELVTNVASKCSNTIVTIHNAGIRLVNNWIDHENVTAVIFAHLPGQDSGRALVELLYGRSNPSGKLPYTVAKNADDYGALLHPKLPEGQYGLFPQDDFSEGVYIDYRAFDKQGIEPQFEFGFGLSYTTFDYSGLNIGQVSDNSTSRYPPSAAIQEGGNPHLWDVILRVSVDITNSGPVAGDEVAQLYVGIPNGPVRQLRGFEKVNIPVGQTVTVEFALGRRDLSTWDVVAQEWLLQSGTYQVYVGRSSRDLPLQGEFTI

SEQ ID NO: 258 - protein, 769 aa, Neosartorya fumigata
MHSNVGLAGLAGLLATASVCLSAPADQNITSDTYFYGQSPPVYPSPEGTGTGSWAAAYAKAKKFVAQLTPEEKVNLTAGTDANNGCSGNIAAIPRLNFPGLCVSDAGNGLRGTDYVSSWPSGLHVGASWNKALARQRAVQMATEFRKKGVNVLLGPVVGPLGRVAEAGRNWEGFSNDPYLSGALVYETVDGAQSVGVATCTKHYILNEQETNRNPGMEDGVEVAAVSSNIDDKTMHELYLWPFQDAVLAGSASIMCSYNRVNNSYGCQNSKTLNGLLKTELGFQGYVMTDWGAQHAGIAGANAGLDMVMPSTETWGANLTTAISNGTMDASRLDDMATRIIASWYQMNQDSDFPSPGAGMPSDMYAPHQRVIGRDASSKQTLLRGAIEGHVLVKNNHSALPLKSPQLLSVFGYDAKGPNALKQNFNWLSYSPAIQENHTLWVGGGSGANNAAYIDAPIDAIQRQAYEDGTSVLYDISSEDPEVDPTTDACLVFINSYATEGWDRPGLADNSSDTLVKNVARKCANTIVTIHNAGIRVVGEWIDHENVTAVIFAHLPGQDSGRALVELLYGRANPSGKLPYTVAKKVEDYGSLLHPSLPETPYGLFPQSDFDEGVYIDYRAFDRANITAQFEFGFGLSYTSFDYSGLQISNPKQSPQYPPSAAIQQGGNPHLWDNIVTVSAEIKNTGRVAGAEVAQLYIGIPNGPVRQLRGFEKVDVSAGETTQVQFALNRRDLSTWDVEAQQWSLQRGTYRVYVGRSSRDLPLTGSFTL

SEQ ID NO: 259 - protein, 765 aa, Aspergillus niger
MHSISALLSLLGGLALSSAAPTQNITSDAYFYGQSPAVYPSPEGTGTGSWASAYEKAKAFVAQLTDDEKVNLTAGVSSKTGCSGFIAEIPRLNFTGLCVSDASNGLRGTDYVNGWSSGIHVGASWNRTLARDRAKYMGQEFHRKGVNLLLGPVVGPLGRVAEGGRNWEGFSNDPYLTGALVYETVQGVQSSGVGVSTKHYIGNEQETNRNPETVNGVDVASVSSNIDDKTIHELYLWPFQDAVLAGSVAIMCSYERINNSYACQNSKTLNGLLKTELGFQGYVITDWGAQHGGIASANAGLDMVMPETTLWGSNLTTAIANGTMEASRLDDMATRIIATWYQLNQDTDFPTPGVGMPASAQSEHQVVVGTAPDEKSTLLESAIEGHVLVKNTNNALPLQTPQLVSVFGYDAKVTDSFDLASTVLGTSPLFQNYTLWVGGGSGSNSPAYVIAPLNAIQQQAYEDGTSVLWDVSAQDPEVDPTSEACLVFINSFATEGYDRSALTDDYSDTLVTNVASKCNNTIVVVHNAGIRLVYNWIDHENVTAVVLAHLPGQDTGHALVDILYGRANPSGKLPYTIAKQASDYGSLLHPSEPQTPYGLFPQSDFSEGVYIDYRAFDKDNITPQFEFGFGLSYTTFAYSGLSIEKTNETTSEYPPSAAIQEGGNPRLWDDLVTVTAEVQNSGSVDGAEVAQLYVGIPNGPVRQLRGFDKVLLSAGETAQVSFSLNRRDLSTWNVEAQQWQLQSGTYQVYVGRSSRDLPLTGEFSI

SEQ ID NO: 260 - protein, 768 aa, Aspergillus oryzae
MHAIAGLTGLLAGVSLSYAAPTHENITSDAYFYGQSPAVYPSPEGTGSGAWASAYEKAKAFVANLTPEEKVNLTAGTDADNGCSGNIPAIPRLNFPGLCVSDAGNGLRSTDHVNAWSSGIHTGASWNKDLAQKRGLHMGSEYHKKGVNVLLGPVVGPLGRIAEGGRNWEGFSVDPYHSGLLVYETIRGIQAAGVGTSTKHYIANEQETNRNPESTDGIDVAAVSSNIDDKTMHELYLWPFQDVVRAGSVSIMCSYQRINNSYGCQNSKTLNGLLKTELGFQGYVMTDWGAQHGGIASSNAGLDMVMPSSTLWNSNLTDAIANGTMEASRLDDMATRIIASWYQMNQDAGFPSPGVGMPADVYAPHQAIIGKSSDSRKVLLQSAIEGHVLVKNKNNTLPLKSPEMISVFGYDAKGPDSLGFALEWLSYSPAIQPNHTLIVGGGSGGNSPAYISAPLDALQQQVIEDGSSILWNISAQDPEVDPNTDACLVFINSYATEGYDRAGLVDEGSDELVTNVASKCSNTIVTIHNAGIRLVNNWIDHENVTAVIFAHLPGQDSGRALVELLYGRSNPSGKLPYTVAKSADDYGALLHPKLPEGQYGLFPQDDFSEGVYIDYRAFDKQGIEPQFEFGFGLSYTTFDYSGLNIGQVSDNSTSRYPPSAAIQEGGNPHLWDVILRVSVDITNSGPVAGDEVAQLYVGIPNGPVRQLRGFEKVNIPVGQTVTVEFALGRRDLSTWDVVAQEWLLQSGTYQVYVGRSSRDLPLQGEFTI

SEQ ID NO: 261 - protein, 782 aa, Aspergillus terreus
MHSFLGLVGLLAGVSVSSAAPSVQNITSDTYFYGQSPPVYPSPEGNGTGSWAVAYQKAKAFVAQLTSEEKVNLTAGVTSDTGCSGMIPAIPRLNFPGLCVSDAGDGLRGTDYVNSWPSGIHAGASWNKNLARQRAYHMGTEFHKKGVNVLLGPVVAPLGRVVEGGRNWEGFSNDPYLSGALVYETVKGIQSAGVGACTKVRFPQRLQSSGSNLVQHFTGYEQETNRNPETVDGVDIASVSSNIDDKAMHELYLWPFQDAVHAGSVSVMCSYQRINNSYACQNSKTLNGLLKTELGFQGYVMTDWYGQHGGIAAANAGLDMVMPYTELWGSNLTDAISNGTMEASRLDDMATRIIASWYQVNQNKNFPAPGIGMPADVNEPHQAVIGKSPDSRTTLLQGAIEGHVLVKNTKQALPLQSPRLLSVFGYDAKAGDSLIVNDVSFVNASVQKNHTLYVGGGSGTNSAAYVLAPLDAVQQQAYEDGTSVLWDVVSEDPDVDATTDACLVFINAYATEGYDRPGLVNKESDTLITNVAGKCNNTIVTIHNAGIRLVGDWINHENVTAVIFAHLPGQDTGKALVELLYGRANPSGRLPYTVAKRAGDYGSLLHPSQPEGKYGLFPQSDFSEGVFIDYRAFDKQGIEPQFEFGFGLSYTSFNYSGLAVKKVNRTTEPYPASAPVQEGGNPNLWDEILTVSAKVQNSGSMDGDEVAQLYLGIPNAPVRQLRGFEKVGIPAGQAVNVKFSLTRRDLSVWDTEAQQWKLQSGDYQVYVGRSSRDLPLKGQFSI

SEQ ID NO: 262 - protein, 772 aa, Emericella nidulans
MLTSWGKTGFVLALALGGRAAENVITSDTFFYGESPPVYPSPEGTGAGDWASAYTKARAFVAQLSDDEKIQLTAGVSSNTACSGFIQPIDRLGFPGICMSDAGNGLRGTDYVNGWSSGISVGASWNRDLAHSRGAYMGQEYRKKGVNMILGPVVGPLGRVALGGRNWEGYAADPYLSGVLVSESVKGLQSQKVATSVKHFIANEQETNRNPTTDSERNVVQSVSSNIDDKTMHELYLWPFQDAVLAGATNLMCSYNRVNNSYACQNSKLLNGVLKTELGFQGYVVTDWGAQHAGIASANAGLDVVMPRSSTWNSNLTTAIANGTMEASRLDDMITRLMATWYYLDQDTEFPSPGVGMPSSPSAAHQAVIATSPEAKPILLQSAIESHVLVKNTDGALPLKSPKLISVFGYDAYAPLTYDLGNNFDFSSTRVRSDLYKNGTLYVGGGSGLNSPAYIDAPIDAIKRRAYEDGSSVLWDFTSENPSVDYTSDVCLVFINAYATEGYDRQALSDTHSDSVVENIAGNCSNTIVVVHNAGIRTAEAWVDHANVTAIIYAHLPGQDIGRALVRLLYGESNFSGRLPYTVAKNSSDYGSLLEPSQPEGKYQYFPQSDFSEGVYIDYRAFDKDGIVPQYAFGYGLSYTTFEYSDLKISKNSDGVPSIYPAKASILPGGNPHLFDELVTVTAKIRNTGNVDGQEVAQLYVGIPDGPVRQLRGFDKVLIESGSSATVTFSLTRRDLSTWDANAQEWSLQRGTYKIFVGRDSRDLPLEETLVF

SEQ ID NO: 263 - protein, 769 aa, Neosartorya fischeri
MHSNLGLAGLAGLLATASVCLSAPADQNITSDTYCYGQSPPVYPSPEGSGTGSWAAAYAKAKNFVAQLTPEEKVNLTAGTDANNGCSGNIAAIPRLNFPGLCVSDAGNGLRGTDYVSSWPSGLHVGASWSKALAKQRAIHMAKEFRKKGVNVILGPVVGPLGRVAEAGRNWEGFSNDPYLSGALVYETVDGAQSVGVATCTKHYILNEQETNRNPGTEDGVDIAAVSSNIDDKTMHELYLWPFQDAVLAGSASIMCSYNRVNNSYGCQNSKTLNGLLKTELGFQGYVMTDWGAQHAGIAGANAGLDMVMPSTETWGANLTTAISNGTMDASRLDDMAIRIIASWYQMNQNSDSPSPGVGMPTNMYAPHQRVIGREASSKQTLLRGAIEGHVLVKNTNSALPLKSPQLLSVFGYDAKGPDALKQNFNWLSYSPAIQENHTLWVGGGSGANNAAYVDAPIDAIKRQAYEDGTSVLYDLSSEDPDVDPTTDACLVFINSYATEGWDRPGLADKSSDSLVKNVAGKCANTIVTIHNAGIRVIGDWIDHENVTAVIFAHLPGQDSGRALVELLYGRANPSGKLPYTVAKKAEDYGSLLHPSLPETPYGLFPQSDFDEGVYIDYRAFDKANITPQFEFGFGLSYTAFEYSGLRISNPKKSPQYPPSAAIQQGGNPHLWDKTVTVSAEVKNTGRVAGAEVAQLYIGIPNGPVRQLRGFEKVDVSAGETTQVKFALNRRDLSTWDVEAQQWSLQRGTYRVYVGRSSRDLPLTGSFTL

SEQ ID NO: 264 - protein, 670 aa, Emericella nidulans
MHSNILPVLTSVATLLGLVQGQSQQPYRDWAKAYEAAETLVLPWTLEQQANISVRDGTAPGFVPFEPSDGVRSVQGSGKDYDNPAMRTSSNLDDRTLHELYLWPWIDGVANGLGSVMCVMNRVNGIIGCENDHIMNGILKNETGFRGFIVPDVTAPVDKAAGLLGGLGWNSGYSVSEIMAAVKNGSIPESVMTEHALRIVATQLNLLQPPEEYAFPVETADLNVRDPSSKDFIRRAGSESIVLLKNKNNTLPLRSPMSLGIFGKDAANLATGPTPQSDFSNFAGDTYDGHLITGGGSYSPAPYVVSPLDALTARAADGQGFGYKYILSDNWTVTPSESTGEGFFQTSGVSVSQYARESEHCLVFINAFGKEGSDRRTLADETGDKLVNDVADYCGSTIVIINNAGVRLVDAWIEHENVTVFTDLIPCSNQVHTNMFCFPGCPERRRSRQESGHAIVDVLFGDVNPSAKLVYTIAKSKDDYNGQICECCECDYTEGLYIDYRHFDQAGIEPRFEFGFGLCFKSDGRANIAAYTTFTHSDLTINPSTDITTLQPYATGPITEGGPSDLFEQILTISASISNTGGVAGAEVAQLYLSFPDAAKAPVRQLRGFEKVYLEPGETKFVSFPIQRRDLSIWDEQTSKWKIVGGKYGVVLGRSSRDFTVEETLELLTI

SEQ ID NO: 265 - protein, 517 aa, Emericella nidulans
MTVLAPWALWEKTKDVMVLEQQYQSMCTWIAAIPENMKRHRHLCDPVVLQFAVAVRESNPWAVMTAYHKINGVHCSEDPRLIRDIPRSEWKYDGLVLCDWWGIYSTSELINAGMDLEMPGPTDWRCKILAWATRSRKVSIETIDSSVRRVLKLVNRVLAAQSEPVKDSDTEKNRALLRETTAVPVVLLKKNEANVLPLVKDSKTRYALIGDHWKNPAVAGDDSSEVTPYYVSTPYSAFVEAVGEDSFICAMGCYSHKFAPLLYSTITQPGSDAHGMLLEFFNKDPNGSSDAELLYTTTTEKTDLKFADSLPPDTVPEYTSSGSAPSRGSRWGCAGWIREAVEIARQVDIPVILTGLSADYEYEGIDRKSLGLPGRVDELIERVTEANPKTIIITEAGTATTMPWADKTPTVIHSWFGRQETGHGIVDILFGDVNPSGRLPLTFPRNLEVPPVYESDPKHIMTISVSLKNTGQCPGAEIVQVYVKDVSSSVQRPRKELKSFKKVHLAPGENMKIEVTS

SEQ ID NO: 266 - protein, 564 aa, Aspergillus clavatus
MRGAFLATAAAIAGTAMADIAHMRRHGHDSFHQRRAVEQPAPEADATCGCTTEVVTSWGPPTLIPIATSSPSSTVTSEVVTTLHSTSYSTVTLVVTPSGASPNRESAPATPAVTLPTPGVTSFSTTGTYTIPATTLTVTHSTTVCGATTTELPSGTHTYGGVTTVVDRHTTVVCPYATVEPSGSTVTSVIRTTTYVCPSAGTYTIAPTTTYVPTSTVIVYPTPATITPGTYTQPAQTITVTRDNYIYVCPFTGQQLPTTAPVAPATTAVPATTTAVPATTTAVPATSSVAPSSSPSKPAAPSGAVSGQMGMTYSPYTNEGGCKDKASIISEVALLKSKGFTHVRVYSTDCGSLEFIGEAARTSGLRMIIGVFIKQSGVAGAQDQVTAISKWAQWDLVSLIVVGNESIQNHFCDASTLAGFIVSAKQSFKAAGYSGQVTTTEPINVWQANGDALCGAVDIIGANIHPFFNADVSAAEAGKFVAQEFKTLKGICPGKDVINLETGWPHSGEANGKAIPSREEQAIAIKAIADEVGSMSVFFSYFDDLWKQPGAFGVERYWGCIENF

SEQ ID NO: 267 - protein, 565 aa, Neosartorya fumigata
MRGAILATAAALAGTAMADVAHMRRHGHDSFHQRRSPLAEADATCGCTTEVVTVWGPPTLIPVASPTPSTVTSEAVTTLHSTSTTTVTVIASASTPAASPSPATDKVPLPTPAITNFPSTGVYTIPATTVTVFDTTTVCGATTTELPAGTHTYGGVTTVVETATTVVCPYATVEPSGTTVTSVIKTTTYVCPSAGTYTIAPTTTTVPTSTVIVYPTPAVITPGTYTQPEQTVTVTRTDYTYVCPFTGQDEPTSAPAAPSTTAVPATTTAAPETTTAAPDTTTAVPSTSSAAPSSSSTAPASTGAVSGQMGMTYTPYTKGGDCKDKSSVLSEVAALKSKGFTHVRVYSTDCNSLEYIGEAARTSGLQMIIGVFISSTGVSGAQDQVTAISKWAQWDLVSLIVVGNEAIQNGYCDASTLAGFISSAKSAFQAAGYTGKVTTTEPINVWQAHGSTLCGVCDIVGANIHPFFNADVSADQAGKFVAQEIKVLESICPGKDVLNLETGWPHAGNANGKAVPGTSEQAIAIKSIADEVGSKSVFFSYFDDLWKEPGQFGVERYWGCFDTFN

SEQ ID NO: 268 - protein, 602 aa, Aspergillus flavus
MRGAFLAAAAAVAGTAMADVAHMRRHGHDSFHHNRAYQPEVPAEGDENCECTTKVITITGPPTLVPINTPAPEPSSSSSSEVPSVPSSESSVVTSEAVTTLHSTSTATVTVVTTPGVDATGAQTPTGGVPGTPEASSPAGTPEASTPAVPATSESPLPTPGVTSFSSTGIYTIPATTVTVRDTTTVCGATTTELPSGTHTFGGVTTVVSTATTVTCPVATVEPSGSTVTSKIYTTTYVCPSAGTYTIAPTTTYVPTSTVVVYPTPATITPGTYTQDEQTVTVTRTDFTYVCPFTGNDQPTSAPVASTSAVPVTTTAAPSTTSAVASSSASASSTATAVPTGVSGQQMGMTYSPYTNEGGCQSKDQVLKDVALIKQKGFTHVRVYSTDCNGLEYIGEAARENGLKMIIGVFISSTGISGAQEQVTAITKWAQWDLVTLVVVGNEAIQNGYTDASSLAGFISSCKSSFQASGYSGQVTTTEPINVWQQSGSALCGAVDILGANLHPFFNADVTPDQAGSFVRAQIKDLEAVCNKDVINLETGWPSAGNANGKAVPGTAQQAAAIKALVEEVGSQSVFFSYSNDLWKDAGEFDVERYWGCIDQFK

SEQ ID NO: 269 - protein, 565 aa, Neosartorya fumigata; identical to SEQ ID NO: 267

SEQ ID NO: 270 - protein, 602 aa, Aspergillus oryzae; identical to SEQ ID NO: 268

SEQ ID NO: 271 - protein, 558 aa, Aspergillus terreus
MKAAILATAAALTGSALADVAHMRRGHDSFHHRRAMHAQEPEETCGCTTEVITFYGSPTLVPISTPSATPTPAPAPETTSTEEVTTTLHSTSTSTVTVTATPETPEVTLPTPGVTSFSSTGVYTIPATTLTVTDTTTVCGATSTELPSGTATYGGVTTVVETSTTVVCPYATVKPSGSTVTSVIETTTYVCPSAGTYTVVPPTTTYVPTSTVMVYPTPATFTPGTYTQDAQTVTVTRTDYTYVCPTFHPELPSSSAPAPTTSAVPTTTAVPTSTVVPSSTTSVPASSSSSSAEVPQTTGSGQMGMTYSPYTNAGGCKSKADVLQDIATIKQKGFTHVRVYSTDCSSLEWIGEGAKQQGLIMILGVYIDSSGVSGAQSQVTDIANWAEWDLVSLIVVGNEAIQNGYCTASELASFITSAKQAFKAAGYSGQVTTTEPINVWESSGSALCSSIDILGANIHPFFNSEVTASQAGKFVQSQVDILEKICPGKDVINLETGWPSKGSANGLAIPGTSQQSEAIKSLRNDVGALSVFFSFSNDLWKSPGAFDVEQYWGCIDQF

SEQ ID NO: 272 - protein, 555 aa, Emericella nidulans
MRGAILATAAAFAGTAVADMHMRRHAHEGLHHRALHASSAVPEEECGCTTEVITYWGEPTTIPLSVPTSTVTSETTETVHSTSYSTVTVTATSSAAPVETPSETPSPTPEVTLPTAGVTSYSETGTYTIPATTITVTDTTTVCGATTTELPSGTHTYGGVTTIVETATTITCPYATVKPTGSTVTSVIETTTYVCPSAGTYTIAPTTTFVPTSTVVVYPTPETVTPGTYTNPGTTITVTRTEDVYVCPYTNGNVPTSVPALPTTSAASTTTAVPSSSTTTSSATSVPTGASGNKMGMTFTPYNNDGSCMAKNDVLEQVGLIKGKGFSHVRVYGTDCHTLEYVGAACSTHGLKMILGVNVEGSTGFDGARSQFKDITNWGQWDLVSLIVVGNEVVTSNIASAAQLASFVSEGASAFSAAGYTGQVTTAEPIDVWLSNGATLCPVVDILGANLHPFFNPEFTAAEAGTLVSNQIKDLKQVCTGKDVINLETGWPNAGSANGKAIPGQSQQTTAIKSLVEKVGDVSVFFSYADDGWKSKFATSDKYNVEQHWGCIDQF

SEQ ID NO: 273 - protein, 552 aa, Neosartorya fischeri
MRGAILATAAALAGTAMADVAHMRRHGHDSFHQRRAAVAEADATCGCTTEVVTVWGPPTLIPVATPTPSTVTSEAVTTLHSTSTSTVTIVASASTPATSSSPATPKVPLPTPAITNFPSTGVYTIPATTVTVFDTTTVCGATTTELPAGTHTYGGVTTVVETATTVVCPYATVEPSGTTVTSVIKTTTYVCPTPGTYTIAPTTTTVPTSTVVVYPTPAVITPGTYTQPEQTVTVTRTDYTYVCPFTGQNEPTSAPAAPSTTAVPATTTAAVPSTSSAAPSSSSTAPASTGAVGGQMGMTYTPYTKGGDCKDKSSVLSEVANLKSKGFTHVRVYSTDCNSLEYIGEAARTSGLQMIIGVFISSTGVSGAQDQVTAISKWAQWDLVSLIVVGNEAIQNGYCDASTLAGFISSAKSAFQSAGYTGKVTTTEPINVWQAYGSTLCGVCDIIGANIHPFFNADVSADQAGKFVAQEIKVLEGICPGKDVLNLETGWPHAGNANGKAVPGASEQAIAIKSIAQEVGSKSVFFSYFDDLWKEPGQFDVERYWGCIDTFN

SEQ ID NO: 274 - protein, 771 aa, Aspergillus clavatus
MVGLTPQHYGNAIALMTYLASTALADNKFPDCTSGPLSKLAVCDTSRDVTTRAQSLVDAMSFAEKVNNTQYEAPGVPRLGLPAYNWWSEALHGVAGAPGVHFADSGPFSYATSFAQPILLGASFDDELVKQVATVVGTEGRAFGNAGRAGLDYWTPNINPFRDPRWGRGQETPGEDPLHVSRYVYHLVDGLQGGIGPARPQIAATCKHFAAYDMEDWNGVSRHEFDARVSTQDLAEFYLPSFKSCVRDAQVDAVMCSYNALNGVPTCADPYLLQTLLREHWDWDQPGHWVVSDCGAIDDIYIGHNYTKTGAEAAAVALNAGTDLDCGTVFPKHLGEAAEQGLYTNQTLDRALVRLYSSLVKLGYFDPAEKQPYGSIGWKDVDTPAAEQLAHKAAVEGIVLLKNDQTLPLKAKGTLALIGPYANATKQMQGNYQGPPKYIRTLEWAATQHGYQVQYSPGTAINNSSTAGFAAALAAAKDADVVLYAGGIDNTIESETLDRTTITWPGNQLSLISELSNLHKPLIVIQFGGGQVDDTPLLTNPHVNALLWAGYPSQEGGAAIFDILTGKAAPAGRLPITQYPAAYTAQVPMTEMGLRAGGDNPGRTYRWYDKAVVPFGFGLHYTSFEVSWDRGRLGPYNTAALVNRAPGGSHVDRALFDTFRVQVQNTGTVTSDYVALLFVKTEDAGPEPYPLKTLVGYTRVQQVKPGERRSVEIEVTLGAMARTAANGDLVLYPGKYTLQVDVGERGYPTARVSVHGKEVVLDHFPQPPEGR

SEQ ID NO: 275 - protein, 771 aa, Neosartorya fumigata
MAHITSWHYGNAIALLVSLAPGALSLNTFPDCSSGPLSKLAVCDTSLDVTTRAQSLVNAMTFEEKVNNTQYNSPGVPRLGLPAYNWWSEALHGVAGSPGVEFADSGPFSYATSFPQPILLGATFDDDLIKQVATVVSTEGRAFGNAGRSGLDFWTPNINPFRDARWGRGQETPGEDPLHVSRYVYHLVDGLQNGIGPANPKVVATCKHFAAYDLEDWNGVVRHSFNAEVSTQDLSEFYLPPFKSCARDARVDAVMCSYNALNGVPACADSYLLQTILREHWKWDEPGRWITSDCGAIDDIYNGHNFTTTPAEAAATALNAGTDLDCGTVFPKYLGQAADEGLYSNQTLDRALVRLYSSLVKLGYFDPAEDQPYRSIGWTDVDTPAAEALAHKAAGEGIVLLKNDKTLPLKAKGTLALIGPYANATKQMQGNYEGPAKYIRTLLWAATQAGYDVKYAAGTAINTNSTAGFDAALSAAKQADVVVYAGGIDNTIEAEGRDRTTIAWPGNQVNLIDQLSKIGKPLVVVQFGGGQVDDSSLLSNPRVNALLWAGYPSQEGGSAIFDILTGKTAPAGRLPVTQYPADYVNQVPMTDMALRPGSNTPGRTYRWYDKAVLPFGFGLHYTTFKISWPRRALGPYNTAALVSRSPKNVPIDRAAFDTFHIQVTNTGKTTSDYVALLFLKTTDAGPKPYPLKTLVGYTRAKQIKPGEKRSVDIEVSLGSLARTAENGDLVLYPGRYTLEVDVGESQYPTASFTVTGKETILDSFPQPPKTR

SEQ ID NO: 276 - protein, 776 aa, Aspergillus flavus
MVHLSPLLRPLAAFSFFTSLASTESIFPDCSTGPLSKNNVCDTSLDPVSRAKSLVAAMTLEEKINNTKYDSSGAPRLGLPAYNWWNEALHGVAEGHGVSFSDSGNFSYATSFPMPILLGAAFDDDLVKQVATVISTEARAFANGGHAGLDYWTPNINPFRDPRWGRGQETPGEDPLHLSRYVYHLVDGLQDGIGPERPKVVATCKHFAAYDLENWEGIERYAFDAVVSPQDLSEYYLPSFKTCTRDAKVDAVMCSYNSLNGIPTCADRWLLQTLLREHWGWEQTGHWVTGDCGAIDNIYADHHYVADGAHAAAAALNAGTDLDCGSVFPEYLRSALQQGLYNNQTLNNALIRLYSSLVKLGYFDPADDQPYRSIGWNEVFTPAAEELAHKATVEGIVMLKNDGTLPLKSNGTVAIIGPFANATTQLQGNYEGPPKYIRTLIWAAVHNGYKVKFSQGTDINSNSSAGFAEAISAAKEADTVIYAGGIDNTIEKESQDRTTIVWPGNQLDLIEQLSDLEKPLIVVQFGGGQVDDSSLLANAGVGALLWAGYPSQAGGAAVFDILTGKSAPAGRLPVTQYPASYVDEVPMTDMTLRPGSNNPGRTYRWYDKAVLPFGFGLHYTTFNVSWNHAEYGPYNTDSVASGTTNAPVDTELFDTFSITVTNTGNVASDYIALLFLTADRVGPEPYPIKTLVGYSRAKGIEPGQSQQVKLDVSVGSVARTAENGDLVLYPGSYKLEVDVGQDFPTATFTVSGKEKVLDEFPEPQQNATSAVTRWGR

SEQ ID NO: 277 - protein, 771 aa, Neosartorya fumigata; identical to SEQ ID NO: 275

SEQ ID NO: 278 - protein, 797 aa, Aspergillus oryzae
MPLICIVYFLQYLDKIAISYASVTGLRESANLHGNQFNWVSTSTESIFPDCSTGPLSKNNVCDTSLDPVSRAKSLVAAMTLEEKINNTKYDSSGAPRLGLPAYNWWNEALHGVAEGHGVSFSDSGNFSYATSFPMPILLGAAFDDDLVKQVATVISTEARAFANGGHAGLDYWTPNINPFRDPRWGRGQETPGEDPLHLSRYVYHLVDGLQDGIGPERPKVVATCKHFAAYDLENWEGIERYAFDAVVSPQDLSEYYLPSFKTCTRDAKVDAVMCSYNSLNGIPTCADRWLLQTLLREHWGWEQTGHWVTGDCGAIDNIYADHHYVADGAHAAAAALNAGTDLDCGSVFPEYLGSALQQGLYNNQTLNNALIRLYSSLVKLGYFDPADDQPYRSIGWNEVFTPAAEELAHKATVEGIVMLKNDGTLPLKSNGTVAIIGPFANATTQLQGNYEGPPKYIRTLIWAAVHNGYKVKFSQGTDINSNSSAGFAEAISAAKEADTVIYAGGIDNTIEKESQDRTTIVWPGNQLDLIEQLSDLEKPLIVVQFGGGQVDDSSLLANAGVGALLWAGYPSQAGGAAVFDILTGKSAPAGRLPVTQYPASYVDEVPMTDMTLRPGSNNPGRTYRWYDKAVLPFGFGLHYTTFNVSWNHAEYGPYNTDSVASGTTNAPVDTELFDTFSITVTNTGNVASDYIALLFLTADGVGPEPYPIKTLVGYSRAKGIEPGQSQQVKLDVSVGSVARTAENGDLVLYPGSYKLEVDVGQDFPTATFTVSGKEKVLDEFPEPQQNATSAVTRRGR

SEQ ID NO: 279 - protein, 765 aa, Aspergillus terreus
MYSSNSRRAASILACIVSLTQLGFAQSPFPDCENGPLSKNAVCDTTLDPVTRAQALLAAMTLEEKINNTQYNSPGVPRLGLPAYNWWSEALHGVAGSPGVHFADSGNFSYATSFPSPITLGAAFDDDLVKQIATVIGTEGRAFGNAGHAGLDYWTPNINPYRDPRWGRGQETPGEDPFHTSRYVYHLIDGLQDGIGPEKPKIVATCKHFAGYDIEDWEGNERYAFDAVISDQDMAEYYFPPFKTCTRDAKVDAVMCSYNSVNGIPTCADPWLLQTVLREHWEWEGVGHWVTSDCGAIDNIYKDHKYVADGAHAAAVAVNAGTDLDCGSVYPQFLGSAISQGLLGNRTLDRALTRLYSSLVKLGYFDPAADQPYRSIGWSDVATPDAEQLAHTAAVEGTVLLKNDGTLPLKKNGTVAIVGPYANATTQLQGNYEGTAKYIHTMLSAAAQQGYKVKYAPGTGINSNSTSGFEQALNAAKGSDLVIYFGGIDHEVEAEALDRTSIAWPGNQLDLIQQLSDLKKPLVVVQFGGGQVDDSSLLSNAGVNGLLWAGYPSQAGGAAVFDILTGKTAPAGRLPVTQYPEEYVDQVPMTDMNLRPGPSNPGRTYRWYDKAVIPFGYGMHYTTFDVSWKRKNYGPYNTAAVKAENAVLETFSLQVKNTGKVTSDYVALVFLTTTDAGPKPYPIKTLVGYQRVKAIRPGERKVVDIDVTVGSVARTAANGDLVLYPGSYKLQVDVEKDYPTAGFKIAGKEVVLDHFPQPPRNATKA

SEQ ID NO: 280 - protein, 763 aa, Emericella nidulans
MAVFKSWNLALLSSLFIPALCQSNYPDCTTGPLSELPICDTSLSPLERAKSLVSALTLEEKINNTGHEAAGSSRLGLPAYNWWNEALHGVAEKHGVSFEESGDFSYATSFPAPIVLGAAFNDALIRRVAEIISTEARAFSNSDHAGIDYWTPNVNPFKDPRWGRGQETPGEDPLHCSRYVKEFVGGLQGDDPEKPKVVATCKHLAAYDLEEWGGVSRFEFDAKVSAVDLLEYYLPPFKTCAVDASVGAFMCSYNALNGVPACADRYLLQTVLREHWGWEGPGHWVTGDCGAVERIQTYHHYVESGPEAAAAALNAGVDLDCGTWLPSYLGEAERQGLISNETLDAALTRLYTSLVQLGYFDPAEGQPLRSLGWDDVATSEAEELAKTVAIQGTVLLKNIDWTLPLKANGTLALIGPFINFTTELQSNYAGPAKHIPTMIEAAERLGYNVLTAPGTEVNSTSTDGFDDALAIAAEADALIFFGGIDNTVEEESLDRTRIDWPGNQEELILELAELGRPLTVVQFGGGQVDDSALLASAGVGAIVWAGYPSQAGGAGVFDVLTGKAAPAGRLPITQYPKSYVDEVPMTDMNLQPGTDNPGRTYRWYEDAVLPFGFGLHYTTFNVSWAKKAFGPYDAATLARGKNPSSNIVDTFSLAVTNTGDVASDYVALVFASAPELGAQPAPIKTLVGYSRASLIKPGETRKVDVEVTVAPLTRATEDGRVVLYPGEYTLLVDVNDEYPTAKFEIKGDVQVLEKFPLSGNDSD

SEQ ID NO: 281 - protein, 398 aa, Neosartorya fumigata
MKSTSLLTASVLLGSASAAVHKLKLNKVPLDEQLYTHNIDAHVRALGQKYMGIRPNVHQELLEENSLNDMSRHDVLVDNFLNAQYFSEISLGTPPQKFKVVLDTGSSNLWVPGSDCSSIACFLHNKYDSSASSTYKANGTEFAIKYGSGELSGFVSQDTLQIGDLKVVKQDFAEATNEPGLAFAFGRFDGILGLGYDTISVNKIVPPFYNMLDQGLLDEPVFAFYLGDTNKEGDNSEASFGGVDKNHYTGELTKIPLRRKAYWEVDFDAIALGDNVAELENTGIILDTGTSLIALPSTLADLLNKEIGAKKGFTGQYSIECDKRDSLPDLTFTLAGHNFTIGPYDYTLEVQGSCISSFMGMDFPEPVGPLAILGDAFLRKWYSVYDLGNNAVGLAKAK

SEQ ID NO: 282 - protein, 728 aa, Neosartorya fumigata
MRLTFIPSLIGVANAVCPYMTGELNRRDEISDGDAAAATEEFLSQYYLNDNDAFMTSDVGGPIEDQNSLSAGERGPTLLEDFIFRQKIQRFDHERVPERAVHARGAGAHGVFTSYGDFSNITAASFLAKEGKQTPVFVRFSTVAGSRGSSDLARDVHGFATRFYTDEGNFDIVGNNIPVFFIQDAILFPDLIHAVKPRGDNEIPQAATAHDSAWDFFSQQPSTMHTLLWAMSGHGIPRSFRHVDGFGVHTFRFVTDDGASKLVKFHWKSLQGKASMVWEEAQQTSGKNPDFMRQDLHDAIEAGRYPEWELGVQIMDEEDQLRFGFDLLDPTKIVPEEFVPITKLGKMQLNRNPRNYFAETEQVMFQPGHIVRGVDFTEDPLLQGRLFSYLDTQLNRHGGPNFEQLPINQPRVPVHNNNRDGAGQMFIPLNPHAYSPKTSVNGSPKQANQTVGDGFFTAPGRTTSGKLVRAVSSSFEDVWSQPRLFYNSLVPAEKQFVIDAIRFENANVKSPVVKNNVIIQLNRIDNDLARRVARAIGVAEPEPDPTFYHNNKTADVGTFGTKLKKLDGLKVGVLGSVQHPGSVEGASTLRDRLKDDGVDVVLVAERLADGVDQTYSTSDAIQFDAVVVAAGAESLFAASSFTGGSANSASGASSLYPTGRPLQILIDGFRFGKTVGALGSGTAALRNAGIATSRDGVYVAQSVTDDFANDLKEGLRTFKFLDRFPVDH

SEQ ID NO: 283 - protein, 725 aa, Aspergillus oryzae
MRALSLASLIGIASAACPYMTGELERRDTGTDDATAATEEFLSQYYMADNDTFLTSDVGGPIEDQNSLQVGDRGPTLLEDFIFRQKIQRFDHERVPERAVHARGVGAHGVFTSYGDYSNITAASFLGAEGKETPVFVRFSTVAGSRGSSDLARDVHGFATRFYTDEGNFDIVGNNIPVFFIQDAILFPDLIHAVKPRGDNEIPQAATAHDSAWDFFSQQPSSLHTLLWAMSGHGIPRSLRHVDGFGIHTFRFVTDNGDSKLVKFHWKSLQGKASMVWEEAQQVSGKNPDFMRQDLFEAIEAGRYPEWELGVQIMDEEDQLKFGFDLFDPTKIVPEEYVPITKLGKMTLNRNPRNYFAETEQVMFQPGHIVRGVDFTEDPLLQGRLFSYLDTQLNRHGGPNFEQLPINQPRVPVHNNNRDGAGQMFIPLNPNAYSPNTLNKGSPKQANQTVGKGFFTAPGRESTGRFTRAVSPSFEDVWSQPRLFYNSLTPAEQQFVVDAIRFENSNVKSSVVRNNVIIQLNRVSNDLARRVARAIGVEEPEADPTYYHNNKTTDVGTFGQKLKKLDGLKVGFLASVETPASIEAASELSKQLSEDGVDVVVVAERLSDGVDQTYSGSDAIQFDAVIVAPGAEGLFSTFSFTAPSNATSSSTLFPAGRPLQIVIDGFRFGKPVGAVGSAATALKNAGIQTSRDGVYVDKSVTSGFVDGIKDGLRTFKFLDRFKLDH

SEQ ID NO: 284 - protein, 453 aa, Aspergillus clavatus
MYQRALLFSALATAVSAQQVGTQKAEVHPALTWQKCTAAGSCTDQKGSVVIDANWRWLHSTEDTTNCYTGNEWNAELCPDNEACAKNCALDGADYSGTYGVTADGSSLKLNFVTSANVGSRLYLMEDDETYQMFNLLNNEFTFDVDVSNLPCGLNGALYFVSMDADGGLSKYPGNKAGAKYGTGYCDSQCPRDLKFINGEANVEGWKPSDNDKNAGVGGYGSCCPEMDIWEANSISTAYTPHPCDGMEQTRCDGNDCGGTYSSTRYAGTCDPDGCDFNSFRMGNESFYGPGGLVDTKSPITVVTQFVTAGGTDSGALKEIRRVYVQGGKVIGNSASNVAGVEGDSITSDFCTAQKKAFGDEDIFSKHGGLEGMGKALNKMALIVSIWDDHASSMMWLDSTYPVDADASTPGVARGTCEHGLGDPETVESQHPDASVTFSNIKFGPIGSTYKSV

SEQ ID NO: 285 - protein, 452 aa, Neosartorya fumigata
MHQRALLFSALAVAANAQQVGTQTPETHPPLTWQKCTAAGSCSQQSGSVVIDANWRWLHSTKDTTNCYTGNTWNTELCPDNESCAQNCALDGADYAGTYGVTTSGSELKLSFVTGANVGSRLYLMQDDETYQHFNLLNHEFTFDVDVSNLPCGLNGALYFVAMDADGGMSKYPSNKAGAKYGTGYCDSQCPRDLKFINGMANVEGWEPSSSDKNAGVGGHGSCCPEMDIWEANSISTAVTPHPCDDVSQTMCSGDACGGTYSESRYAGTCDPDGCDFNPFRMGNESFYGPGKIVDTKSKMTVVTQFITADGTDSGALSEIKRLYVQNGKVIANSVSNVAGVSGNSITSDFCTAQKKAFGDEDIFAKHGGLSGMGKALSEMVLIMSIWDDHHSSMMWLDSTYPTDADPSKPGVARGTCEHGAGDPENVESQHPDASVTFSNIKFGPIGSTYEG

SEQ ID NO: 286 - protein, 455 aa, Aspergillus flavus
MHQRALLFSAFWTAVQAQQAGTLTAETHPSLTWQKCAAGGTCTEQKGSVVLDSNWRWLHSVDGSTNCYTGNTWDATLCPDNESCASNCALDGADYEGTYGVTTSGDALTLQFVTGANIGSRLYLMADDDESYQTFNLLNNEFTFDVDASKLPCGLNGAVYFVSMDADGGVAKYSTNKAGAKYGTGYCDSQCPRDLKFINGQANVEGWEPSDSDKNAGVGGHGSCCPEMDIWEANSISTAYTPHPCDDTAQTMCEGDTCGGTYSSERYAGTCDPDGCDFNAYRMGNESFYGPSKLVDSSSPVTVVTQFITADGTDSGALSEIKRFYVQGGKVIANAASNVDGVTGNSITADFCTAQKKAFGDDDIFAQHGGLQGMGNALSSMVLTLSIWDDHHSSMMWLDSSYPEDADATAPGVARGTCEPHAGDPEKVESQSGSATVTYSNIKYGPIGSTFDAPA

SEQ ID NO: 287 - protein, 452 aa, Neosartorya fumigata; identical to SEQ ID NO: 285

SEQ ID NO: 288 - protein, 452 aa, Aspergillus niger
MHQRALLFSALLTAVRAQQAGTLTEEVHPSLTWQKCTSEGSCTEQSGSVVIDSNWRWTHSVNDSTNCYTGNTWDATLCPDDETCATNCALDGADYESTYGVTTDGDSLTLKFVTGSNVGSRLYLMDTSDEGYQTFNLLDAEFTFDVDVSNLPCGLNGALYFTAMDADGGASKYPANKAGAKYGTGYCDSQCPRDLKFIDGQANVDGWEPSSNNDNTGIGNHGSCCPEMDIWEANKISTALTPHPCDSSEQTMCEGNDCGGTYSDDRYGGTCDPDGCDFNPYRMGNDSFYGPGKTIDTGSKMTVVTQFITDGSGSLSEIKRYYVQNGNVIANADSNISGVTGNSITTDFCTAQKKAFGDDDIFAEHNGLAGISDAMSSMVLILSLWDDYYASMEWLDSDYPENATATDPGVARGTCDSESGVPATVEGAHPDSSVTFSNIKFGPINSTFSASA

SEQ ID NO: 289 - protein, 452 aa, Aspergillus niger
MHQRALLFSALLTAVRAQQAGTLTEEVHPSLTWQKCTSEGSCTEQSGSVVIDSNWRWTHSVNDSTNCYTGNTWDATLCPDDETCAANCALDGADYESTYGVTTDGDSLTLKFVTGSNVGSRLYLMDTSDEGYQTFNLLDAEFTFDVDVSNLPCGLNGALYFTAMDADGGVSKYPANKAGAKYGTGYCDSQCPRDLKFIDGQANVDGWEPSSNNDNTGIGNHGSCCPEMDIWEANKISTALTPHPCDSSEQTMCEGNDCGGTYSDDRYGGTCDPDGCDFNPYRMGNDSFYGPGKTIDTGSKMTVVTQFITDGSGSLSEIKRYYVQNGNVIANADSNISGVTGNSITTDFCTAQKKAFGDEDIFAEHNGLAGISDAMSSMVLILSLWDDYYASMEWLDSDYPENATATDPGVARGTCDSESGVPATVEGAHPDSSVTFSNIKFGPINSTFSASA

SEQ ID NO: 290 - protein, 455 aa, Aspergillus oryzae; identical to SEQ ID NO: 286

SEQ ID NO: 291 - protein, 453 aa, Aspergillus terreus
MHQRALLFSALVGAVRAQQAGTLTEEVHPPLTWQKCTADGSCTEQSGSVVIDSNWRWLHSTNGSTNCYTGNTWDESLCPDNEACAANCALDGADYESTYGITTSGDALTLTFVTGENVGSRVYLMAEDDESYQTFDLVGNEFTFDVDVSNLPCGLNGALYFTSMDADGGVSKYPANKAGAKYGTGYCDSQCPRDLKFINGMANVEGWTPSDNDKNAGVGGHGSCCPELDIWEANSISSAFTPHPCDDLGQTMCSGDDCGGTYSETRYAGTCDPDGCDFNAYRMGNTSYYGPDKIVDTNSVMTVVTQFIGDGGSLSEIKRLYVQNGKVIANAQSNVDGVTGNSITSDFCTAQKTAFGDQDIFSKHGGLSGMGDAMSAMVLILSIWDDHNSSMMWLDSTYPEDADASEPGVARGTCEHGVGDPETVESQHPGATVTFSKIKFGPIGSTYSSNSTA

SEQ ID NO: 292 - protein, 446 aa, Emericella nidulans
MYQRALLFSALLSVSRAQQAGTAQEEVHPSLTWQRCEASGSCTEVAGSVVLDSNWRWTHSVDGYTNCYTGNEWDATLCPDNESCAQNCAVDGADYEATYGITSNGDSLTLKFVTGSNVGSRVYLMEDDETYQMFDLLNNEFTFDVDVSNLPCGLNGALYFTSMDADGGLSKYEGNTAGAKYGTGYCDSQCPRDIKFINGLGNVEGWEPSDSDANAGVGGMGTCCPEMDIWEANSISTAYTPHPCDSVEQTMCEGDSCGGTYSDDRYGGTCDPDGCDFNSYRMGNTSFYGPGAIIDTSSKFTVVTQFIADGGSLSEIKRFYVQNGEVIPNSESNISGVEGNSITSEFCTAQKTAFGDEDIFAQHGGLSAMGDAASAMVLILSIWDDHHSSMMWLDSSYPTDADPSQPGVARGTCEQGAGDPDVVESEHADASVTFSNIKFGPIGSTF

SEQ ID NO: 293 - protein, 452 aa, Neosartorya fischeri
MHQRALLFSALAVAANAQQVGTQKPETHPPLTWQKCTAAGSCSQQSGSVVIDANWRWLHSTKDTTNCYTGNTWNTELCPDNESCAQNCAVDGADYAGTYGVTTSGSELKLSFVTGANVGSRLYLMQDDETYQHFNLLNNEFTFDVDVSNLPCGLNGALYFVAMDADGGMSKYPSNKAGAKYGTGYCDSQCPRDLKFINGMANVEGWKPSSNDKNAGVGGHGSCCPEMDIWEANSISTAVTPHPCDDVSQTMCSGDACGGTYSATRYAGTCDPDGCDFNPFRMGNESFYGPGKIVDTKSEMTVVTQFITADGTDTGALSEIKRLYVQNGKVIANSVSNVADVSGNSISSDFCTAQKKAFGDEDIFAKHGGLSGMGKALSEMVLIMSIWDDHHSSMMWLDSTYPTDADPSKPGVARGTCEHGAGDPEKVESQHPDASVTFSNIKFGPIGSTYKA

SEQ ID NO: 294 - protein, 540 aa, Aspergillus aculeatus
MVDSFSIYKTALLLSMLATSNAQQVGTYTAETHPSLTWQTCSGSGSCTTTSGSVVIDANWRWVHEVGGYTNCYSGNTWDSSICSTDTTCASECALEGATYESTYGVTTSGSSLRLNFVTTASQKNIGSRLYLLADDSTYETFKLFNREFTFDVDVSNLPCGLNGALYFVSMDADGGVSRFPTNKAGAKYGTGYCDSQCPRDLKFIDGQANIEGWEPSSTDVNAGTGNHGSCCPEMDIWEANSISSAFTAHPCDSVQQTMCTGDTCGGTYSDTTDRYSGTCDPDGCDFNPYRFGNTNFYGPGKTVDNSKPFTVVTQFITHDGTDTGTLTEIRRLYVQNGVVIGNGPSTYTAASGNSITESFCKAEKTLFGDTNVFETHGGLSAMGDALGDGMVLVLSLWDDHAADMLWLDSDYPTTSCASSPGVARGTCPTTTGNATYVEANYPNSYVTYSNIKFGTLNSTYSGTSSGGSSSSSTTLTTKASTSTTSSKTTTTTSKTSTTSSSSTNVAQLYGQCGGQGWTGPTTCASGTCTKQNDYYSQCL

SEQ ID NO: 295 - protein, 539 aa, Aspergillus clavatus
MLPSTISYRIYKNALFFAALFGAVQAQKVGTSKAEVHPSMAWQTCAADGTCTTKNGKVVIDANWRWVHDVKGYTNCYTGNTWNAELCPDNESCAENCALEGADYAATYGATTSGNALSLKFVTQSQQKNIGSRLYMMKDDNTYETFKLLNQEFTFDVDVSNLPCGLNGALYFVSMDADGGLSRYTGNEAGAKYGTGYCDSQCPRDLKFINGLANVEGWTPSSSDANAGNGGHGSCCAEMDIWEANSISTAYTPHPCDTPGQAMCNGDSCGGTYSSDRYGGTCDPDGCDFNSYRQGNKSFYGPGMTVDTKKKMTVVTQFLTNDGTATGTLSEIKRFYVQDGKVIANSESTWPNLGGNSLTNDFCKAQKTVFGDMDTFSKHGGMEGMGAALAEGMVLVMSLWDDHNSNMLWLDSNSPTTGTSTTPGVARGSCDISSGDPKDLEANHPDASVVYSNIKVGPIGSTFNSGGSNPGGSTTTTKPATSTTTTKATTTATTNTTGPTGTGVAQPWAQCGGIGYSGPTQCAAPYTCTKQNDYYSQCL

SEQ ID NO: 296 - protein, 532 aa, Neosartorya fumigata
MLASTFSYRMYKTALILAALLGSGQAQQVGTSQAEVHPSMTWQSCTAGGSCTTNNGKVVIDANWRWVHKVGDYTNCYTGNTWDTTICPDDATCASNCALEGANYESTYGVTASGNSLRLNFVTTSQQKNIGSRLYMMKDDSTYEMFKLLNQEFTFDVDVSNLPCGLNGALYFVAMDADGGMSKYPTNKAGAKYGTGYCDSQCPRDLKFINGQANVEGWQPSSNDANAGTGNHGSCCAEMDIWEANSISTAFTPHPCDTPGQVMCTGDACGGTYSSDRYGGTCDPDGCDFNSFRQGNKTFYGPGMTVDTKSKFTVVTQFITDDGTSSGTLKEIKRFYVQNGKVIPNSESTWTGVSGNSITTEYCTAQKSLFQDQNVFEKHGGLEGMGAALAQGMVLVMSLWDDHSANMLWLDSNYPTTASSTTPGVARGTCDISSGVPADVEANHPDAYVVYSNIKVGPIGSTFNSGGSNPGGGTTTTTTTQPTTTTTTAGNPGGTGVAQHYGQCGGIGWTGPTTCASPYTCQKLNDYYSQCL

SEQ ID NO: 297 - protein, 532 aa, Neosartorya fumigata; identical to SEQ ID NO: 296

SEQ ID NO: 298 - protein, 536 aa, Aspergillus niger
MSSFQVYRAALLLSILATANAQQVGTYTTETHPSLTWQTCTSDGSCTTNDGEVVIDANWRWVHSTSSATNCYTGNEWDTSICTDDVTCAANCALDGATYEATYGVTTSGSELRLNFVTQGSSKNIGSRLYLMSDDSNYELFKLLGQEFTFDVDVSNLPCGLNGALYFVAMDADGGTSEYSGNKAGAKYGTGYCDSQCPRDLKFINGEANCDGWEPSSNNVNTGVGDHGSCCAEMDVWEANSISNAFTAHPCDSVSQTMCDGDSCGGTYSASGDRYSGTCDPDGCDYNPYRLGNTDFYGPGLTVDTNSPFTVVTQFITDDGTSSGTLTEIKRLYVQNGEVIANGASTYSSVNGSSITSAFCESEKTLFGDENVFDKHGGLEGMGEAMAKGMVLVLSLWDDYAADMLWLDSDYPVNSSASTPGVARGTCSTDSGVPATVEAESPNAYVTYSNIKFGPIGSTYSSGSSSGSGSSSSSSSTTTKATSTTLKTTSTTSSGSSSTSAAQAYGQCGGQGWTGPTTCVSGYTCTYENAYYSQCL

SEQ ID NO: 299 - protein, 536 aa, Aspergillus niger
MSSFQIYRAALLLSILATANAQQVGTYTTETHPSLTWQTCTSDGSCTTNDGEVVIDANWRWVHSTSSATNCYTGNEWDTSICTDDVTCAANCALDGATYEATYGVTTSGSELRLNFVTQGSSKNIGSRLYLMSDDSNYELFKLLGQEFTFDVDVSNLPCGLNGALYFVAMDADGGTSEYSGNKAGAKYGTGYCDSQCPRDLKFINGEANCDGWEPSSNNVNTGVGDHGSCCAEMDVWEANSISNAFTAHPCDSVSQTMCDGDSCGGTYSASGDRYSGTCDPDGCDYNPYRLGNTDFYGPGLTVDTNSPFTVVTQFITDDGTSSGTLTEIKRLYVQNGEVIANGASTYSSVNGSSITSAFCESEKTLFGDENVFDKHGGLEGMGEAMAKGMVLVLSLWDDYAADMLWLDSDYPVNSSASTPGVARGTCSTDSGVPATVEAESPNAYVTYSNIKFGPIGSTYSSGSSSGSGSSSSSSSTTTKATSTTLKTTSTTSSGSSSTSAAQAYGQCGGQGWTGPTTCVSGYTCTYENAYYSQCL

SEQ ID NO: 300 - protein, 541 aa, Aspergillus terreus
MPSTYDIYKKLLLLASFLSASQAQQVGTSKAEVHPSLTWQTCTSGGSCTTVNGKVVVDANWRWVHNVDGYNNCYTGNTWDTTLCPDDETCASNCALEGADYSGTYGVTTSGNSLRLNFVTQASQKNIGSRLYLMEDDSTYKMFKLLNQEFTFDVDVSNLPCGLNGAVYFVSMDADGGMAKYPANKAGAKYGTGYCDSQCPRDLKFINGMANVEGWEPSANDANAGTGNHGSCCAEMDIWEANSISTAYTPHPCDTPGQVMCTGDSCGGTYSSDRYGGTCDPDGCDFNSYRQGNKTFYGPGMTVDTKSKITVVTQFLTNDGTASGTLSEIKRFYVQNGKVIPNSESTWSGVSGNSITTAYCNAQKTLFGDTDVFTKHGGMEGMGAALAEGMVLVLSLWDDHNSNMLWLDSNYPTDKPSTTPGVARGSCDISSGDPKDVEANDANAYVVYSNIKVGPIGSTFSGSTGGGSSSSTTATSKTTTTSATKTTTTTTKTTTTTSASSTSTGGAQHWAQCGGIGWTGPTTCVAPYTCQKQNDYYSQCL

SEQ ID NO: 301 - protein, 526 aa, Emericella nidulans
MASSFQLYKALLFFSSLLSAVQAQKVGTQQAEVHPGLTWQTCTSSGSCTTVNGEVTIDANWRWLHTVNGYTNCYTGNEWDTSICTSNEVCAEQCAVDGANYASTYGITTSGSSLRLNFVTQSQQKNIGSRVYLMDDEDTYTMFYLLNKEFTFDVDVSELPCGLNGAVYFVSMDADGGKSRYATNEAGAKYGTGYCDSQCPRDLKFINGVANVEGWESSDTNPNGGVGNHGSCCAEMDIWEANSISTAFTPHPCDTPGQTLCTGDSCGGTYSNDRYGGTCDPDGCDFNSYRQGNKTFYGPGLTVDTNSPVTVVTQFLTDDNTDTGTLSEIKRFYVQNGVVIPNSESTYPANPGNSITTEFCESQKELFGDVDVFSAHGGMAGMGAALEQGMVLVLSLWDDNYSNMLWLDSNYPTDADPTQPGIARGTCPTDSGVPSEVEAQYPNAYVVYSNIKFGPIGSTFGNGGGSGPTTTVTTSTATSTTSSATSTATGQAQHWEQCGGNGWTGPTVCASPWACTVVNSWYSQCL

SEQ ID NO: 302 - protein, 530 aa, Neosartorya fischeri
MLASTFSYRMYKTALILAALLGSGQAQQVGTSQAEVHPSMTWQSCTAGGSCTTNNGKVVIDANWRWVHKVGDYTNCYTGNTWDKTLCPDDATCASNCALEGANYQSTYGATTSGDSLRLNFVTTSQQKNIGSRLYMMKDDTTYEMFKLLNQEFTFDVDVSNLPCGLNGALYFVAMDADGGMSKYPTNKAGAKYGTGYCDSQCPRDLKFINGQANVEGWQPSSNDANAGTGNHGSCCAEMDIWEANSISTAFTPHPCDTPGQVMCTGDACGGTYSSDRYGGTCDPDGCDFNSFRQGNKTFYGPGMTVDTKSKFTVVTQFITDDGTASGTLKEIKRFYVQNGKVIPNSESTWSGVGGNSITNDYCTAQKSLFKDQNVFAKHGGMEGMGAALAQGMVLVMSLWDDHAANMLWLDSNYPTTASSSTPGVARGTCDISSGVPADVEANHPDASVVYSNIKVGPIGSTFNSGGSNPGGGTTTTAKPTTTTTTAGSPGGTGVAQHYGQCGGNGWQGPTTCASPYTCQKLNDFYSQCL

SEQ ID NO: 303 - protein, 464 aa, Aspergillus clavatus
MKNFAPSLALSLLLPTVQAQQTMWGQCGGAGWSGATDCVAGGVCSTQNAYYAQCLPGATTATTLSTTSKGTTTTTTSSTTSTGGGSSSTTTKTSTSAGPTVTGSPSGNPFSGYQQYANPYYSSEVHTLAIPSMTGALAVKASAVADVPSFVWLDVAAKVPTMGTYLENIRAKNKAGANPPVAGIFVVYDLPDRDCAALASNGEYAIADGGIAKYKAYIDAIRAQLLKYPDVHTILVIEPDSLANLITNINVAKCSGAKDAYLECINYALKQLNLPNVAMYIDAGHGGWLGWDANIGPAAEMYAKVYKDADAPAALRGLAVNVANYNAWTIDTCPSYTQGNKNCDEKRYIHALYPLLKAAGWDARFIMDTGRNGVQPTKQQAQGDWCNVIGTGFGIRPSSETGDDLLDAFVWVKPGAESDGTSDTTAARYDAHCGYTDALKPAPEAGQWFQAYFEQLLTNANPAF

SEQ ID NO: 304 - protein, 454 aa, Neosartorya fumigata
MKHLASSIALTLLLPAVQAQQTVWGQCGGQGWSGPTSCVAGAACSTLNPYYAQCIPGATATSTTLTTTTAATTTSQTTTKPTTTGPTTSAPTVTASGNPFSGYQLYANPYYSSEVHTLAMPSLPSSLQPKASAVAEVPSFVWLDVAAKVPTMGTYLADIQAKNKAGANPPIAGIFVVYDLPDRDCAALASNGEYSIANNGVANYKAYIDAIRAQLVKYSDVHTILVIEPDSLANLVTNLNVAKCANAQSAYLECVDYALKQLNLPNVAMYLDAGHAGWLGWPANLGPAATLFAKVYTDAGSPAAVRGLATNVANYNAWSLSTCPSYTQGDPNCDEKKYINAMAPLLKEAGFDAHFIMDTSRNGVQPTKQNAWGDWCNVIGTGFGVRPSTNTGDPLQDAFVWIKPGGESDGTSNSTSPRYDAHCGYSDALQPAPEAGTWFQAYFEQLLTNANPSF

SEQ ID NO: 305 - protein, 454 aa, Neosartorya fumigata; identical to SEQ ID NO: 304

SEQ ID NO: 306 - protein, 459 aa, Aspergillus niger
MHYPLSLALAFLPFGIQAQQTLWGQCGGQGYSGATSCVAGATCATVNEYYAQCTPAAGTSSATTLKTTTSSTTAAVTTTTTTQSPTGSASPTTTASASGNPFSGYQLYVNPYYSSEVASLAIPSLTGSLSSLQAAATAAAKVPSFVWLDTAAKVPTMGDYLADIQSQNAAGANPPIAGQFVVYDLPDRDCAALASNGEYSIADNGVEHYKSYIDSIREILVQYSDVHTLLVIEPDSLANLVTNLNVAKCANAESAYLECTNYALTQLNLPNVAMYLDAGHAGWLGWPANQQPAADLFASVYKNASSPAAVRGLATNVANYNAWTISSCPSYTQGNSVCDEQQYINAIAPLLQAQGFDAHFIVDTGRNGKQPTGQQAWGDWCNVINTGFGERPTTDTGDALVDAFVWVKPGGESDGTSDSSATRYDAHCGYSDALQPAPEAGTWFQAYFVQLLTNANPAF

SEQ ID NO: 307 - protein, 468 aa, Aspergillus terreus
MGRVSSLALALLLPAVQAQQTLWGQCGGIGWTGPTNCVAGAACSTQNPYYAQCLPGTATTSTTLTTTTRVTTTTTSTTSKSSSTGSTTTTKSTGTTTTSGSSTTITSAPSGNPFSGYQLYANPYYSSEVHTLAMPSLASSLLPAASAAAKVPSFTWLDTAAKVPTMGTYLADIKAKNAAGANPPIAAQFVVYDLPDRDCAALASNGEYSIANGGVANYKKYIDAIRAQLLNYPDVHTILVIEPDSLANLVTNLNVAKCANAQSAYLECVNYALIQLNLPNVAMYIDAGHAGWLGWPANIGPAAQLFAGVYKDAGAPAALRGLATNVANYNAFSISTCPSYTSGDANCDENRYINAIAPLLKDQGWDAHFIVDTGRNGVQPTKQNAWGDWCNVIGTGFGVRPTTNTGNSLVDAFVWVKPGGESDGTSDSSSARYDAHCGYSDALQPAPEAGTWFQAYFEQLLKNANPAF

SEQ ID NO: 308 - protein, 455 aa, Emericella nidulans
MHYSASGLALAFLLPAIQAQQTLYGQCGGSGWTGATSCVAGAACSTLNQWYAQCLPAATTTSTTLTTTTSSVTTTSNPGSTTTTSSVTVTATASGNPFSGYQLYVNPYYSSEVQSIAIPSLTGTLSSLAPAATAAAKVPSFVWLDVAAKVPTMATYLADIRSQNAAGANPPIAGQFVVYDLPDRDCAALASNGEFAISDGGVQHYKDYIDSIREILVEYSDVHVILVIEPDSLANLVTNLNVAKCANAQSAYLECTNYAVTQLNLPNVAMYLDAGHAGWLGWPANLQPAANLYAGVYSDAGSPAALRGLATNVANYNAWAIDTCPSYTQGNSVCDEKDYINALAPLLRAQGFDAHFITDTGRNGKQPTGQQAWGDWCNVIGTGFGARPSTNTGDSLLDAFVWVKPGGESDGTSDTSAARYDAHCGYSDALQPAPEAGTWFQAYFVQLLQNANPSF

SEQ ID NO: 309 - protein, 450 aa, Neosartorya fischeri
MKHLASSIALTLLLPAVQAQQTVWGQCGGQGWSGPTNCVAGAACSTLNPYYAQCIPGATATSTTLSTTTTTQTTTKPTTTGPTTSAPTVTASGNPFSGYQLYANPYYSSEVHTLAMPSLPSSLQPKASAVAEVPSFVWLDVAAKVPTMGTYLADIQAKNKAGASPPIAGIFVVYDLPDRDCAALASNGEYSIANNGVANYKAYIDAIRAQLVKYSDVHTILVIEPDSLANLVTNLNVAKCANAQSAYLECVDYALKQLNLPNVAMYLDAGHAGWLGWPANLGPAATLFAKVYTDAGSPAALRGLATNVANYNAWSLSTCPSYTQGDPNCDEKKYINAMAPLLKNAGFDAHFIMDTSRNGVQPTKQSAWGDWCNVIGTGFGVRPSTNTGDPLQDAFVWIKPGGESDGTSNSSSARYDAHCGYSDALQPAPEAGTWFQAYFEQLLTNANPSF

SEQ ID NO: 310 - protein, 418 aa, Aspergillus clavatus
MVRTFAVTALALLPLVAAQQIGSTKEVHPQLTTYKCTSQGGCVKQNTSIVLDSGSHWIHAKGGEVSCTTSSGLDPALCPDKETCAENCVVEGITDYSQYGVQTRGDAMLLREYIKQNNQTKAPSPRVYLLDEDGENYSMLRLLNQEFTFDVDVSKLPCGMNGALYFSEMSASGGRSALNPAGAAYGTGYCDAQCYTNAWINGEANTAKAGLCCQEMDIWEANARANAFTPHPCNSTGLLGCAGDECNSVCDKAGCGFNPYALGARDYYGTAMTVDTTKPFTVVTQFLTADNSTTGALREIRRLYVQAGQVIQNAVVKVDGRTVNSITEPYCASQGVFEGLGGLRRMGEALGRGMVLSMSIWNDAGGFMHWLDSGNSGPCSSTEGDPSLIENKYPDTAVTFSKIRWGDLGTTFATRRLH

SEQ ID NO: 311 - protein, 407 aa, Neosartorya fumigata
MAQTLAAASLVLVPLVTAQQIGSIAENHPELKTYRCGSQAGCVAQSTSVVLDINAHWIHQMGAQTSCTTSSGLDPSLCPDKVTCSQNCVVEGITDYSSFGVQNSGDAITLRQYQVQNGQIKTLRPRVYLLAEDGINYSKLQLLNQEFTFDVDASKLPCGMNGALYLSEMDASGGRSALNPAGATYGTGYCDAQCFNPGPWINGEANTLGAGACCQEMDLWEANSRSTIFSPHPCTTAGLYACTGAECYSICDGYGCTYNPYELGAKDYYGYGLTVDTAKPITVVMQFVTADNTATGTLAEIRRLYVQEGMVIGNSAVAMTEAFCSSSRTFEALGGLQRMGEALGRGMVPVFSIWDDPSLWMHWLDSDGAGPCGSTEGDPAFIQANYPNTAVTFSKVRWGDIDSTYSV

SEQ ID NO: 312 - protein, 416 aa, Aspergillus flavus
MIWTLAPFVALLPLVTAQQVGTTADAHPRLTTYKCTSQNGCTRQNTSVVLDAATHFIHKKGTQTSCTNSNGLDTAICPDKQTCADNCVVDGITDYASYGVQTKNDTLTLQQYLQTGNATKSLSPRVYLLAEDGENYSMLKLLNQEFTFDVDASTLVCGMNGALYLSEMEASGGKSSLNQAGAKYGTGYCDAQCYTTPWINGEGNTESVGSCCQEMDIWEANARATGLTPHPCNTTGLYECSGSGCGDSGVCDKAGCGFNPYGLGAKDYYGYGLKVNTNETFTVVTQFLTNDNTTSGQLSEIRRLYIQNGQVIQNAAVTSGGKTVDSITKDFCSGEGSAFNRLGGLEEMGHALGRGMVLALSIWNDAGSFMQWLDGGSAGPCNATEGNPALIEKLYPDTHVKFSKIRWGDIGSTYRH

SEQ ID NO: 313 - protein, 407 aa, Neosartorya fumigata
MAQTLAAASLVLVPLVTAQQIGSIAENHPELKTYRCGSQAGCVAQSTSVVLDINAHWIHQMGAQTSCTTSSGLDPSLCPDKVTCSQNCVVEGITDYSSFGVQNSGDAITLRQYQVQNGQIKTLRPRVYLLAEDGINYSKLQLLNQEFTFDVDASKLPCGMNGALYLSEMDASGGRSALNPAGATYGTGYCDAQCFNPGPWINGEANTLGAGACCQEMDLWEANSRSTIFSPHPCTTAGLYACTGAECYSICDGYGCTYNPYELGAKDYYGYGLTVDTAKPITVVTQFVTADNTATGTLAEIRRLYVQEGMVIGNSAVAMTEAFCSSSRTFEALGGLQRMGEALGRGMVPVFSIWDDPSLWMHWLDSDGAGPCGSTEGDPAFIQANYPNTAVTFSKVRWGDIDSTYSV

SEQ ID NO: 314 - protein, 416 aa, Aspergillus oryzae; identical to SEQ ID NO: 312

SEQ ID NO: 315 - protein, 420 aa, Aspergillus terreus
MLRKLTPLALALLPLVAGQTIGETPEVHPKLPTWKCSNRHGCVKQDTSVVIDAATHWIHEKGGETSCTGSSGPNPNLCPDKETCAANCVIEGISDYANYGVQTKGSSMTLHQYLRDGNTTKSVSPRVYLLAEDGENYEMLQLLNQEFTFDVDVSTLVCGMNGALYFSEMQRDGGRSELNPAGAARGTGYCDAQCFNIPWINGEANVEGAGACCNEMDIWEANARATGYTPHPCNITQLYECSGAECEANGVCDKPGCGFNPYALGAHDFYGYDLEVDTTKPMTVVTQFYTKDNTTTGALVEIRRLYVQNGHVIQNAVVSVDGESVDSITADYCADPSSAFNRLGGLQRMGEALGRGMVLAFSVWNDAGSFMSWLDGGNSGPCNATEGDPALIEKLHPDTHVTFSNIRWGDIGSTYRGKRR

SEQ ID NO: 316 - protein, 430 aa, Emericella nidulans
MALLLSLSLLATTISAQQIGTPEIRPRLTTYHCTSANGCTEQNTSVVLDAATHPIHDASNPSVSCTTSNGLNPALCPDKQTCADNCVIDGITDYAAHGVETHGSRLTLTQYRNVNGALSSVSPRVYLVDESDPDEQEYRALSLLAQEFTFTVNVSALPCGMNGALYLSEMSPSGGRSALNPAGASYGTGYCDAQCYVNPWINGEGNINGYGACCNEMDIWEANSRSTGFTPHACLYEPEETEGRGVYECASEDECDSAGENDGICDKWGCGFNPYALGNTEYYGRGQGFEVDTKEPFTVVTQFLTDDGTSTGALTEIRRLYIQNGQVIENAVVSSGADSLTDSLCASTASWFDSYGGMEGMGRALGRGMVLAMSIWNDAGGYMQWLDGGDAGPCNATEGAPEFIEEHTPWTRVVFEDLKWGDIGSTFQAS

SEQ ID NO: 317 - protein, 407 aa, Neosartorya fischeri
MALTLAATALVLLPLVTAQQIGSIAENHPELTTYRCSSQAGCVAQSTSVVLDINAHWIHQNGAQTSCTTSSGLDPSLCPDKVTCSQNCVVEGITDYSSFGVQNSGDAMTLRQYQVQNGQIKTLRPRVYLLAEDGINYSKLQLLNQEFTFDVDASKLPCGMNGALYLSEMDASGGRSALNPAGATYGTGYCDAQCFNPGPWINGEANTAGAGACCQEMDLWEANSRSTIFSPHPCTTAGLYACTGAECYSICDGYGCTYNPYELGAKDYYGYGLTIDTAKPITVVTQFMTADNTATGTLAEIRRLYVQDGKVIGNTAVAMTEAFCSSSRTFEELGGLQRMGEALGRGMVPVFSIWDDPGLWMHWLDSDGAGPCGNTEGDPAFIQANYPNTAVTFSKVRWGDIGSTYSS

SEQ ID NO: 318 - protein, 88 aa, Aspergillus clavatus
MASQSSQADQQQQQQQQSSQSQQPNAWEKAERKFANKNASEYYDPCQDFADRSLKCMKRNAFDKEMCGDYFQAYRDCKKQWLTQKKFS

SEQ ID NO: 319 - protein, 88 aa, Emericella nidulans
MASHPEQQSSSSSADVSSSSWGKVERKFTNKSASEYYDPCQDFADRSLRCMKRNPDDRDMCHDYFQAYRDCKKQWLTQKKLGSSSTAK

SEQ ID NO: 320 - protein, 395 aa, Neosartorya fumigata
MYFKYTAAALAAVLPLCSAQTWSKCNPLEKTCPPNKGLAASTYTADFTSASALDQWEVTAGKVPVGPQGAEFTVAKQGDAPTIDTDFYFFFGKAEVVMKAAPGTGVVSSIVLESDDLDEVDWEVLGGDTTQVQTNYFGKGDTTTYDRGTYVPVATPQETFHTYTIDWTKDAVTWSIDGAVVRTLTYNDAKGGTRFPQTPMRLRLGSWAGGDPSNPKGTIEWAGGLTDYSAGPYTMYVKSVRIENANPAESYTYSDNSGSWQSIKFDGSVDISSSSSVTSSTTSTASSASSTSSKTPSTSTLATSTKATPTPSGTSSGSNSSSSAEPTTTGGTGSSNTGSGSGSGSGSGSSSSTGSSTSAGASATPELSQGAAGSIKGSVTACALVFGAVAAVLAF

SEQ ID NO: 321 - protein, 211 aa, Aspergillus clavatus
MKFALLALAAVALASPVTLDERQIAIPENELRTGPCEPITFIFARASTEPGLLGISTGPGVCNGLKLARPFKVACQGVGPAYTADLASNFLPQGTTQVAIDEATDLFKLAASKCPDTQIVAGGYSQGTAVMHGAIRNLPDNVKNLIRGVVLFGDTRNKQDGGRIPNFPTDRTKIYCALGDLVCEGTLVITAAHFTYTVNVPGAVAFLLSKL

SEQ ID NO: 322 - protein, 211 aa, Neosartorya fumigata
MKFALLSLAAMAVASPVAIDVRQTAITGDELRTGPCEPITFIFARGSTEPGLLGITTGPGVCNALKLSRPGQVACQGVGPAYIADLASNFLPQGTSQVAIDEAAGLFKLAASKCPDTKIVAGGYSQGAAVMHGAIRNLPSNVQNMIKGVVLFGDTRNKQDGGRIPNFPTDRTKIYCAFGDLVCDGTLIITPAHLSYGDDVPSATSFLLSKV

SEQ ID NO: 323 - protein, 213 aa, Aspergillus flavus
MHLRNIVIALAATAVASPVDLQDRQLTGGDELRDGPCKPITFIFARASTEPGLLGISTGPAVCNRLKLARSGDVACQGVGPRYTADLPSNALPEGTSQAAIAEAQGLFEQAVSKCPDTQIVAGGYSQGTAVMNGAIKRLSADVQDKIKGVVLFGYTRNAQERGQIANFPKDKVKVYCAVGDLVCLGTLIVAPPHFSYLSDTGDASDFLLSQLG

SEQ ID NO: 324 - protein, 211 aa, Neosartorya fumigata; identical to SEQ ID NO: 322

SEQ ID NO: 325 - protein, 262 aa, Aspergillus niger
MAPLKSLLLGASLATLALSTPLATDAENLYARQFGTGSTANELEQGSCKDVTLIFARGSTELGNMGTVIGPPLCDNLKSKLGSDKVACQGVGGQYSAGLVQNALPQNTDPGSISAAKQMFEEANSKCPNTKIVAGGYSQGSAVIDNAVQELSTTVKDQVKGVVLFGFTRNVQDHGQIPNYPKDDVKVYCAVGDLVCDDTLVVTAMHLTYGMDAGDAASFLAEKVQSSSSSTTSSSSDAASSSSAAGTSSSGLSGLSSFFGGL

SEQ ID NO: 326 - protein, 213 aa, Aspergillus oryzae; identical to SEQ ID NO: 323

SEQ ID NO: 327 - protein, 209 aa, Aspergillus terreus
MKLLTVLTLLTGLVAASPIDLEKRQRNELRVGACEEITFIFARASTETGYLGGSTGPGVCNGLKLARVGQVACQGVAPRYTADLASNFLPQGTSQAAIDEAVELFQLAASKCPNTKIVAGGYSQGTAVMHNAIPALPDNIKNMIKGVVLFGDTRNQQDGGRIPNFPTDKTKIYCAVGDLVCEGTLVITAAHFTYMANVADAVSFLLARV

SEQ ID NO: 328 - protein, 213 aa, Emericella nidulans
MKLQLHLALSLLAAIVAANPIRLDQRQITGNELRDGSCHDVTFIFARGSTELGYLGSTVGPATCNVLKLRKPGQVACQGVAPAYIADLASNFLPQGTNQIAINEAKSLFELAASKCPNTKIVAGGYSQGAAVMHAAISTLSSTVQDQIKGVVLFGDTRNKQDGGRIPNFPTDKTKIICAFGDLVCEGTLVITAAHLSYIDDVPDAADFLVGKL

SEQ ID NO: 329 - protein, 211 aa, Neosartorya fischeri
MKFALLSLAAMAVASPVAIDVRQTAIAGDELRTGPCEPITFIFARGSTEPGLLGITTGPGVCNALKLSRPGQVACQGVGPAYIADLASNFLPQGTNQIAIDEAAGLFKLAASKCPNTKIVAGGYSQGAAVMHGAIRNLPSDVQNMIKGVVLFGDTRNKQDGGRIPNFPTDRTKIYCAFGDLVCDGTLIITAAHLSYGDDVPNATSFLLSKV

SEQ ID NO: 330 - protein, 214 aa, Neosartorya fumigata [sequence omitted]

SEQ ID NO: 331 - protein, 259 aa, Aspergillus flavus
MNLRLLTLALAAVAAASPVDIQERQLSGGNELRDGSCKPITFIFARASTEPGLLGISTGPAVCNGLKMAKAGQVACQGVGPKYTADLASNALPENTSPAAIQEAQDLFQQAVTKCPDTQIVAGGYSQGTAVMDDSIKRLPDNVKEKIKGVVLFGYTRNAQEHGQIANFPKDKVKVYCAVGDMVCDGTLIVGPAHFTYLGNTGEATQFLLGKLSASSSSSSSSGSSDTSSASTSAAADSSSSSSSSSSPFGNLGNLFGGL

SEQ ID NO: 332 - protein, 214 aa, Neosartorya fumigata [sequence omitted]

SEQ ID NO: 333 - protein, 271 aa, Aspergillus niger
MKLPYFLLGLAGLAAASPMGLAERQLSDGNELRDGSCKPIIFIFARASTEPGLLGISTGPAVCNDLKMAKAGQVLCQGVGPAYTADLMSNALPDNTSPAAISESESLFKLAASKCPNSQILAGGYSQGTAVMDDSIKQLPDDVKDKIKGVVLFGYTRNAQEGGQIGNFPKDKVKIYCAMGDLVCDGTLIVTAAHFTYVMNTGEASQWLESKLSDTTTSSLTGSSSSDTSSSTSTGDSSSESSSAAGLGGLSGLTGLGSSTSGGFPSLASLF

SEQ ID NO: 334 - protein, 221 aa, Aspergillus oryzae
MNLRLLTLALAAVAAASPVDIQERQLSGGNELRDGSCKPITFIFARASTEPGLLGISTGPAVCNGLKMAKAGQVACQGVGPKYTADLASNALPENTSPAAIQEAQDLFQQAVTKCPDTQIVAGGYSQGTAVMDDSIKRLPDNVKEKIKGVVLFGYTRNAQEHGQIANFPKDKVKVYCAVGDMVCDGTLIVGPAHFTYLGNTGEATQFLLGYLRFLQLTQLP

SEQ ID NO: 335 - protein, 216 aa, Aspergillus terreus
MNYKLLTLALASLAAANPIERQRKIHPAVLSGGDELRNGDCQPVTFIFARASTEQGLLGGSTGPALCNRLKSALDGVACQGVGPKYQATLAANALPKGTSDEAIEEAQSLFQLAAEKCPDTQIVAGGYSQGTAVMHGAIPGLDDALKDKIKGVVLFGDTRNQQDNGQIPDFPKDKIKIYCAAGDMVCYGTLIVAAPHFSYIADVPDAADFLVSKLE

SEQ ID NO: 336 - protein, 255 aa, Emericella nidulans
MHFKLLSLAALAGLSVASPLNLDERQLGSSSGNDLRDGDCKPVTFIFARASTEPGLLGMSTGPAVCNDLKADASLGGVACQGVGPKYTAGLAENALPQGTSSAAINEAKELFELAASKCPDTRIVAGGYSQGTAVMHGAIPDLSDEIKDKIAGVVLFGDTRNKQDGGQIKNFPKDKIKIYCATGDLVCDGTLVVTAAHFTYVANTGEASKWLEQQLASMPASTSTSSSSSSSSSAPASQTSQSSGLSSWFSGLGN

SEQ ID NO: 337 - protein, 215 aa, Neosartorya fischeri
MNLRLLTLALAGLAAASPVAIQERQFSSGNELRDGACKPITFIFARASTEPGLLGMSTGPAVCNNLKAAKPGQVACQGVGPAYTADLGSNALPENTSPAAINEAVDLFKQAASKCPDTQIVAGGYSQGTAVMDGSIKRLPDEVKEKIKGVVLFGYTRNAQERGQIANFPKDKVKIYCAMGDLVCDGTLIVTAAHFTYGANTGDAARFLLGKLSTA

SEQ ID NO: 338 - protein, 215 aa, Aspergillus clavatus
MHFRALLVSALATLAMAAPAPTLEARQSLSSNELENGPCRDVTFIFARGSTEQGNMGFIVGPPTCTALKLKLGSDKVACQGVGGAYTANLLPNFLSQNTDPKSIAAATDMFQLARTKCPNTKIVTGGYSQGSAVIDNSVKALDDDLKSRVKAAVLFGFTRNVVDRGQIPNYPKDQVKVYCAVGDMVCYNTLIITAAHLTYGIYANDAANFLVSKL

SEQ ID NO: 339 - protein, 217 aa, Neosartorya fumigata
MSLRSLFVAGLATLALAVPAPQIQARQGMSSNELESGPCRDVTFIFARGSTEQGNMGLIVGPGVCSSLKKDLGSDKVACQGVGGAYTAQLAPNFLSQNTNQASINAATDMFDLANTKCPNTKIVAGGYSQGSAVIDNTIQALGSDLKAKVKGVVLFGFTRNVADKGQIPGYPKDQTKIYCAVGDMVCVNTLIITPAHLTYGADAGDAAKFLASKVQE

SEQ ID NO: 340 - protein, 224 aa, Aspergillus flavus
MVMLRSLLVSALAALAAASPIAEPADQSLEARQLGSSNDLTNGACKDVTLIFARGSTEMGNMGTVIGPPLCSALKSKLGADKVACQGVGGLYTGGLMQNALPQNTDPGAISTAKSLFEQASTKCPNTQIVAGGYSQGSAVIDNAVQQLSAEVKDKVKGVVFFGFTRNLQDKGQIPNYPKDNVKVFCAMGDLVCDGTLIVTAAHLTYTINAPEAASFLASKVQSA

SEQ ID NO: 341 - protein, 217 aa, Neosartorya fumigata; identical to SEQ ID NO: 339

SEQ ID NO: 342 - protein, 224 aa, Aspergillus oryzae
MVMLRSLLVSALAALAAGSPIAEPADQSLEARQLGSSNDLTNGACKDVTLIFARGSTEMGNMGTVIGPPLCSSLKSKLGADKVACQGVGGLYTGGLMQNALPQNTDPGAISTAKSLFEQASTKCPNTQIVAGGYSQGSAVIDNAVQQLSAEVKDKVKGVVFFGFTRNLQDKGQIPNYPKDNVKVFCAMGDLVCDGTLIVTAAHLTYTINAPEAASFLASKVQSA

SEQ ID NO: 343 - protein, 218 aa, Aspergillus terreus
MSLRSVLVAALAALAVATPVPENSLQERQLMSSNDVEDGVCRDVTFIFARGSTEQGNMGFVVGPEVCTSLKADLGSGKVACQGVGGAYTASLAPNFLSANTDPQSIQAATDLFEKAVANCPNTQIVAGGYSQGSAVMDNSIQALPADIQEKVKGVVLFGFTRNLQDNGQIPNYPKEDVKVYCALGDLVCSGTLIITPAHMTYGVNAGDAAQFLASKVQ

SEQ ID NO: 344 - protein, 221 aa, Emericella nidulans
MRFHTILLAALASLVIATPLPSDTDVSLERRQSMNSNDLEKGDCKSVAFIFARGSTEIGNMGFVVGPGVCSNLKSTLGSDKVACQGVGGAYTAGLIQNALPANTDSGSIKEAVKMFDLAAKCPDTQIVAGGYSQGSAVIDNAIQKLDDSTRDRVKGVVLFGFTRNLQDKGQIPGYPKDQTKVYCAVGDLVCSGTLIITASHMTYGLNAGDAAKFLASQVSV

SEQ ID NO: 345 - protein, 217 aa, Neosartorya fischeri
MSLRSLFVAGLATLALAAPAPQIQARQGMSSNELESGPCRDVTFIFARGSTEQGNMGFIVGPGVCSSLKNDLGSDKVACQGVGGAYTAQLAPNFLSQNTDQASIDAATDMFDLANTKCPNTKIVAGGYSQGSAVIDNAIQALDSDLKAKVKGVVLFGFTRNVVDKGQIPGYPKDQTKIYCALGDLVCDNTLIITAAHLSYGADADDAAKFLASKVQG

SEQ ID NO: 346 - protein, 219 aa, Aspergillus terreus
MILPSLLVASLSALAAAGPVPPSALEARQSESASDLENGICKPVVLIFARGSTESGNMGYIAGMPTCNALKTKLGSDQVACQGVGGAYTAGLIPNFLPNNTDQASIDEATKMFDLAHTQCPDAQIVAGGYSQGTAVMDGSIQALPDDIKSTVKGVVLFGFTRNLQDNGQIPNYPKDQTKVICAPGDLVCDGTLIITPAHLTYALYAGEAAEFLASKVSA

SEQ ID NO: 347 - protein, 220 aa, Aspergillus terreus
MVALHTLLLTAFAAVSLANPIPAPELEARQIINANDLENGVCKPVVLIFARGSTELGNMGAIAGMPTCNALKLALGSQNVACQGVGGAYTASLIPNFLPANTNQASIREATGVFEMAHTRCPNSQIVAGGYSQGSAVMDNTIQDLPDVIKNKVKGVVLFGFTRNLQDLGRIPNYPKEQTKVICAVGDLVCVGTLIITPAHLTYTLNAPEAAQFLASMVSV

SEQ ID NO: 348 - protein, 135 aa, Emericella nidulans
MRFIVSLLAFTAAATATALPASAAKNAKLATSAAFAKQAEGTTCNVGSIACCNSPAETNNDSLLSGLLGAGLLNGLSGNTGSACAKASLIDQLGLLALVDHTEEGPVCKNIVACCPEGTTNCVAVDNAGAGTKAE

SEQ ID NO: 349 - protein, 768 aa, Aspergillus clavatus
MKLGKWSVLLLVGCTAAIDIPRKPFPPTGSGHKRLTFNETVVKPVIAPSSTAVEWISTAEDGDYVFQDSDGSLKIQSIVTNHTQTLVPADKVPDDAYSYWIHPNLSSVLWATNYTKQYRYSYFASYYIQDLQSFKLAPLASNQAGDIQYANWSPTGDAIAFVRANNVYVWTAKSTTQITTDGSADLFNGVPDWIYEEEILGDRHALWFSPDAEYLAFLRFNETGVPTFRVPYYMDNEEVAPPYPRELELRYPKVSQTNPTVEVRLLSRATGEVSSVSIKAFNATDLVIGEVAWLTETHSQVAVKAFNRVQDQQKVVTVDVLSLKTKTISERDGTDGWLDNALSITYIGQIGDSKAEYYIDISDESGWAHLWLFPVAGGRPMALTKGEWEVTAILSIDKQRQLVYYLSTQHHSTERHVYSVSWKTFTATPLVDDTVAAVWSASFSSQGGYYILSYRGPDVPYQELYAINSTKPLCTITSNAAVYDVLKQYTLPKISYFELRLPSGETLNVMQRLPVSFSPRKKYPILFTPYGGPGAQEVSKAWQSQTFKSYIASDPELEFVTWTVDNRGTGYKGRRFRGQVAKQLGRLEAQDQVWAAQQAAKLPFIDAEHIAIWGWSYGGYLTGKVIETDSGVFSLGVLTAPVSDWRFYDSMYTERYMKTLQENANGYNASAIWDVAGYKNVRGGVLIQHGTGDDNVHFQNAAALVDRLVGEGVSPDKLQVQWFTDSDHGIRYHGGSVFLYRQLAKRLYEEKHRKKSEGHQWSKRSLEF

SEQ ID NO: 350 - protein, 765 aa, Neosartorya fumigata
MKWSILLLVGCAAAIDVPRQPYAPTGSGKKRLTFNETVVKRAISPSAISVEWISTSEDGDYVYQDQDGSLKIQSIVTNHTQTLVPADKVPEDAYSYWIHPNLSSVLWATNYTKQYRYSYFADYFIQDVQSMKLRPLAPDQSGDIQYAQWSPTGDAIAFVRDNNVFVWTNASTSQITNDGGPDLFNGVPDWIYEEEILGDRFALWFSPDGAYLAFLRFNETGVPTFTVPYYMDNEEIAPPYPRELELRYPKVSQTNPTVELNLLELRTGERTPVPIDAFDAKELIIGEVAWLTGKHDVVAVKAFNRVQDRQKVVAVDVASLRSKTISERDGTDGWLDNLLSMAYIGPIGESKEEYYIDISDQSGWAHLWLFPVAGGEPIALTKGEWEVTNILSIDKPRQLVYFLSTKHHSTERHLYSVSWKTKEITPLVDDTVPAVWSASFSSQGGYYILSYRGPDVPYQDLYAINSTAPLRTITSNAAVLNALKEYTLPNITYFELALPSGETLNVMQRLPVKFSPKKKYPVLFTPYGGPGAQEVSKAWQALDFKAYIASDPELEYITWTVDNRGTGYKGRAFRCQVASRLGELEAADQVFAAQQAAKLPYVDAQHIAIWGWSYGGYLTGKVIETDSGAFSLGVQTAPVSDWRFYDSMYTERYMKTLESNAAGYNASAIRKVAGYKNVRGGVLIQHGTGDDNVHFQNAAALVDTLVGAGVTPEKLQVQWFTDSDHGIRYHGGNVFLYRQLSKRLYEEKKRKEKGEAHQWSKKSVL

SEQ ID NO: 351 - protein, 771 aa, Aspergillus flavus
MKYSKLLLLLVSVVQALDVPRKPHAPTGEGSKRLTFNETVVKQAITPTSRSVQWLSGAEDGSYVYAAEDGSLTIENIVTNESRTLIPADKIPTGKEAFNYWIHPDLSSVLWASNHTKQYRHSFFADYYVQDVESLKSVPLMPDQEGDIQYAQWSPVGNTIAFVRENDLYVWDNGTVTRITDDGGPDMFHGVPDWIYEEEILGDRYALWFSPDGEYLAYLSFNETGVPTYTVQYYMDNQEIAPAYPWELKIRYPKVSQTNPTVTLSLLNIASKEVKQAPIDAFESTDLIIGEVAWLTDTHTTVAAKAFNRVQDQQKVVAVDTASNKATVISDRDGTDGWLDNLLSMKYIGPIKPSDKDAYYIDISDHSGWAHLYLFPVSGGEPIPLTKGDWEVTSILSIDQERQLVYYLSTQHHSTERHLYSVSYSTFAVTPLVDDTVAAYWSASFSANSGYYILTYGGPDVPYQELYTTNSTKPLRTITDNAKVLEQIKDYALPNITYFELPLPSGETLNVMQRLPPGFSPDKKYPILFTPYGGPGAQEVTKRWQALNFKAYVASDSELEYVTWTVDNRGTGFKGRKFRSAVTRQLGLLEAEDQIYAAQQAANIPWIDADHIGIWGWSFGGYLTSKVLEKDSGAFTLGVITAPVSDWRFYDSMYTERYMKTLSTNEEGYETSAVRKTDGFKNVEGGFLIQHGTGDDNVHFQNSAALVDLLMGDGVSPEKLHSQWFTDSDHGISYHGGGVFLYKQLARKLYQEKNRQTQVLMHQWTKKDLEE

SEQ ID NO: 352 - protein, 765 aa, Neosartorya fumigata
MKWSILLLVGCAAAIDVPRQPYAPTGSGKKRLTFNETVVKRAISPSAISVEWISTSEDGDYVYQDQDGSLKIQSIVTNHTQTLVPADKVPEDAYSYWIHPNLSSVLWATNYTKQYRHSYFADYFIQDVQSMKLRPLAPDQSGDIQYAQWTPTGDAIAFVRDNNVFVWTNASTSQITNDGGPDLFNGVPDWIYEEEILGDRFALWFSPDGAYLAFLRFNETGVPTFTVPYYMDNEEIAPPYPRELELRYPKVSQTNPTVELNLLELRTGERTPVPIDAFDAKELIIGEVAWLTGKHDVVAVKAFNRVQDRQKVVAVDVASLRSKTISERDGTDGWLDNLLSMAYIGPIGESKEEYYIDISDQSGWAHLWLFPVAGGEPIALTKGEWEVTNILSIDKPRQLVYFLSTKHHSTERHLYSVSWKTKEITPLVDDTVPAVWSASFSSQGGYYILSYRGPDVPYQDLYAINSTAPLRTITSNAAVLNALKEYTLPNITYFELALPSGETLNVMQRLPVKFSPKKKYPVLFTPYGGPGAQEVSKAWQALDFKAYIASDPELEYITWTVDNRGTGYKGRAFRCQVASRLGELEAADQVFAAQQAAKLPYVDAQHIAIWGWSYGGYLTGKVIETDSGAFSLGVQTAPVSDWRFYDSMYTERYMKTLESNAAGYNASAIRKVAGYKNVRGGVLIQHGTGDDNVHFQNAAALVDTLVGAGVTPEKLQVQWFTDSDHGIRYHGGNVFLYRQLSKRLYEEKKRKEKGEAHQWSKKSVL

SEQ ID NO: 353 - protein, 771 aa, Aspergillus oryzae; identical to SEQ ID NO: 351

SEQ ID NO: 354 - protein, 773 aa, Emericella nidulans
MKLSVLSVLLVSVAQAAAAPWRPREPRAAGSKRLTFNETVISAALSPSSISVQWIATENDGDYVYQEEDGSIKIESIVTNRSQTIVPAEKIPADAYSYWISPDLSAVLWATNYTKQYRHSFFADYYIQDVETLETVPLVEDMVGDIQYAEWSPSGDSIAFVRGNNLWTWSDGTVTAITKDGGPDMFHGVPDWIYEEEILGDRFALWFSPDSELLAFLTFNETGVPTFTVQYFMDNQEIAPPYPRELDIRYPKVSETNPTVKLNILQLSDNTVSTIPIDVFDPSELIVGEVAWVTDTHTELAVKAFNRVQDESKVVIVETASGETKIAHERDGTDGWLDNLLSISYVGPLALGSGDASSAYYVDLSDHSGWTHLYLFSTSGGDPIPLTEGEWEVTSIVSIDQERELVYYLSTQHHSTERHLYSVSYRTFEITPLVDDTVEAYWSVSFSAKAGYYILTYAGPSVPYQELYSVNQTAPLRTLTSNAALIEKLEEYALPNISYFELEIPSGEKLNVMQRLPVGFSPDKKYPVLFTPYGGPGAQEVSKRWQSLDFNAYIASDPELEYVTWTVDNRGTGYRGREFRSLVAKQLGKLEAEDQVYAAKQAAKLDWVDSEHIAIWGWSYGGYLTGKVLETDSGAFSLGLLTAPVSDWRLYDSMYTERYMKTLSTNAEGYNTTAIRHTDGFKNVEGGFLIQHGTGDDNVHFQNAAALGDTLIGNGVTPEKMQVQWFTDSDHSIRYNGGNVFLYRQLAQRLYKEKNRAKKEQHQWSKRSQDWVV

SEQ ID NO: 355 - protein, 765 aa, Neosartorya fischeri
MKWSILLLVGCAAAIDVPRQPYAPTGSGKKRLTFNETVVKRAISPSAISVEWISTSEDGDYVYQDQDGSLKIQSIVTNNTQTLVPADKVPEDAYSYWIHPNLSSVLWATNYTKQYRHSYFADYFIQDVQSMNLRPLAPDQSGDIQYAQWSPTGDAIAFVRGNDVFVWTNASTSQITNDGGPDLFNGVPDWIYEEEILGDRFALWFSPDGAYLAFLRFNETGVPTFTVPYYMDNEEIAPPYPRELELRYPKVSQTNPTVELNLLELRTGERTPVPIDAFDAKELIIGEVAWLTEKHDVVAVKAFNRVQDRQKVVAVDVASLRTKTINERDGTDGWLDNLLSMAYIGPIGESKEEYYIDISDQSGWAHLWLFPVAGGEPIALTKGEWEVTAILSIDKPRQLVYFLSTKHHSTERHLYSVSWKTMEITPLVDDTVPAVWSASFSSQGGYYILSYRGPDVPYQDLYAINSTAPLRTITSNAAVLDGLKEYTLPNITYFELALPSGETLNVMQRLPVKFSSKKKYPVLFTPYGGPGAQEVSKAWQALDFKAYIASDPELEYITWTVDNRGTGYKGRAFRCQVTSRLGELEAADQVFAAQQAAKLPYVDADHIAIWGWSYGGYLTGKVIETDSGAFSLGVQTAPVSDWRFYDSMYTERYMKTLESNAAGYNASAIRKVAGYKNVRGGVLIQHGTGDDNVHFQNAAALVDTLVGAGVTPEKLQVQWFTDSDHGIRYHGGNVFLYRQLSKRLYEEKKRKEKGEAHQWSKKSVL

SEQ ID NO: 356 - protein, 724 aa, Aspergillus clavatus
MGALTWLSVVAAAASTALAMTPEKMISAPRRSEVIPNPSGEIGVFSTSQYSFEKHKRSSWWSLLDLKTGQSKILTNDSSVSEILWLGTDDSTLLYVNGTNADVPGGVELWVTQVSSFTNGYKAASLPAAFSGFKTVTTKSGDIRFVAYAQSYANGTAYNEELVEKPLSSARIYDSIYVRHWDSYLTTTFNAVFSGTLKKGNNKKGYTLDGAVKNLVSPVRNAESPYPPFGGASDYDLSPNGKWVAFKSKAPELPKANFTTAYIYLVPHDGSEKAFAINGPDSPGTPKGIKGDANSPVFSPNSEKLAYLQMKDETYEADRRVLYVYSIGSKKTIPSVAGNWDRSPDSIKWTPDGKTLIVGSEDKGRSRLFAIPATARDDFKPKNFTDGGAVSAYYFLPDRSLLVTGTAIWTNWNVYTASPAKGVIKTLASANEIDPELKGLGPSDVSEIYFKGNWTDIHAWVVYPENFDKSKKYPLAFLIHGGPQGSWADSWSSRWNPKTFADQGYVVVAPNPTGSTGFGQKLTDEIQNNWGGAPYDDLVKCWEYVNKNLPFVDTEHGIAAGASYGGFMVNWIQGNDLGRRFKALVSHDGTFVADAKISTDELWFMQREFNGTFWDARDNYRRFDPSAPEHIRQFGTPQLVIHNDKDYRLAVAEGLSLFNVLQERGVPSRFLNFPDENHWVVNPENSLVWHQQVLGWINKYSGIEKSNPGAVSLDDTIVPVVNYN

SEQ ID NO: 357 - protein, 721 aa, Neosartorya fumigata
MGAFRWLSIAAAASTALALTPEQLITAPRRSEAIPDPSGKVAVFSTSQYSFETHKRTSWWSLLDLKTGQTKVLTNDSSVSEIVWLSDDSILYVNSTNADIPGGVELWVTQASSFAKGYKAASLPASFSGLKAAKTKSGDIRFVAYGQSYPNGTAYNEELATAPLSSARIYDSIYVRHWDYWLSTTFNAVFSGTLKKGHGKNGYSLDGELKNLVSPVKNAESPYPPFGGASDYDLSPDGKWVAFKSKAPELPKANFTTSYIYLVPHDASETARPINGPDSPGTPKGIKGDSSSPVFSPNGDKLAYFQMRDETYESDRRVLYVYSLGSKKTIPSVAGDWDRSPDSVKWTPDGKTLIVGSEDLGRTRLFSLPANAKDDYKPKNFTDGGSVSAYYFLPDSSLLVTGSALWTNWNVYTAKPEKGVIKKIASANEIDPELKGLGPSDISEFYFQGNFTDIHAWVIYPENFDKSKKYPLIFFIHGGPQGNWADGWSTRWNPKAWADQGYVVVAPNPTGSTGFGQALTDAIQNNWGGAPYDDLVKCWEYVHENLDYVDTDHGVAAGASYGGFMINWIQGSPLGRKFKALVSHDGTFVADAKVSTEELWFMQREFNGTFWDARDNYRRWDPSAPERILQFATPMLVIHSDKDYRLPVAEGLSLFNVLQERGVPSRFLNFPDENHWVVNPENSLVWHQQALGWINKYSGVEKSNPNAVSLEDTVVPVVNYN

SEQ ID NO: 358 - protein, 725 aa, Aspergillus flavus
MGALRWLSIAATASTALALNPEGLISAPRRSEAIPNPSGDVAVFSQSQYSFKTHKTTSQWNVLDLKSGDIKLLTNDSDVSEIVWLGSDDSTVLYVNGTNADIPGGVELWVSDISDFANGYKAASLPASFSGFKVVTTDSGDVRYVAYAESWANGTAYNEELVAKPLSSARIYDSIYVRHWDYYLTTRFNAVFSGTLKKSEGKGKATYKADGDLKNLVSPVKNAESPYPPFGGASDYDLSPDGKWVAFKSKAHDIPRANYTTAYIFLVPHDGSKTAVPINGPDSPGTPEGVKGDAGSPVFSPDSKKIAYWQMADESYEADHRTLYVYTVGSEETIPSLAADWDRSLDSVKWADDDNLIIGVEDAGRSRLFSIPADAGDDYKPKNFTDGGVVSAYYQLPDSTYLVTSTAIWTSWNVYIASPEKGVIKTLATANKIDPELKGLGPEIVDEFYYEGNWTKIQAFVIYPENFDKSKSYPLLYYIHGGPQSSWLDSWSTRWNPKVFADQGYVVVAPNPTGSSGFGDALQDAIQNQWGGYPYEDLVKGWEYVNENFDFIDTDNGVAAGASYGGFMINWIQGSDLGRKFKALVSHDGTFVADAKVSTEELWFMQHEFNGTFWDNRENYRRWDPSAPERILKFSTPMLIIHSDLDYRLPVSEGLSLFNILQERGVPSRFLNFPDENHWVQNKENSLVWHQQVLGWLNKYSGVEESNEDAVSLDDTVIPVVDYNP

SEQ ID NO: 359 - protein, 721 aa, Neosartorya fumigata
MGAFRWLSIAAAASTALALTPEQLITAPRRSEAIPDPSGKVAVFSTSQYSFETHKRTSWWSLLDLKTGQTKVLTNDSSVSEIVWLSDDSILYVNSTNADIPGGVELWVTQASSFAKGYKAASLPASFSGLKTAKTKSGDIRFVAYGQSYPNGTAYNEELATAPLSSARIYDSIYVRHWDYWLSTTFNAVFSGTLKKGHGKNGYSLDGELKNLVSPVKNAESPYPPFGGASDYDLSPDGKWVAFKSKAPELPKANFTTSYIYLVPHDASETARPINGPDSPGTPKGIKGDSSSPVFSPNGDKLAYFQMRDETYESDRRVLYVYSLGSKKTIPSVAGDWDRSPDSVKWTPDGKTLIVGSEDLGRTRLFSLPANAKDDYKPKNFTDGGSASAYYFLPDSSLLVTGSALWTNWNVYTAKPEKGVIKKIASANEIDPELKGLGPSDISEFYFQGNFTDIHAWVIYPENFDKSKKYPLIFFIHGGPQGNWADGWSTRWNPKAWADQGYVVVAPNPTGSTGFGQALTDAIQNNWGGAPYDDLVKCWEYVHENLDYVDTDHGVAAGASYGGFMINWIQGSPLGRKFKALVSHDGTFVADAKVSTEELWFMQREFNGTFWDARDNYRRWDPSAPERILQFATPMLVIHSDKDYRLPVAEGLSLFNVLQERGVPSRFLNFPDENHWVVNPENSLVWHQQALGWINKYSGVEKSNPNAVSLEDTVVPVVNYN

SEQ ID NO: 360 - protein, 726 aa, Aspergillus niger
MGALQWLSITAAAASAVSALTPEQMIGAPRRTEVIPNPSGDTGLFSTSQWSFDTHSESTWWSLIDLQSGKTTTLTDDSDIEEIIWLGSDNSTLLYINSTNAQVPGGVELWIADSSDFANAYKAASLSAGFLGIKSTVTDSGDVHFILRGKSYPNGTAYNDQLAETYPSTARIYDSIFVRHWDTYLTTASHAVFSGTLQSSTSDDGNVQYTSSGGLTNLVNPVKGAESPFPPFGGNDDYDLSPDGKWVTFKSKAPELPLANNTAAYVYLVPHDGSATAFAVNGPDSPATPEGVEGESNNPVFSPDSDKIAYFQMATNTYESDRNVLYVYSIADDTITPLAKDWDRSPSSVTWVDGDNLVVASQDLGRTRLFAIPGDAGDDFKPTNFTDGGSVSAQYVLSNSTLLVTSSAFWTSWSVYTASPDEGVINTLASANEIDPELSGLSSSDFEEFYFDGNWTTLQGWITYPQDFDSSKKYPLAFLIHGGPEDAWADEWNLKWHSKVFADQGYVVVQPNPTGSTGFGQQLTDAIQLNWTGAAYDDLTKAWQYVHDTYDFIDTDNGVAAGPSFGAFMITWIQGDDFGRKFKALVSHDGPFIGDAWVETDELWFVEHEFNGTFWQARDAFHNTDPSGPSRVLAYSTPQLVIHSDKDYRIPVANGIGLFNTLQERGVPSRFLNFPDEDHWVTGQENSLVWYQQVLGWINRYSGVGGSNPDAIALEDTVNPVVDLNP

SEQ ID NO: 361 - protein, 726 aa, Aspergillus niger
MGALQWLSITAAAASAVSALTPEQMIGAPRRTEVIPNPSGDTGLFSTSQWSFDTHSESTWWSLIDLESGETTTLTDDSDIEEIIWLGSDSSTLLYINSTNAQVPGGVELWIADSSDFANYKAASLSAGFLGIKSTVTDSGDVHFILRGKSYPNGTAYNDQLAETYPSTARIYDSIFVRHWDTYLTTASHAVFSGTLQSSTSDDGNVQYTSSGGLTNLVNPVKGAESPFPPFGGNDDYDLSPDGKWVTFKSKAPELPLANNTAAYVYLVPHDGSATAFAVNGPDSPATPEGVEGESNNPVFSPDSDKIAYFQMATNTYESDRNVLYVYSIADDTITPLAKDWDRSPSSVTWVDGDNLVVASQDLGRTRLFAIPGDAGTTSSPRTFTDGGSVSAQYVLSNSTLLVTSSAFWTSWSVYTASPDEGVINTLASANEIDPELSGLSSSDFEEFYFDGNWTTLQGWITYPQDFDSSKKYPLAFLIHGGPEDAWADEWNLKWHSKVFADQGYVVVQPNPTGSTGFGQQLTDAIQLNWTAGAAYDDLTKAWQYVHDTYDFIDTDNGVAAGPSFGAFMITWIQGDDFGRKFKALVSHDGPFIGDAWVETDELWFVEHEFNGTFWQARDAFHNTDPSGPSRVLAYSTPQLVIHSDKDYRIPVANGIGLFNTLQERGVPSRFLNFPDEDHWVTGQENSLVWYQQVLGWINRYSGVGGSNPDAIALEDTVNPVVDLNP

SEQ ID NO: 362 - protein, 725 aa, Aspergillus oryzae
MGALRWLSIAATASTALALNPEGLISAPRRSEAIPNPSGDVAVFSQSQYSFKTHKTTSQWNVLDLKSGDIKLLTNDSDVSEIVWLGSDDSTVLYVNGTNADIPGGVELWVSDISDFANGYKAASLPASFSGFKVVTTDSGDVRYVAYAESWANGTAYNEELVAKPLSSARIYDSIYVRHWDYYLTTRFNAVFSGTLKKSEGKGKATYKADGDLKNLVSPVKNAESPYPPFGGASDYDLSPDGKWVAFKSKAHDIPRANYTTAYIFLVPHDGSKTAVPINGPDSPGTPEGVKGDAGSPVFSPDSKKIAYWQMADESYEADHRTLYVYTVGSEETIPSLAADWDRSLDSVKWADDDNLIIGVEDAGRSRLFSIPADAGDDYKPKNFTDGGVVSAYYQLPDSTYLVTSTAIWTSWNVYIASPEKGVIKTLATANKIDPELKGLGPEIVDEFYYEGNWTKIQAFVIYPENFDKSKSYPLLYYIHGGPQSSWLDSWSTRWNPKVFADQGYVVVAPNPTGSSGFGDALQDAIQNQWGGYPYEDLVKGWEYVNENFDFIDTDNGVAAGASYGGFMINWIQGSDLGRKFKALVSHDGTFVADAKVSTEELWFMQHEFNGTFWDNRENYRRWDPSAPERILKFSTPMLIIHSDLDYRLPVSEGLSLFNILQERGVPSRFLNFPDENHWVQNKENSLVWHQQVLGWLNKYSGVEESNEDAVSLDNTVIPVVDYNP

SEQ ID NO: 363 - protein, 723 aa, Aspergillus terreus
MAALRWLSAVVAVSTTVLAITPEQMLSAPRRGEAIPNPSGNVALFSASQYSFDTKEKSSSWNLLNLKTGDITLLTDDANVSEIVWLGGDDTSLLYINGTNAEIPGGVELWVSSVKDFSKGYKAASLGASFSGLKAVRTRSGDIKFAVNAQSYANGTAYNEELATKYASTARIYDSIYVRHWDTYLTTTFNAVFAGTLKKGKHQYASAGPLKNLVAPVKNAESPYPPFGDSTDYDVSPDGKWVAFKSKAPDVPRANYTTAYIYLAPHDGSSTATPINGPDSPGTPEGVQGDANYPVFSPDSRHLAYFQMAHKSYESDRRVLYVYTLGSKTTTPAVAGDWNRSPDSAKWLDNKHLILGSEDHARVRLFGPVPIDADDDFKPQNFTDGGAVSSYHVLPDKTVLVTGTAIWTSWNVYTASPKKGVIKTIASANKIDPGLAGLGPEDISEFYYDGNWTKIQSWIIYPENFDSSKKYPLFFYIHGGPQSATPDSWSTRWNAKVFADQGYVVVAPNPTGSTGFGQELTDAIANNWGGAPYEDLVKAWEYVDKNLPYVDTENGVAAGASYGGFMINWIQGSDLGRKFKALVCHDGTFVADAKISTEELWFIEHDFNGTFWGARDNYRRWDPSAPERILQFSTPQLVIHSDQDYRLPVAEGLAMFNVLQERGVPSRFLNFPDENHWVLKQENSLVWHQQMLGWLNRYSGIEEANPDAVSLDDTIIPVVNYNP

SEQ ID NO: 364 - protein, 722 aa, Emericella nidulans
MGALRWLSLAAAASSALALTPEQLISAPRRSEAIPNPSGNIAVFSSSQYSFDTHESSSAWNLLDLRSGKITPLTNDSNVSEIVWLNDSTLLYINGTNAQIPGGSELWVSGLSNFPSGYKAASLPASFSGLKAVTTKSGDIKFVAYAQSYRNGTAYNEELAETYLSSARIYDSIYVRHWDTYLTTTFNAVFSGTLKKTQHARYASAGSLKNLVAPIPNAESPYPPFGGSSDYDISADGKWVAYKSKAPDVPQANHTTAYIYLVPHDGSETPVPINGPGSAPEGIEGDSNNPVFSPDSKSLAYLQMKDPTYESDRRVIYIYDLASKKITPLATEWDRSPDSLKWTDKSTIVAGSEDEGSGNLFLIPVKKATGDFIPEKLTNGKYASAFYLASGNTLVVTGSTLYSSWYVDLVSLNPKRGTIKNLVSAHEIDPELSGLGPEDISDIWFAGNWTDIHAWVIYPEGFDKSKTYPLAFLIHGGPQGAWYNSWSSRWNPKVFADQGYVVVAPNPTGSTGYGDELTDAIQNNWGGAPYEDLVKAWEYVRDNLDYVDTDRGVAAGASYGGFMVNWIQGSDLGREFKALVTHDGTFVADAKISTEELWFMEREFNGTFWDVRDNYRRFDPSAPERILRFATPHLIIHNDLDYRLPVAEGLSLFNVLQERGVPSRFLNFPDENHWVTSPENSLVWHQQVLGWLNKYSGIAEDNEDAVTLEDTVVPVVNINPPA

SEQ ID NO: 365 - protein, 310 aa, Aspergillus clavatus
MSGRTLLLSPPSLSSQPERLNGILQSYDRKTTDLQMLDRLILGVVNLPDAAYSRIIILAGEEDSISESSKLTTRETFSHIARSLQKGGYICSQHEQQGQAFDHNEAVLVGLIPTDNGKFVKPDIEDMRAVPLRLGRKKHDKTISSNLAEPVRNHQASPTVAQDQAEDGFRYSSGRNIVTASAHETSDNEIIDEEDLLDGSELAAPIIQPPECRPKAGRRRRACKDCTCGLAQKLEEEDAMRRHAADKQLGAMKLSHGDLAEVDFTVQGKVGSCGNCSLGDAFRCEGCPFIGLPAFQPGEEIRLLNDDIQL

SEQ ID NO: 366 - protein, 300 aa, Neosartorya fumigata
MAKQTLLLSPPSLSSQPGKLNETLQSYNRNATDLQMLDRLALGLASLPDSAYSSIVILAGGDNSFSESLKLINRQIFNQIIGSLRRGGYIYGQDAVSGIAFDHNEAILAGLIHVGNGKYQKPDIKEMQAVPLRLGRKNDHLAGAPSLQESAAEHPCPPETMISASTMNSNEASDDELINEDNLLDDSELSAPIIQRGPAPECRPKAGKRRRACKDCTCGLAQKLQEEDAVKRADADEQLDAMRLLHDDLAEVDFTVQGKVGSCGNCSLGDAFRCEGCPFIGLPAFQPGEEVRLLNNDVQL

SEQ ID NO: 367 - protein, 313 aa, Aspergillus flavus
MSITIDTSVDIDLPTPPQSNGSQKRNLLLAPPSVAAHEEKLRDVFSTFDRSSTDLQMLDRLSAGFVSLPPNTYDLVLVLTDAQSDEAVRLLTRDVYTALVPAMKAGARLQLQQGSLGASEGLEAILAGLVEKDGGFEKPVQEAAVPLKLGGRKKKDKTNGVNGVQNGVATNGASTNGVGMFDPAQNNDDELIDEDALLSDDDLKRPLPRPQNCVPETAKKRRRPCKDCTCGLASQLEEEDRAREAKAAQDLNILKLNTDDLNDELDFTVQGKTSSCNSCSLGDAFRCSSCPYIGLPPFKPGEEVKIMNDMVQL

SEQ ID NO: 368 - protein, 324 aa, Aspergillus niger
MAPSFVTIDTTPDFDMAPAPSFQPMSTGSPSKRTLLLAPPSIATQEEKLRDLFTAFDRSTTDLQMLDRISAGFVSLPANTYDHILVLTDTDGTRRSEALHLLTRDVYTALVPCMKAGAKLQTQDNFFGEAEEREAVLAGLIKTDAGFEKMDQPKSFAIPLRRNGKKKDAAKTETFAPAPAPAPPVQPVTVGMINNDDDYENDDDLIDEDTLLSDEDLKRPIQPPECQPKPGRRRRACKDCTCGLAARLEAEEQAEREKADKALNVMKLETEDLNELDFTVQGKTGSCGNCALGDAFRCAGCPFIGLPAFKPGQEVQILENVAQL

SEQ ID NO: 369 - protein, 313 aa, Aspergillus oryzae
MSITIDTSVDIDLPTPPQSNGSQKRNLLLAPPSVAAHEEKLRDVFSTFDRSSTDLQMFDRLSAGFVSLPPNTYDLVLVLTDAQSDEAVRLLTRDVYTALVPAMKAGARLQLQQGSLGASEGLEAILAGLVEKDGGFEKPVQEAAVPLKLGGRKKKDKTNGVNGVQNGVATNGASTNGVGMFDPAQNNDDELIDEDALLSDDDLKRPLPRPQNCVPETAKKRRRPCKDCTCGLASQLEEEDRAREAKAAQDLNILKLNTDDLNDELDFTVQGKTSSCNSCSLGDAFRCSSCPYIGLPPFKPGEEVKIMNDMVQL

SEQ ID NO: 370 - protein, 307 aa, Aspergillus terreus
MTPVPVSVDTTADFAAPPTKTAPSTSTRTLLLAPPSIAAHEEKLRDIFATFDRASTDLQMLDRLSAGFVSLPAATYDLVLVLTDTDSARRAEALQLLSRDVYSALVPSMKGGAKLQLQDGTWNSAEGLEAILAGLVEKDGAFEKPAYQEAAVPLRLGGKKKKAPAPTEQPPVATGVGFVDGNDELIDEDDLLSDDDLKRPMQQPANCQPEKAKKRRRPCKDCTCGLAAEMEAEDKARQEKADKDLNVLKLQSTDLSDEVDFTVQGKTSSCNSCSLGDAFRCSSCPYIGLPPFKPGEEVKILNNMVQL

SEQ ID NO: 371 - protein, 310 aa, Emericella nidulans
MAPSFVSIDTTPDFDMTPTSSKSADSGKRTLLLAPPSIATQEDKLRTLFTTYDRSTTDLQMLDRVSAGFVSLPANTYDLVLVLTGTDGTRRSEALQLLKREVYAAVVPAMKGGAKLQTEDNFFGEAEDREAVLAGLVKKETGFEKMDVGNGAAVPLRLGRKKKAAPAPAPVVQPPPIISSDDNDLNDDELIDEDTLLSADDLKRPIVPPPECQPKAGKRRRACKDCTCGLAAQIEAEDRERREAADKSLNVMKLESDDLNELDFTVQGKTGSCGNCALGDAFRCDGCPFIGLPAFKPGQEVQILNDVAQL

SEQ ID NO: 372 - protein, 320 aa, Neosartorya fischeri
MAKQTLLLSPPSLSSQPGKLNETLQSYNRNATDLQMLDRLALGLASLPDSTYSTIVILAGGDNSFSESLKLINRQTFNQIIGSLRRGGYIYGQDAVSGVAFDHNEAILAGLIHVGNGKYLKPDIEEMQAVPLRLGRKNDHLAGAPSLEGSAAEHPFPPEVSEGKTASGDNRVAVVGSQKFRENIVSAATMDNNEASDDELINEDNLLDDSELSAPIIQPPECRPKAGKRRRACKDCTCGLAQKLQEEDAVKRADADEQLDAMKLLHDDLAEVDFTVRGKVGSCGNCSLGDAFRCEGCPFIGLPAFQPGEEVRLLNNDVQL

SEQ ID NO: 373 - protein, 326 aa, Emericella nidulans
MRSLVLLSSVLALVAPSKGAFTWLGTNEAGAEFGEGSYPGELGTEYIWPDLGTIGTLRNEGMNIFRVAFSMERLVPDSLAGPVADEYFQDLVETVNGITALGAYAVLDPHNYGRYYGNIITSTDDFAAFWTILATEFASNELVIFDTNNEYHTMDQSLVLNLNQAAIDAIRASGATSQYIFAEGNSWTGAWTWVDVNDNMKALTDPQDKLIYEMHQYLDSDGSGTNTACVSSTIGSERVTAATNWLRENGKLGVLGEFAGANNQVCKDAVADLLEYLEENSDVWLGALWWAAGPWWGDYMFNMEPTSGIAYQEYSEILQPYFVGSQ

SEQ ID NO: 374 - protein, 333 aa, Aspergillus flavus
MKFRNLFFAAVAGSAVAAPLAKEQKKRDSVFQWIGANESGAEFGENNLPGVWGTDYIFPDVSAITTLIDKGMNIFRIQFKMERLVPDSMTGAYDEAYLQNLTTVVNAVTDAGVHAILDPHNYGRFNGEIMSTPSDFQTFWKNLAGQFQSNSLVIFDTNNEYHDMDQELVLNLNQAAIDGIREAGATEQYIFVEGNSYTGAWTWTDVNDNMKNLEDPQDKIVYQMHQYLDSDGSGTSETCVSGTIGQERVTSATQWLKDNKKVGIIGEFAGGNNDQCKTAVKGMLDYLAENTDVWKGALWWAAGPWWGDYMYSLEPPNGVAFTGMLDVLQAYLG

SEQ ID NO: 375 - protein, 332 aa, Aspergillus kawachii
MKFQSTLLLAAAAGSALAVPHGPGHKKRASVFEWFGSNESGAEFGTNIPGVWGTDYIFPDPSAISTLIDKGMNFFRVQFMMERLLPDSMTGSYDEEYLANLTTVIKAVTDGGAHALVDPHNYGRYNGEIISSTSDFQTFWENLAGQYKDNDLVMFDTNNEYHDMDQDLVLNLNQAAINGIRAAGATSQYIFVEGNSWTGAWTWVDVNDNMKNLTDPEDKIVYEMHQYLDSDGSGTSETCVSETIGKERVTEATQWLKDNKKVGFIGEYAGGSNDVCRSAVSGMLEYMANNTDVWKGASWWAAGPWWGDYIFSMEPPDGTAYTGMLDILEAYL

SEQ ID NO: 376 - protein, 331 aa, Aspergillus niger
MKFQSTLLLAAAAGSALAVPHGSGHKKRASVFEWFGSNESGAEFGTNIPGVWGTDYIFPDPSTISTLIGKGMNFFRVQFMMERLLPDSMTGSYDEEYLANLTTVVKAVTDGGAHALIDPHNYGRYNGEIISSTSDFQTFWQNLAGQYKDNDLVMFDTNNEYYDMDQDLVLNLNQAAINGIRAAGASQYIFVEGNSWTGAWTWVDVNDNMKNLTDPEDKIVYEMHQYLDSDGSGTSETCVSGTIGKERITDATQWLKDNKKVGFIGEYAGGSNDVCRSAVSGMLEYMANNTDVWKGASWWAAGPWWGDYIFSLEPPDGTAYTGMLDILETYL

SEQ ID NO: 377 - protein, 331 aa, Aspergillus niger; identical to SEQ ID NO: 376

SEQ ID NO: 378 - protein, 333 aa, Aspergillus oryzae; identical to SEQ ID NO: 374

SEQ ID NO: 379 - protein, 328 aa, Emericella nidulans
MKVNTLLVAVAAGTAMAAPQLKKRAGFTFFGVTEAGAEFGEKSIPGVWGTDYTFPDTESILTLISKGFNTFRIPFLMERLTPEMTGSFDEGYLKNLTSVVNAVTDAGAWAIVDAQNFGRFNGEIISSASDFQTWWKNVAAEFADNKNVIFDTNNEFHDMDQTLVLDLNQAAINGIRAAGATSQYIFVEGNSYTGAWTWTDNNDNLKSLTDPQDKIVYEMHQYLDTDGSGTHETCVSETIGAERVESATQWLKDNGKLGVIGEFAGGNNEICRAAVKSLLDALKENDDVWLGALWWAAGPWWEDYMFSMEPTDGIAYTGMLSTLEAYMN

SEQ ID NO: 380 - protein, 329 aa, Neosartorya fischeri
MKFGSIVLIAAAAGSAVAAPAKRASVFQWFGSNESGAEFGQNTIPGSYGKEFIFPDPSTISTLIGKGMNIFRVQFLMERLVPSSMTGSYNEEYLANLTSVVDAVTKAGSYAILDPHNFGRYNGQIISSTDDFKTFWQNLAGKFKSNNLVIFDTNNEYHDMDQALVLNLNQAAINGIRAAGATSQYIFVEGNSWSGAWTWVDVNDNLKALTDPQDKIVYEMHQYLDSDGSGTSESCVSTTIGKERVTAATKWLKDNGKVGIIGEFAGGVNDQCRTAISGMLEYLAQNTDVWKGALWWAAGPWWGNYMFNMEPPSGAAYVGMLDILEPYLG

SEQ ID NO: 381 - protein, 453 aa, Aspergillus clavatus
MQTRQLLALALAVAATEAAHQGFNYGNTKSDGSAKSQSDFAAEFSTAKNLVGTSGFTSARLYTMIQGGTSATPISAIPAAIAEDTSLLLGIWASGGNVANEIAALKAAIAQYGADFGKHVVGISVGSEDLYRNSVDGVKSKAGLGANPDDLVSYIHQVREAIAGTSLSGAPIGHVDTWTAWVNGSNSAVIDACDWLGFDGYPYFQNTMPNSISDAKALFDESVAKTQAVAKGKEVWITETGWPVSGKTENLAVANTANAKAYWDQVGCPLFGNTNTWWYILQDADPVTPNPSFGIVGSTLSTTPLFDLSCSAVSSSSAVPSATAAATAASGAGASGSQTSGFATAAAGSSSAAKPTFSVGKGPNGSYNGTYPGSWNSTRPGANGGSSGSSGSSGSSGSSGSSGSSGSGASGHSSSTGSSSFPSSTNLLSNSASGLSGSLFGAVAAVFVALAAL

SEQ ID NO: 382 - protein, 450 aa, Neosartorya fumigata
MQFTHLVALALALATSEAAHQGFNYGNTKSDGSAKSQADFQAEFSTAKNLVGTSGFTSARLYTMIQGGTANTPISAIPAAITEQTSLLLGLWASGGNFANEIAALKAAIAQYGDDLAKLVVGISVGSEDLYRNSVDGVKANAGIGTNPDEIVSYINEVRSTIAGTKLSGAPIGHVDTWTAWVNGSNSAVIDACDWLGFDGYPYFQNTMANSISDAKALFDESVAKTQAVAKGKEVWITETGWPVSGKTENLAVANLANAKTYWDEVGCPLFGKTNTWWYILQDADPVTPNPSFGIVGSTLSTTPLFDLSCSASSSSSAAASSTAGPSASSVIGGKASGFTTAAANSAKPTFTVGKGPGGSYNGTGFWNSTSSARPSSSAISGSSSGSAAGSSGSSGSSGSGASGASGQSSSSTGSSSAPSTSNILSNAASGLSGSICGAVVAVCLALAAL

SEQ ID NO: 383 - protein, 446 aa, Neosartorya fumigata
MQFTHLVALALALATSEAAHQGFNYGNTKSDGSAKSQADFQAEFSTAKNLVGTSGFTSARLYTMIQGGTANTPISAIPAAITEQTSLLLGLWASGGNFANEIAALKAAIAQYGDDLAKLVVGISVGSEDLYRNSVDGVKANAGIGTNPDEIVSYINEVRSTIAGTKLSGAPIGHVDTWTAWVNGSNSAVIDACDWLGFDGYPYFQNTMANSISDAKALFDESVAKTQAVAKGKEVWITETGWPVSGKTENLAVANLANAKTYWDEVGCPLFGKTNTWWYILQDADPVTPNPSFGIVGSTLSTTPLFDLSCSASSSSSAAAAASSTAGPSASSVIGGKASGFTTAAANSAKPTFTVGKGPGGSYNGTGFWNSTSSARPSSSAISGSSSGSAAGSSGAGASGASGQSSSSTGSSSAPSTSNILSNAASGLSGSIFGAVVAVCLALAAL

SEQ ID NO: 384 - protein, 460 aa, Aspergillus niger
MQLAQLAAFAMTLATSEAAYQGFNYGNKFSDESSKFQADFEAEFKAAKNLVGTSGFTSARLYTMIQAYSTSDVIEAIPAAIAQDTSLLLGLWASGGGMDNEITALKTAISQYGEELGKLVVGISVGSEDLYRNSVEGAEADAGVGVNPDELVEYIKEVRSVIAGTALADVSIGHVDTWDSWTNSSNSAVVEAVDWLGFDGYPFFQSSMANSIDNAKTLFEESVAKTKAVAGDKEVWITETGWPVSGDSQGDAVASIANAKTFWDEVGCPLFGNVNTWWYILQDASPTTPNPSFGIVGSTLSTTPLFDLSCKNSTTSSSSAVVSAAASSAAGSKAVGSSQASSGAAAWATSASGSAKPTFTVGRPGVNGTVFGNGTYPLRPSGSASARPSAGAISSGSGSSSSGSGSSGSTGTSATSGQSSSSGSSAAAGSSSPAAFSGASTLSGSLFGAVVAVFMTLAAL

SEQ ID NO: 385 - protein, 463 aa, Aspergillus oryzae
MQLTHLLAFALSLATSEAAYKGFNYGATKSDGSVKSQSDFESEFSTAKNLVGTSGFTSARLYTMIQGGTTNSPISAIPAAIAENTSLLLGLWASGGGMDNELAALKSAISQYGDSFAKLVVGISVGSEDLYRASSEGEKVNAGIGIGPDDLVSFIKEVRSIISGTALSSVPIGHVDTWTAWTNGSNSAVIDAVDWLGFDGYPYFQSSMSNSISDAKSLFDDSVAKTKAVAKGKEVWITETGWPVSGSTQNLGVASLANAKTYWDEVGCPLFDETNTWWYILQDANPTTPNPSFGVVGSTLSTTPLFDLSCSNSTRPSASASSSAAGSATPVGSAVPSGSAAVNPSSSGIVSSAVPSTTPGFTVGKGFRPSNSSAAAYYSSASASGSAYPKFTKTASGSSATSTTAGSSSDSSSTNSGKSSSESSSTNSGASASSSILATGGASSVSGSVFGALVAVFAFVATL

SEQ ID NO: 386 - protein, 486 aa, Aspergillus terreus
MQLTQLLALALSLATSEAAYKGFNYGDKKPDGSSKYQADFASEFETAQNLVGAPGFTSARLYTMIQAGTANDPISAIPAAIAQNTSLLLGLWASGNNMNNELTALKAAISQYGEDLSKLVVGISVGSEDLYRNSVLGQKVNAGVGVDPHVLASYIEEVRSTISGTPLSGAPLGHVDTWNDWVNGSNAAVIDAVDWVGFDGYPYFQNTMANSIDDAKALFNEAVAKTKSAAGNKEVWITETGWPVSGKTENLAVASIPNAKRFWDEVGCPLFDNTNTWWYTLQDAFGASVPNPSFGIVGSTLTTQPLFDLSCSKSNTTSSSAIASPTSTAAAAGGVAGGSTGSASGSSTGTGSSSGSGSNSNTGAASGAVGAADRETSGTSGSANTNGTSGSGSGSNSTSGHGSNVTVPTRPTSVSNVSPSKSSSALFTGAATSMGASPSSVGNVGPSKSSGAASPSSTTMFTGAATSVSAPVVHVVLLALMMVIAA

SEQ ID NO: 387 - protein, 465 aa, Emericella nidulans
MFTKTQILALALSIASAEAVSKGFNYGANKPDGTLKVQADFEAEFRTAKNLETTSGFNSARLYTMIQGTGSTPISAIPAAIAEETTLLLGLWASGGNMDNEIAALKAAINQYGDEFAKLVVGISVGSEDLYRNSEIGVQANAGIGIEPEELVSYIQRVREAIAGTALSGAPIGHVDTWNAWTNGSNAAVAEAVDWLGFDGYPFFQNTMQNSIDDAKALFDESVQKTKAVAGNKEVWITETGWPVSGDSQNLAIASVENAKQFWDEVGCPLFDNVNTWWYILQDASGSSVPNPSFGIVGNTLSTTPLFDLSCSASSKKNSSSASASASGSSAQSTGFVSTTKPAASPSGSSGLGHGGSLGSSGSFSGGHYAGVGSSSVIASPSATPSGSAVPGSSSGPGSSSGSASGSSSGFGSGAAADSTSGTSTSGDSTSSTSATPADFTGAGSRLSGSIFGAAMLVAALAVAL

SEQ ID NO: 388 - protein, 450 aa, Neosartorya fischeri
MQFTQLVALALALATSEAAHQGFNYGNTKSDGSAKSQSDFQAEFSTAKNLVGTSGFTSARLYTMIQGGTANTPISAIPAAVAEETSLLLGLWASGGNFANEIAALKTAIADYGDDLAKLVVGISVGSEDLYRNSVDGVKAKAGLGTNPDEIVSYINQVRSTIAGTKLSGAPIGHVDTWTAWVNGSNSAVIDACDWLGFDGYPYFQNTMANSISDAKALFDESVAKTEAVAKGKEVWITETGWPVSGNTENLAVANLANAKTYWDEVGCPLFGKTNTWWYILQDANPVTPNPSFGIVGSTLSTTPLFDLSCSASSSAAASSTAVPSASSVAGAKASGFATAAASSGAAGSAKPTFTVGKGPGGSYNGTGFWNSTSSARPSSTAISGSSSGSASGSSGSSGSGASGASGQSSSSTGSSSAPSSSNILSNAASGLSGSIFGAVVAVCLALAAL

SEQ ID NO: 389 - protein, 353 aa, Aspergillus clavatus
MKSTFGLLALAAAAKMAHAHATVQAIWINGVDQGAGNSASGYIRSPPNNSPLVDVTSADMTCNVNGKNPVAKTLPVKAGDKITFEWHHTDRSPSDDIIASSHRGPIMVYMAPTAKGAAGNGWVKIAEEGYSNGKWAVDNLIANRGKHSIVVPDVPAGDYLFRPEIIALHEGNRLGGAQFYMECVQVKVTSNGANALPAGVSIPGAYKATDPGVHFDIYNSFSSYPMPGPAVWNGASAAGSAPAPTAAPTQKPVVTAAPTTLATLVKPTTTTAAAPAETDSCDGDDDDYETETPAPQASATQAPAPQRPAPQTPSGSVKEWYQCGGINYTGAKNCESGLVCKEWNPYYHQCIKA

SEQ ID NO: 390 - protein, 349 aa, Neosartorya fumigata
MKSTFGLLALAAAAKLVSAHATVHAVWINDVDQGAGNSADGYIRSPPNNSPITDVTSTDMTCNVNGKNPVAKTLSVKAGDKVTFEWHHDTRSDSDDIIASSHMGPVMVYMAPTEKGTAGNGWVKIAEEGYSNGKWAVANLIANRGKHSITVPDVPAGEYLLRPEIIALHEGNRQGGAQFYMECVQVKVTSAGTKTLPAGVSIPGAYKATDPGVLFDMYNSFTSYPIPGPAVWDGSSSGSSGSSGSSPATTTAPAVSVTAVPTKEAPVDTSATPTTFVTATKPATTAAPAAPSASSGSNSGSDSCNSGSASGSVKIYGQCGGQNYSGPTSCEAGLICKEWNPYYHQCVSA

SEQ ID NO: 391 - protein, 367 aa, Aspergillus flavus
MKSSTFGMLALAAAAKLVSAHATVHAVWINDVDQGEGNSESGYIRSPPSNSPITDVTSKDMTCNVNNKATAKTLEVKAGDKITFEWHHDSRSDSDDIIASSHKGPIMVYMAPTEKGTAGNGWVKIAEDGYTDGTWAVDTLIKNRGKHSVTVPDVAAGEYLFRPEIIALHEGNRQGGAQFYMECVQVKVTSSGSKTLPEGVSIPGAYTATDKGILFDIYNSFDSYPFPGPAVWDGASGSSSSPSASASASAPAATSAAPAPSSFTTIAKQPATSSTEAPSTENTSTTSTIVSTTAAASATAPATPSSTSAIASSAASTNSVPQPSSNAGGAVKEWYQCGGLNYKGSTQCEEGLTCKKWNPYYYQCISA

SEQ ID NO: 392 - protein, 349 aa, Neosartorya fumigata
MKSTFGLLALAAAAKLVSAHATVHAVWINDVDQGAGNSADGYIRSPPNNSPITDVTSTDMTCNVNGKNPVAKTLSVKAGDKVTFEWHHDTRSDSDDIIASSHMGPVMVYMAPTEKGTAGNGWVKIAEEGYSNGKWAVANLIANRGKHSITVPDVPAGEYLLRPEIIALHEGNRQGGAQFYMECVQVKVTSAGTKTLPAGVSIPGAYKATDPGVLFDMYNSFTSYPIPGPAVWDGSSSGSSGSSGSSPATTTAPAVSVTAAPTKEAPVDTSATPTTFVTATKPATTAAPAAPSASSGSNSGSDSCNSGSASGSVKIYGQCGGQNYSGPTSCEAGLICKEWNPYYHQCVSA

SEQ ID NO: 393 - protein, 408 aa, Aspergillus kawachii
MKTTTYSLLALAAASKLASAHTTVQAVWINGEDQGLGNTDDGYIRSPPSNSPVTDVTSTDMTCNVNGDQAASKTLSVKAGDVVTFEWHHSDRSDSDDIIASSHKGPVQVYMAPTAKGSNGNNWVKIAEDGYHKSSDEWATDILIANKGKHNITVPDVPAGNYLFRPEIIALHEGNREGGAQFYMECVQFKVTSDGSNELPSGVSIPGVYTATDPGILFDIYNSFDSYPIPGPDVWDGSSSGSSSSGSSSAAVSSAAAAATTSAVAATTPATQAAVEVSSSAAAATTEAAAPVVSSAAPVQQATSAVTSQAQAAPTTFATSSKKSSKTACKNKTKSNSQVAAATSSVVAPAATSSVVPVVSASASASAGGVAKQYERCGGINHTGPTTCESGSVCKKWNPYYYQCVASQ

SEQ ID NO: 394 - protein, 412 aa, Aspergillus niger
MKTTTYSLLALAAASKLASAHTTVQAVWINGEDQGLGNSADGYIRSPPSNSPVTDVTSTDMTCNVNGDQAASKTLSVKAGDVVTFEWHHSDRSDSDDIIASSHKGPVQVYMAPTAKGSNGNNWVKIAEDGYHKSSDEWATDILIANKGKHNITVPDVPAGNYLFRPEIIALHEGNREGGAQFYMECVQFKVTSDGSSELPSGVSIPGVYTATDPGILFDIYNSFDSYPIPGPDVWDGSSSGSSSGSSSAAAAATTSAAVAATTPATQAAVEVSSSAAAVVESTSSAAAATTEAAAPVVSSAAPVQQATSAVTSQAQAPTTFATSSKSSKTACKNKTKSKSKVAASSTEAVVAPAPTSSVVPAVSASASASAGGVAKMYERCGGINHTGPTTCESGSVCKKWNPYYYQCVASQ

SEQ ID NO: 395 - protein, 367 aa, Aspergillus oryzae; identical to SEQ ID NO: 391

SEQ ID NO: 396 - protein, 360 aa, Aspergillus terreus
MKTSFGLLALAAAAKLVNAHATVFAVWINDEDQGLGNTADGYIRSPPNNSPVTDVTSKDMTCNVNGATAAAKTLDVKAGDKITFEWHHNSRDASDDIIASSHLGPVMVYMAPTEKGSAGSGWVKIAEDGYSNGKWAVDTLIANRGKHSITVPDVPAGEYLFRPEIIALHEGNREGGAQLYMECVQVKVTSDGSKTLPEGVSIPGTYTATDPGILFDIYNSFDSYPIPGPAVWDGSSSGSSSGSSKTTAAAPAATSAASASSTKAPATTAAPVQTESAKPATSTTQAAAPTTLVTSAKPTATATAGAGDSGSGSCSATAPATGVVKMYAQCGGMNYSGSTTCESGLTCKQWNPYYHQCVKA

SEQ ID NO: 397 - protein, 357 aa, Emericella nidulans
MKFSSVLALAASAKLVASHATVFAVWINDEDQGLGNTADGYIRTPPNNSPVTDVTSTDLTCNVNGDQAAAKTLEVAAGDKITFEWHHNSRDSSDDIIADSHKGPVLVYMAPTEAGSAGKNWVKIYEDGYNDGTWAVDTLIANKGKHSVTVPDVPAGNYLFRPEIIALHEGNREGGAQLYMECVQFKVTSDGTTQLPEGVSLPGAYTATDEGILFDIYSSFDSYPIPGPAVWDGASSGSGSSGSGSSSSAAATSSAEKTATSTTAAATTTAVATSTSSATQVQPTSVATFTTSVRPTTSAAPTTSAPTSSAAPTGGTGTGSIQIYQQCGGMNYKGATGCASGLTCKQWNPYYHQCVQA

SEQ ID NO: 398 - protein, 348 aa, Neosartorya fischeri
MKSTFGLLALAAAAKLVSAHATVHAVWINDVDQGAGNSADGYIRTPPNNSPITDVTSADMTCNVNGKNSVAKTLSVKAGDKVTFEWHHDSRSASDDIIASSHMGPVMVYMAPTEKGTAGNGWVKIAEEGYSNGKWAVANLIANKGKHSITVPDVPAGEYLLRPEIIALHEGNRQGGAQFYMECVQVKVTSAGTKTLPAGVSIPGAYKATDPGVLFDMYNSFTSYPIPGPAVWDGSSSGSSGSSDSSPATTAPEASVTSAPTKQGSADTSASPTTFVTATKPTTTAAPAAPPASTGSNSGSGSSGSGSASGSVKIYQQCGGKNYSGATSCEAGLTCKEWNPYYHQCLKA

SEQ ID NO: 399 - protein, 634 aa, Neosartorya fumigata
MRGLLLAGALALPASVFAHPAHQSYGLNRRTVDLNAFRLKSLAKYVNATETVIEAPSSFAPFKPQSYVEVATQHVKMIAPDATFRVVDDHYVGDNGVAHVHFRQTANGLDIDNADFNVNVGKDGKVFSYGNSFYTGQIPSSAALTKRDFSDPVTALKGTTNTLQLPITVDSASSESTEEKESYVFKGVSGTVSDPKAKLVYFVKDDGTLALAWRVETDIDSNWLLTYIDAKSGEEIHGVVDYVAEADYQVYAWGINDPTEGERTVIKDPWDSVASEFTWISDGSTNYTTSRGNNGIAQSNPSGGSSYLNNYRPSSSSLSFKYPYSVSSSPPSSYIDASIIQLFYTANIYHDLLYTLGFTEKAGNFEYNTNGQGGLGNDYVILNAQDGSGTNNANFATPPDGQPGRMRMYVWTESTPYRDGSFEAGIVIHEYTHGLSNRLTGGPANSNCLNALESGGMGEGWSDFMATAIRLKPGDKRSTDYTMGEWASNRAGGIRQYPYSTSLSTNPLTYTSVNSLNAVHAIGTVWASMLYEVLWNLIDKHGKNDAPKPTLRDGVPTDGKYLAMKLVMDGMALQPCNPNFVQARDAILDADTALTGGENQCEIWTAFAKRGLGAGAKYSSRNRVGSTEVPSGVC

SEQ ID NO: 400 - protein, 415 aa, Aspergillus clavatus
MLSRLSQTALVALSLMTVLTEAVPSRMRIQTRDSVNYQSEIVRGVNLGGWLVLEPWITPSIFENGGGAAVDEWTLAEVLGKDKARAILSQHWSSFITQDDFNQIAQAGMNHVRIPVGYWAVSAPDEPYVDGQLEFLDNAISWARAAGLKVMIDLHGAPGSQNGFDNSGRKGPIAWQQGDTVARTVDAFKALAERYLPESDVVTAIEAVNEPNIPGGVNEGQLKEYYNQVLEVVHSINPDAGVFLSDGFLATASWNGYANGENVVMDTHHYHMFDNTLISLDINAHVRAACEFGNQIKGSDKPVVVGEWTGALTDCTKHLNGKDIPTRYEGQWANSPRYGDCGNKRQGSSSGLSEQERSDTRRFIEAQLDAYEGKNGWLFWTWKTEGAPGWDMQDLLANGLFPNPPTERQYGNQCA

SEQ ID NO: 401 - protein, 416 aa, Neosartorya fumigata
MIFKFSQKALVALYLVVGLAEAVPSKSRVVSRASTFDYNGIVRGVNIGGWLVLEPWITPSIFDNAGDAAVDEWTLTATLGQDQAKAVLSQHWSTFITQDDFQQIAQAGMNHVRIPIGYWAVSSLPDEPYVDGQLEYLDNAISWAREAGLKVVIDLHGAPGSQNGFDNSGRKGPIAWQQGDTVSQTVDAFRALAERYLPQSDVVTAIEALNEPNIPGGVSEAGLRDYYNQIADVVRQIDPDTSVFLSDGFLSTESWNGFKTGEDVVMDTHHYEMFDNYLISLDIDGHVKSACDFGKQIEGSDKPVVVGEWSGAVTDCTKHLNGKGVSTRYQGEYANNVKYGDCANTTQGSVADLSDQERTDTRRFIEAQLDAYEGKNGWLFWTWKTEGAPGWDMQDLLANGVFPSPLTDRQFPNQCA

SEQ ID NO: 402 - protein, 405 aa, Aspergillus flavus
MLPLLLCIVPYCWSSRLDPRASSFDYNGEKVRGVNLGGWLVLEPWITPSIFDAAGAEAVDEWSLTKILGKEEAEARLSAHWKSFVSAGDFQRMADAGLNHVRIPIGYWALGPLEGDPYVDGQLEYLDKAVEWAGAAGLKVLIDLHGAPGSQNGFDNSGRRGAIQWQQGDTVEQTLDAFDLLAERYLGSDTVAAIEAINEPNIPGGVDQGKLQEYYGSVYGIVNKYNAGTSVVYGDGFLPVESWNGFKTEGSKVVMDTHHYHMFDNGLIAMDIDSHIDAVCQFAHQHLEASDKPVIVGEWTGAVTDCAKYLNGKGNGARYDGSYAADKAIGDCSSLATGFVSKLSDEERSDMRRFIEAQLDAFELKSGWVFWTWKTEGAPGWDMSDLLEAGVFPTSPDDREFPKQC

SEQ ID NO: 403 - protein, 416 aa, Neosartorya fumigata
MIFKFSQKALVALYLVVGLAEAVPSKSRVVSRASTFDYNGIVRGVNIGGWLVLEPWITPSIFDNAGDAAVDEWTLTATLGQDQAKAVLSQHWSTFITQDDFQQIAQAGMNHVRIPIGYWAVSSLPDEPYVDGQLEYLDNAISWAREAGLKVVIDLHGAPGSQNGFDNSGRKGPIAWQQGDTVSQTVDAFRALAERYLPQSDVVTAIEALNEPNIPGGVSEAGLRDYYNQIADVVRQIDPGTSVFLSDGFLSTESWNGFKTGEDVVMDTHHYEMFDNYLISLDIDGHVKSACDFGKQIEGSDKPVVVGEWSGAVTDCTKHLNGKGVSTRYQGEYANNVKYGDCANTTQGSVADLSDQERTDTRRFIEAQLDAYEGKNGWLFWTWKTEGAPGWDMQDLLANGVFPSPLTDRQFPNQCA

SEQ ID NO: 404 - protein, 416 aa, Aspergillus niger
MFVESAKKALLALSLLAASAQAVPRVRRQGASSSFDYKSQIVRGVNLGGWLVTEPWITPSLYDSTGGGAVDEWTLCQILGKDEAQAKLSSHWSSFITQSDFDRMAQAGLNHVRIPIGYWAVAPIDGEPYVSGQIDYLDQAVTWARAAGLKVLVDLHGAPGSQNGFDNSGHRGPIQWQQGDTVNQTMTAFDALARRYAQSDTVTAIEAVNEPNIPGGVNEDGLKNYYYGALADVQRLNPSTTLFMSDGFQPVESWNGFMQGSNVVMDTHHYQVFDTGLLSMSIDDHVKTACSLATQHTMQSDKPVVVGEWTGALTDCAKYLNGVGNAARYDGTYMSTTKYGDCTGKSTGSVADFSADEKANTRRYIEAQLEAYEMKSGWLFWTWKTEGAPGWDMQDLLANQLFPTSPTDRQYPHQCS

SEQ ID NO: 405 - protein, 405 aa, Aspergillus oryzae; identical to SEQ ID NO: 402

SEQ ID NO: 406 - protein, 416 aa, Aspergillus terreus
MLYNLSKAVLALSVLAASADAAGIRLEKRASTFDYETEMVRGVCLGGWLVLEPWLSPGLFDAAPDGAVDEWTYTEILGQDEAKARLIGHWDTFITEQDFFDIAAAGMNHVRIPIGYWAVEALPGDPYVDGQLEYLDRAIEWAGAAGLKVIVDLHGAPGSQNGFDNSGRKGAIQWGQGDTLGQTVNAFRKLAERYVPSSDVVTAIEAVNEPFIPGGVNEDQLKEYYQQAYDIVTQMSPDVDLVFSDGFINPTPWNGFISDSGNIVMDNHHYEVFDINLLRMSVDDHVRSVCDFGRTQLAPATKPVVVGEWTGAMTDCARYLNGRGVGARYDGAMGGESVGDCGPFIQGSVSDLSPDDQKNMRRFIEAQLDAWEMKSGWLFWNWKTEQGAPGWDMKDLLDNGVFPFPLESRKYPGQCG

SEQ ID NO: 407 - protein, 405 aa, Emericella nidulans
MFPRISQAAILAHSLLAVCTSAATLAEKVRGVNLGGWLVLEPWITPSLFDEAGDEAVDEYTLTEVLGVEEAAARLSEHWNTFITEEDFALIAEAGLNYVRIPIGYWAAAPLDGEPYVSGQLEHLDNAVAWARAHNLKVIVDLHGAPGSQNGFDNSGRRGPIGWQQGDTVEQTILAFETLAQRYLADDDTVTMIEALNEPHVPGGINQDQLKDYYEETLARVRKNSPEATLLLHDGFVQTEGWNGFMTGENVMMDTHHYEVFEGGQNAWSIEKHIDAACQLGRQHLQAADKPVIVGEWTGALSDCTRYLNGKGIGIRYDGTLGSNTAVGACGSKSEGSVAGLSADEIANTRRFIEAQLDAFELRNGWVFWTWKTEGAPGWDMQDLLANGVFPQPLTDREFPNQCNF

SEQ ID NO: 408 - protein, 416 aa, Neosartorya fischeri
MIFKFSQKALVALCLVVGLAEAVPSKSRVVSRASTFDYNGIVRGVNIGGWLVLEPWITPSIFDNAGDAAVDEWTLTATLGQDQAKAVLSQHWSTFITQGDFHRIAQAGMNHVRIPIGYWAVSSLPDEPYVDGQLEYLDNAISWARDAGLKVVIDLHGAPGSQNGFDNSGRKGPIAWQQGNTVSQTVDAFRALAERYLPQSDVVAAIEALNEPNIPGGVSEAGLRDYYDQIADVVRQINPDTSVFLSDGFLSTASWNGFKTGEDVVMDTHHYEMFDNYLISLDIHGHVKSACDFGKQIKGSDKPVVVGEWSGAVTDCTKYLNGKGVPTRYQGEYANNPKYGDCGDKTQGSVADLSDQERADTRRFIEAQLDAYEGKNGWLFWTWKTEGAPGWDMQDLLANGVFPSPLTDRQFPNQCA

SEQ ID NO: 409 - protein, 396 aa, Neosartorya fumigata
MIRRLAAFSALSGLATAWLPEVNKKITSTNGTNLFTSSNGKIRGVNLGSQFVFEPWIAEKAWSDMGCGGQKSEFDCVSRLGQANANSAFASHWGSWITQDDIAEMVSYGLNTIRVPVGYWMREDLVYSDSEHFPQGGLQYLENLCEWASDAGLYIIIDLHGAPGAQTPQNPFTGQYAPIAGFYQDYQFERALKFLEWMTTNIHQNDKFRNVGMLEVVNEPVQDAGKVGSMRSSYYPNAFKRIRAAEQSLNIDRNNYLHIQMMDRLWGSGDPNESLTDTYYAAYDDHRYLKWASVAVSKDSYISTSCSDQLNSNTPTIVGEWSLSVPDNVQWNSDWSPDSNKDFYKKWFAAQVTAYERQQGWIFWTWKAQLGDYRWSYQGGLLLTRPGIGDQQVLTL

SEQ ID NO: 410 - protein, 392 aa, Aspergillus flavus
MKVTRLAVLNTLATLTVAWLPTTDKTITSSNGTDLFKASHGKIRGVNLGSQFVFEPWIATKAWSELGCEGQESEFDCVMKLGQDAANKAFAKHWDSWITKEDIKEIRSYGLNTIRIPVGYWMNEDLIYHDSEYFPHGGFAYLEKLCGWASDAGLYIIIDLHGAPGAQVAKNAFTGQFADTPGFYVDFQYQRALEFLEWMTIKVHTLHNFRNVGMLEVVNEPVQNPQVTTTLRSNYYPNAFHSIRKVEGALSIDRKDYLHIQMMDGAWGAGDPHEHLTDDYYAAYDNHRYLKWDPRVEVSKDSYIKTSCNDNVATNWPAIIGEWSLGVPDNVQETADWKPYSNLDFYQKWFAAQVQNYEQHQGWIFWTWKTQLDEYRWSYRGTYLSGFWQTSS

SEQ ID NO: 411 - protein, 396 aa, Neosartorya fumigata
MIRRLAAFSALSGLATAWLPEVNKKITSTNGTNLFTSSNGKIRGVNLGSQFVFEPWIAEKAWSDMGCGGQKSEFDCVSRLGQANANSAFASHWGSWITQDDIAEMVSYGLNTIRVPVGYWMREDLVYSDSEHFPQGGLQYLENLCEWASDAGLYIIIDLHGAPGAQTPQNPFTGQYAPIAGFYQDYQFEGALKFLEWMTTNIHQNDKFRNVGMLEVVNEPVQDAGKVGSMRSSYYPNAFKRIRAAEQSLNIDRNNYLHIQMMDRLWGSGDPNESLTDTYYAAYDDHRYLKWASVAVSKDSYISTSCSDQLNSNTPTIVGEWSLSVPDNVQWNSDWSPDSNKDFYKKWFAAQVTAYERQQGWIFWTWKAQLGDYRWSYQGGLLLTRPGIGDQQVLTL

SEQ ID NO: 412 - protein, 406 aa, Aspergillus oryzae
MKVTRLAVLNTLATLTVAWLPTTDKTITSSNGTDLFKASHGKIRGVNLGSQFVFEPWIATKAWSELGCEGQESEFDCVMKLGQDAANKAFAKHWDSWITKEDIKEIRSYGLNTIRIPVGYWMNEDLIYHDSEYFPHGGFAYLEKLCGWASDAGLYIIIDLHGAPGAQVAKNAFTGQFADTPGFYVDFQYQRALEFLEWMTIKVHTLHNFRNVGMLEVVNEPVQNPQVTTTLRSNYYPNAFHSIRKVEGALSIDRKDYLHIQMMDGAWGAGDPHEHLTDDYYAAYDNHRYLKWDPRVEVSKDSYIKTSCNDNVATNWPAIIGEWSLGVPDNVQETADWKPYSNLDFYQKWFAAQVQNYEQHQGWIFWTWKTQLDEYRWSYRDGVKAGVIPTDLNAVFREDVCKGRSS

SEQ ID NO: 413 - protein, 404 aa, Aspergillus terreus
MTTYQTLFLIPLAISTLVTAWLPETDKTITSRNGTNLFASSKGKIRGVNMGSQFVFEPWIAEKAWSSMGCKGQKSEFDCVVSLGQDAANKAFAQHWGSWITQDDITEIQSYTLNTIRVPIGYWMKEDLVNKTSEHFPQGGFAYLEKLCGWASDAGLYIILDLHGAPGAQTPHNPFTGQYASTAGFYNDYQFGRALEFLEWITTKVHQSDSFRNVGMLEIVNEPLQNAQKVGSMRSTYYPDAFKRIRAAEQKLNVSKSGYLHIQMMDKLWGSGDPEEYLTDKYYVAYDDHRYLKWDPKVNVSKENYISTSCSDELDSNTPTIVGEWSLSVPDDVASTPDWDMDTNKDFYKKWFAAQITAYEKQRGWVFWTWKTQLGGYRWSYKDAVAAGVVPEDIDSALNMGVCN

SEQ ID NO: 414 - protein, 409 aa, Emericella nidulans
MKFILPLFTSLPVALAWLPGIDKDIYSAAGTNIFNVTSASSKRWLPASKKIRGVNLGSHFVIEPWMASMAWSNMGCSGQRSEFDCVMALGQETADQAFADHWGSWITQDDINQMVQYGLNTIRIPVGYWLKEDLVYADSEHFPKGGIGYLEDVCGWASDAGMYIIIDLHGAPGAQQPKQPFTGQYAPNPGFYQDYQYDRALEFLEWMTTSIHQNNKFRNVGMLEIVNEPVQNADQASSMINSYYPSAFTRIRNTESSLGITSNNYLHIQMMNEKWGSGDPTQSLTDNYFAAYDDHRYVKWDSSVAVDKESYISASCVDDRGGNWPTIVGEWSLSVPDNVEHTADWEPSSNTDFYARWFAAQAIAYEKQEGWVFWSWKAQLGDYRWSYKDAVDAGVIPKDLDSIYDYSPC

SEQ ID NO: 415 - protein, 400 aa, Neosartorya fischeri
MIRRLAALSALSGLATAWLPEVNKKITSTNGTNLFSSSNGKIRGVNLGSQFVFEPWIAEKAWSDMGCGGQKSEFDCVSSLGQAKANGAFASHWGSWITQDDLAEMVSYGLNTIRVPVGYWMREDLVYSDSEHFPQGGLQYLENLCGWASDAGLYIIIDLHGAPGAQTPQNPFTGQYAPTAGFYQDYQFERALKFLEWMTTNIHQNDKFRNVGMLEVVNEPVQDAGKVGSMRSTYYPNAFKRIRAAEQSLNIDRNNYLHIQMMDRLWGSGDPNESLTDTYYAAYDDHRYLKWAGVAVSKDSYISTSCSDQLNSNTPTIVGEWSLSVPDSVQWNSDWAPDSNKDFYKKWFAAQVTAYEKQQGWIFWTWKAQLGDYRWSYQDAVAAGVIPTDLNSLAGLKVCG

SEQ ID NO: 416 - protein, 281 aa, Aspergillus awamori
MKQFSAKHALAVVVTAGHALAASTQGISEDLYTRLVEMATISQAAYADLCNIPSTIIKGEKIYNSQTDINGWILRDDSSKEIITVFRGTGSDTNLQLDTNYTLTPFDTLPQCNGCEVHGGYYIGWVSVQDQVESLVKQQVSQYPDYALTVTGHSLGASLAALTAAQLSATYDNIRLYTFGEPRSGNQAFASYMNDAFQASSPDTTQYFRVTHANDGIPNLPPVEQGYAHGGVEYWSVDPYSAQNTFVCTGDEVQCCEAQGGQGVNNAHTTYFGMTSGACTW

SEQ ID NO: 417 - protein, 281 aa, Aspergillus flavus
MKNFVSMHAILLACSAGAGLAAITQGISEGTYSRIVEMATISQAAYANLCNIPSTITSAGKIYNAETDINGWVLRDDSRQEIITVFRGTGSDTNLQLDTNYTQAPFDTLPQCSGCAVHGGYYVGWISVKDQVEGLVQQQASQYPDYSLVITGHSLGASMAAITAAQLSATYNNITVYTFGEPRTGNQAYASYVDETFQATNPDATKFYRVTHTNDGIPNLPPTSQGYVHHGTEYWSVEPHGPQNMYLCLGDEVQCCEAQGGQGVNDAHVTYFGMASGACTW

SEQ ID NO: 418 - protein, 281 aa, Aspergillus niger
MKQFSAKYALILLATAGQALAASTQGISEDLYNRLVEMATISQAAYADLCNIPSTIIKGEKIYNAQTDINGWILRDDTSKEIITVFRGTGSDTNLQLDTNYTLTPFDTLPQCNDCEVHGGYYIGWISVQDQVESLVKQQASQYPDYALTVTGHSLGASMAALTAAQLSATYDNVRLYTFGEPRSGNQAFASYMNDAFQVSSPETTQYFRVTHSNDGIPNLPPAEQGYAHGGVEYWSVDPYSAQNTFVCTGDEVQCCEAQGGQGVNDAHTTYFGMTSGACTW

SEQ ID NO: 419 - protein, 281 aa, Aspergillus niger
MKQFSAKYALILLATAGQALAASTQGISEDLYNRLVEMATISQAAYADLCNIPSTIIKGEKIYNAQTDINGWILRDDTSKEIITVFRGTGSDTNLQLDTNYTLTPFDTLPQCNDCEVHGGYYIGWISVQDQVESLVKQQASQYPDYALTVTGHSLGASMAALTAAQLSATYDNVRLYTFGEPRSGNQAFASYMNDAFQVSSPETTQYFRVTHSNDGIPNLPPADEGYAHGGVEYWSVDPYSAQNTFVCTGDEVQCCEAQGGQGVNDAHTTYFGMTSGACTW

SEQ ID NO: 420 - protein, 281 aa, Aspergillus oryzae
MKNFFSMHAILLACSAGAGLAAITQGISEGTYSRIVEMATISQAAYANLCNIPPAITSAGKIYNAETDINGWVLRDDSRQEIITVFRGTGSDTNLQLDTNYTQAPFDTLPQCSGCAVHGGYYVGWVSVKDQVEGLIHQQASQYPDYSLVVTGHSLGASMAAITAAQLSATYNNITVYTFGEPRTGNQAYASYVDETFQATNPDATKFYRVTHTNDGIPNLPPTSQGYVHHGTEYWSVEPHGPQNMYLCLGDEVQCCEAQGGQGVNDAHVTYFGMASGACTW

SEQ ID NO: 421 - protein, 281 aa, Aspergillus terreus
MKQFSAKFALALSAAAGQALAASTQGISEDLYNRLVEMATISQAAYANMCNIPSTITVGEKIYNAQTDINGWVLRDDSTKEIITVFRGTGSDTNLQLDTNYTLTPFSTFSECSGCEVHGGYFIGWSSVQDQVMSLVKEQADQYPDYTLTVTGHSLGASMATLAAAQLSGTYDNITLYTFGEPRSGNEAFASYMNDKFTATSADTTKYFRVTHSNDGIPNLPPAEQGYVHGGVEYWSVDPYSAQNTYVCTGDEVQCCEAQGGQGVNDAHTTYFGMTSGACTW

SEQ ID NO: 422 - protein, 280 aa, Aspergillus tubingensis
MKQFSAKYAIAVVVTAGHALAASTQGISEDLYSRLVEMATISQAAYADLCNIPSTIIKGEKIYNSQTDINGWILRDDSSKEIITVFRGTGSDTNLQLDTNYTLTPFDTLPQCNSCEVHGGYYIGWISVQDQVESLVQQQVSQFPDYALTVTGHSLGASLAALTAAQLSATYDNIRLYTFGEPRSNQAFASYMNDAFQASSPDTTQYFRVTHANDGIPNLPPADEGYAHGVVEYWSVDPYSAQNTFVCTGDEVQCCEAQGGQGVNNAHTTYFGMTSGHCTW

SEQ ID NO: 423 - protein, 528 aa, Neosartorya fumigata
MMWWFLLIGLASAAATASSASSASFESRCQHFHKEIHLQNVHVLSTTYVPIGSNIPMVYNPPICGGTASSSISTIQFCQVALNVTTSDKSQFFMEAWLPSNYTGRFLSTGNGGLNGCVSYADMVYATQYGFATIGTNNGHFGDTGQYFLNNPEVIEDFAYRALHTGTVVGKALTKLFYPQGYKNSYYLGCSTGGRQGWKSIQRFPDDFDGVVAGAPAINFVNLCSWGSRFLKITGPPGSETFVTSAQWSAVHNEILRQCDALDGAVDGIIEDTDLCQPVFETLLCNSTAVDKTSCLTGVQANTVNEVFSAMYGLDGKWLYPRMQPGSELAASFIYYSGNGFKYSDDWYKYVVYNDSNWDHSTWTLADAAAAAAQDPFQISSFDGNISGFQKAGGKVLHYHGLEDAIITSDSSKAYYKHVADTMGLSPSELDHFYRLFPISGMGHCSPGTGAASIGQGSSTYAGDDPQDNVLMAIVQWVEKGIAPEYVRGSKMSRDGTIDYRRKHCKYPKRNRYVGPGKYTDENAWKCV

SEQ ID NO: 424 - protein, 526 aa, Aspergillus flavus
MPSLRRLLPFLAAGSAALASQDTFQGKCTGFADKINLPDVRVNFVNYVPGGTNLSLPDNPTSCGTTSQVVSEDVCRIAMAVATSNSSEITLEAWLPQNYTGRFLSTGNGGLSGCIQYYDLAYTSGLGFATVGANSGHNGTSGEPFYHHPEVLEDFVHRSVHTGVVVGKQLTKLFYEEGFKKSYYLGCSTGGRQGFKSVQKYPNDFDGVVAGAPAFNMINLMSWSAHFYSITGPVGSDTYLSPDLWNITHKEILRQCDGIDGAEDGIIEDPSLCSPVLEAIICKPGQNTTECLTGKQAHTVREIFSPLYGVNGTLLYPRMQPGSEVMASSIMYNGQPFQYSADWYRYVVYENPNWDATKFSVRDAAVALKQNPFNLQTWDADISSFRKAGGKVLTYHGLMDQLISSENSKLYYARVAETMNVPPEELDEFYRFFQISGMAHCSGGDGAYGIGNQLVTYNDANPENNVLMAMVQWVEKGIAPETIRGAKFTNGTGSAVEYTRKHCRYPRRNVYKGPGNYTDENAWQCV

SEQ ID NO: 425 - protein, 528 aa, Neosartorya fumigata
MMWWFLLIGLASAAATASSASSASFESRCQHFHKEIHLQNVHVLSTTYVPIGSNIPMVYNPPICGGTASSSISTIQFCQVALNVTTSDKSQFFMEAWLPSNYTGRFLSTGNGGLNGCVSYADMVYATQYGFATIGTNNGHFGDTGQYFLNNPEVIEDFAYRALHTGTVVGKALTKLFYPQGYKNSYYLGCSTGGRQGWKSIQRFPDDFDGVVAGAPAINFVNLCSWGSRFLKITGPPGSETFVTSAQWSAVHNEILRQCDALDGAVDGIIEDTDLCQPVFETLLCNSTAVDKTSCLTGVQANTVNEVFSAMYGLDGKWLYPRMQPGSELAASFIYYSGNGFKYSDDWYKYVVYNDSNWGHSTWTLADAAAAAAQDPFQISSFDGNISGFQKAGGKVLHYHGLEDAIITSDSSKAYYKHVADTMGLSPSELDHFYRLFPISGMGHCSPGTGAASIGQGSSTYAGDDPQDNVLMAIVQWVEKGIAPEYVRGSKMSRDGTIDYRRKHCKYPKRNRYVGPGKYTDENAWKCV

SEQ ID NO: 426 - protein, 540 aa, Aspergillus oryzae
MLVMQLLLPFLASTAAAAAAIDSTSSSNGSDHHGSSFQAECESFKAKINVTNANVHSVTYVPAGVNISMADNPSICGGDEDPITSTFAFCRIALNVTTSSKSQIFMEAWLPSNYSGRFLSTGNGGLGGCVKYDDMAYAAGYGFATVGTNNGHFGNNGVSFYQNTEVVEDFAYRALHTGVVVGKELTKNFYPQGYNKSYYLGCSTGGRQGWKSVQTFPDDFDGVVAGAPAFNFINLTSWGARFLTLTGDSSAETFVTETQWTAVHNEIIRQCDSLDGAKDGIIEDPDLCQPIIEALLCNATQSSTSGTCLTGAQVKTVNGVFSATYGLNGSFLYPRMQPGSELAAYSSYYSGTPFAYAEDWYRYVVFNNTNWDVATWTVQDAAIANAQDPYQISTWNGDLSPFQKKGGKVLHYHGMEDAIISSESSKVYYKHVADTMNLSPSELDSFYRFFPISGMAHCANADGPSAIGQGTGTFAGNNPQDNVLLAMVQWVEEGVAPDFVRGAKLNGSTVEYRRKHCKYPKRNRYVGPGSYTDENAWECV

SEQ ID NO: 427 - protein, 529 aa, Aspergillus terreus
MKISYFFVASLSYVSVARASQSFEERCTDFRDSINSLPNVQATIVEYVAGSQNVSLPDNDPSCNQSSQFVTADICRAAMVVKTSNSSQIVMEAWFPRNYTGRFLATGNGGFGGCIRYPELDYTTRLGFAAVATNNGHNGTSAEAFLNSPEVLRDFADRSIHTAAKVGKELTKRFYAEGFRKSYYLGCSTGGRQGFKSVQQYPHDFDGVVAGAPAVHEVNLISWAGHIYEITGNKSEETYLPPALWNIVHSEVMRQCDGLDGAQDNLIEDPDLCHPTFENIMCPSDNKSNNGSLSCITEAQANTVIQLMSPYYNTDGSMLFPGMQPGSETVSSALLYTGVPTPYAKEWFRYVVYNDTNWDPTTFNIKDAQAALKQNPFNIQTWEGDLSRFQNAGGKIITYHGMQDFLVSSFNSREYYKHVHETMGLAPDQLDEFYRYFRISGMAHCYYGDGASYIGGSAPSAYSDDPEDNVLMAMVEWVEKGIAPEFIRGTKLDQDGHPQYTRKHCRYPRRNVYRGPGSYLDENAWECVL

SEQ ID NO: 428 - protein, 525 aa, Neosartorya fischeri
MMRWFLLIGLASAAATDSSASFESRCQHFHKEIHLQNVHVHSTTYVPIGSNISMAYNPPICGGTSSSSISTIEFCQVALNVTTSDKSQFFMEAWLPSNYTGRFLSTGNGGLNGCVGYGDMIYASQYGFATIGTNNGHFGDTGQYFLNNPEVIEDFAYRALHTGTVVGKALTKLFYPQGYKNSYYLGCSTGGRQGWKSIQRFPDDFDGVVAGAPAFNFVNLCNWGSRFLKITGPPDSDTFVTSAQWSIIHNEIIRQCDALDGAVDGTIEDTDLCQPIFETLICNSTAVNKTSCLTGVQANTVNEVFSAMYGLDGKWLYPRMQPGSELAASFIYYSGNGFKYSDDWFKYVVYNDSNWDHSTWTLADAAAADAQDPFQISTFDGDISGFQKAGGKVLHYHGLEDAIITSDSSKAYYKHVADTMGLSPSDLDQFYRFFPISGMGHCSPGTGAASIGQGSSTYAGDDPQDNVLMAMVQWVEKGIAPEYVRGSKKSIDGQTEYRRKHCKYPKRNRYVGPGKYTDENAWKCV

SEQ ID NO: 429 - protein, 526 aa, Neosartorya fumigata
MTKLSLLPLLTLASAVLAKQDAFQAKCASFGRKIKLPNVHVNFVEYVPGGTNLTLPDNDVTCGASSQVVSADMCRVAMAVDTSKSSQITLEAWFPREYTGRFLSTGNGGLSGCIQYYDLAYTAGLGFATVGANNGHNGTSGKPFYQHPEVIEDFAYRSIHTGVVVGKQLTKMFYKEGFDKSYYLGCSTGGRQGFKSIQKYPNDFDGVVAGAPAFNFVNLISWSIHFYSITGSNTSDTYLSPESWKVVHDEIVRQCDEIDGAKDGIIEDTDLCQPVIETIICKPGASDKTNCITGAQAKTVRNVLSPFYGVNGTLLYPRMQPGSELFASSVVYNGQPFRYSTDWYRYVVYNNPDWDATKWTVEDAAVALAQNPYNIQTWDADISSFQKAGGKVLTYHGMQDQLISSDNSKLYYARVAEEMGLGPEELDDFYRFFPVSGMAHCTGGDGAYGIGNGLRTYNGAEPENNVLMAMVQWVEKGIAPEFIRGAKFSNGVGSSVEYTRKHCRYPRRNVYKGPGNYSDENAWECV

SEQ ID NO: 430 - protein, 521 aa, Aspergillus flavus
MKVSLWLTLLGVNLSLALAVGTDFPASCQAFSPDTRAANAHREFTEYVPAGTNLSLPYNDATCARPNQVVTVDLCRVALYVETSNRSSVTTEIWLPRNWTGRFLGTGNGGIDGCIKYEDLAYGAANGFAVVGSNNGHNGTTAASFYQNSDVLADFAWRALHLSTVIGKEITQAFYGEPHRKSYYLGCSLGGRQGINSAVEFPDDFDGIIAGSPAVDFNSLVSWRASFFPITGSANSTDFISVSTWKDLIHAEVLTQCDTLDCVNDGIIEDPSLCNFCPEALKCTDDRINNCLSPAQVEIVRKVFSPMYGEDGQLIFPAMQPGSELEAADQLYTGKPFRYSKEWFQYVVYNPSWDPAEFDIHDAKVADDLNPQNIRTWPNDLSNYEKRGGKIITFHGQQDGKITSFNTERFYNHLATAMNMSSSELDNFFRFFRISGMSHCSSGPGAWAFGQGGSPAPAMTPFNGNENILAALVAWVEHGVAPETITGTKYVDDNPELGISIRRSHCRFVIQLNHGRHELCY

SEQ ID NO: 431 - protein, 526 aa, Neosartorya fumigata
MTKLSLLPLLTLASAVLAKQDAFQAKCASFGRKIKLPNVHVNFVEYVPGGTNLTLPDNDVTCGASSQVVSADMCRVAMAVDTSKSSQITLEAWFPREYTGRFLSTGNGGLSGCIQYYDLAYTAGLGFATVGANNGHNGTSGKPFYQHPEVIEDFAYRSIHTGVVVGKQLTKMFYKEGFDKSYYLGCSTGGRQGFKSIQKYPNDFDGVVAGAPAFNFVNLISWSIHFYSITGSNTSDTYLSPESWKVVHDEIVRQCDEIDGAKDGIIEDTDLCQPVIETIICKPGASDKTNCITGAQAKTVRNVLSPFYGVNGNLLYPRMQPGSELFASSVVYNGQPFRYSTDWYRYVVYNNPDWDATKWTVEDAAVALAQNPYNIQTWDADISSFQKAGGKVLTYHGMQDQLISSDNSKLYYARVAEEMGLGPEELDDFYRFFPVSGMAHCTGGDGAYGIGNGLRTYNGAEPENNVLMAMVQWVEKGIAPEFIRGAKFSNGVGSSVEYTRKHCRYPRRNVYKGPGNYSDENAWECV

SEQ ID NO: 432 - protein, 526 aa, Aspergillus oryzae
MPSLRRLLPFLAAGSAALASQDTFQGKCTGFADKINLPNVRVNFVNYVPGGTNLSLPDNPTSCGTTSQVVSEDVCRIAMAVATSNSSEITLEAWLPQNYTGRFLSTGNGGLSGCIQYYDLAYTSGLGFATVGANSGHNGTSGEPFYHHPEVLEDFVHRSVHTGVVVGKQLTKLFYEEGFKKSYYLGCSTGGRQGFKSVQKYPNDFDGVVAGAPAFNMINLMSWSAHFYSITGPVGSDTYLSPDLWNITHKEILRQCDGIDGAEDGIIEDPSLCSPVLEAIICKPGQNTTECLTGKQAHTVREIFSPLYGVNGTLLYPRMQPGSEVMASSIMYNGQPFQYSADWYRYVVYENPNWDATKFSVRDAAVALKQNPFNLQTWDADISSFRKAGGKVLTYHGLMDQLISSENSKLYYARVAETMNVPPEELDEFYRFFQISGMAHCSGGDGAYGIGNQLVTYNDANPENNVLMAMVQWVEKGIAPETIRGAKFTNGTGSAVEYTRKHCRYPRRNVYKGPGNYTDENAWQCV

SEQ ID NO: 433 - protein, 527 aa, Aspergillus terreus
MAPIHYLLPIITLGSAALARQDAFEAKCHSFANKIHLPNVHVNFASYVPGGTNLTLADNPSSCGATSQSVSADVCRVAMAVATSNSSEITLEAWFPRNYTGRFLSTGNGGLSGCIQYYDMAYTTGFGFATVGANNGHNGTSGEPFYHHPEVLEDFAYRSIHTGVVIGKKLTKMFYEEGFNKSYYLGCSTGGRQGFKSVQKYPNDFDGVVAGAPAFNFANLISWSAHFYPITGPPGSDTYLSPAMWKVAHDEIIRQCDQIDGAKDGIIEDPSLCNPIMETIICKPGASSDNCLSAAQAKTVREVLYPLYGVNGTLLYPRMQPGSEVLAAPIMYNGQPFAYSTDWYRYVVYNDPNWNGTTFDVQDAAAALAQNPYNIQTWDADLTPFRKSGGKVLTYHGLQDQLISSENSKLYYARVAETMGMPPEELDEFYRFFQISGMGHCGGGDGAYGIGNGLATYSGKDPENNVLMAMVQWVEKGIAPETVRGAKFANGPGSTVEYSRKHCRYPRRNVFKGPGNYTDENAWECVV

SEQ ID NO: 434 - protein, 526 aa, Neosartorya fischeri
MTKLSLLPLLALASAVLAKQDAFQAKCASFGHRIKLPNVHVNFVEYVPGGTNLTLPDNHVTCGASSQIVSADMCRVAMAVDTSKSSQITLEAWFPRNYTGRFLSTGNGGLSGCIQYYDLAYTAGLGFATVGANNGHNGTSGKPFYQHPEVIEDFAYRSIHTGVVVGKQLIKMFYSEGFDKSYYLGCSTGGRQGFKSIQKYPNDFDGVVAGAPAFNFVNLISWSIHFYSITGSNTSDTYLSPASWKVVHDEIVRQCDGIDGAKDGIIEDTDLCHPILETIICKPGASSTTNCITGTQAKTVRNVLSPFYGVNGTLLYPRMQPGSELFASSIMYNGQPFSYSTDWYRYVVYNNPNWDATKWTVEDAAVALAQNPYNIQTWDADISSFQKAGGKVLTYHGIQDQLISSDNSKLYYARVAETMGLGPEELDDFYRFFPVSGMAHCSGGDGAYGIGNGLRTYNGAEPENNVLMAMVQWVEKGVAPEFIRGAKFSNGVGSPVEYTRKHCKYPRRNVYKGPGNYSDENAWECV

SEQ ID NO: 435 - protein, 526 aa, Aspergillus clavatus
MARLSLLTLLALGSAALAKKDTFQTKCAALQHKVKLPNVHVNFVEYVPGGTNLDLPDNAPSCGASSQAVSTDMCRIAMAVDTSDSSQITLEAWFPRDYTGRFLSTGNGGLSGCIQYYDLAYAAGLGFATVGANNGHNGTSGEPFYQHPEVVEDFAHRSVHTGVVVGKQLTKLFYDKGFKKSYYLGCSTGGRQGFKSVQKYPKDFDGIVAGAPAFNFVNLISWSAYFYSLTGSNTSESYLSPAMWKIAHDEIVRQCDELDGAKDGIIEDTDLCHPRLETIICKPGAKDTANCLTGAQAKTVRDVLSPMYGVNGTLLYPRMQPGSEVYAAGIMYNGEPFQYSTDWYRYVVYNNPDWDDTKWSVEDAAAALAQNPYDIQTFDADISSFRGAGGKVLTYHGLQDQMISSDNSKLYYARVAETMKLPPSELDEFYRFFPVSGMTHCAGGDGAYGIGNGLGSYNGVDPENNVLMAMVQWVEKGIAPEFIRGAKFAEGPGSAVEYTRKHCRYPRRNVYKGPGNYTDENAWECV

SEQ ID NO: 436 - protein, 521 aa, Aspergillus niger
MKVSSLLSVALPGAALAATDSFQSRCNEFQNKIDIANVTVRSVAYVAAGQNISQAEVASVCKASVQASVDLCRVTMNISTSDRSHLWAEAWLPRNYTGRFVSTGNGGLAGCVQETDLNFAANFGFATVGTNGGHDGDTAKYFLNNSEVLADFAYRSVHEGTVVGKQLTQLFYDEGYNYSYYLGCSTGGRQGYQQVQRFPDDYDGVIAGSAAMNFINLISWGAFLWKATGLADDPDFISADLWSVIHQEIVRQCDLVDGALDGIIEDPDFCAPVIERLICDGTTNGTSCITGAQAAKVNRALSDFYGPDGTVYYPRLNYGGEADSAYLYFTGSMYSRTEEWYKYVVYNDTNWNSSQWTLESAKLALEQNPFNIQAFDPNITAFRDRGGKLLSYHGTQDPIISSTDSKLYYRRVANALNAAPSELDEFYRFFQISGMGHCGDGTGASYIGQGYGTYTSKAPQVNLLRTMVDWVENGKAPEYMPGNKLNANGSIEYMRKHCRYPKHNVHTGPGNYTDPNSWTCV

SEQ ID NO: 437 - protein, 521 aa, Aspergillus niger
MKVASLLSLALPGAALAATDPFQSRCNEFQNKIDIANVTVRSVAYVAAGQNISQAEVASVCKASVQASVDLCRVTMNISTSDRSHLWAEAWLPRNYTGRFVSTGNGGLAGCVQETDLNFAANFGFATVGTNGGHDGDTAKYFLNNSEVLADFAYRSVHEGTVVGKQLTQLFYDEGYNYSYYLGCSTGGRQGYQQVQRFPDDYDGVIAGSAAMNFINLISWGAFLWKATGLADDPDFISANLWSVIHQEIVRQCDLVDGALDGIIEDPDFCAPVIERLICDGTTNGTSCITGAQAAKVNRALSDFYGPDGTVYYPRLNYGGEADSASLYFTGSMYSRTEEWYKYVVYNDTNWNSSQWTLESAKLALEQNPFNIQAFDPNITAFRDRGGKLLSYHGTQDPIISSTDSKLYYRRVANALNAAPSELDEFYRFFQISGMGHCGDGTGASYIGQGYGTYTSKAPQVNLLRTMVDWVENGKAPEYMPGNKLNANGSIEYMRKHCRYPKHNIHTGPGNYTDPNSWTCV

SEQ ID NO: 438 - protein, 527 aa, Emericella nidulans
MALLRHLLPVLTVGSAVQSAVLVQDQFQTRCENFAGKIDLPNVKVNFASYIPGSTNLTLDNVPTCDQSQVVSSDICRVAMAVTTSNASEITLEAWFPRDYTGRFLSTGNGGLGGCIQYSDLDYASRLGFATVGANNGHNGTSGEPFYKAPEVLEDFVYRSVHTGIVVGKQLTKLFYDEGFDTSYYLGCSTGGRQGFKLAQDFPGEVDGIIAGAPAINFVGLLSWSAHFYPITGPVGSATYLSLDDWDLVHEEILRQCDGLDGAEDGIIEDPDLCHPNATTLLCSPGATSGSCLTATQVNTVHEVYAPLLSSNSTLIYPRMQPGGEQFAAPAMYNGQPFQYSKDWWRYVVYSDPTWNATKWTIRDAEAALRQNPYNIQTWNADLSPLRDSGSKLLTYHGLQDQLISSDDSKLYYHRLMKTMGVTSNQLDEFYRFFQISGMAHCQDGDGAYGIGNRAETEFSTEPEDNVLMAMVRWVEEGIAPETVRGAKFSDGVGSEVEYYRKHCRYPRRNVYKGPGDYTDETAWECV

SEQ ID NO: 439 - protein, 272 aa, Aspergillus clavatus
MLPTILYSAILALSALTPSALAETRSSGCGKHPSLANGVIHLNGREYILKLPDRYDNNHAYHLVFGLHWRGGNMQNVANGESIQPWYGLETRAQGSTIFIAPNGKNAGWANNGGEDVAFIDAIIKQVEADLCVDQSSRFATGFSWGGGMSYSLACSRAKQFKAVSVLSGGVISGCDGGHDPIAYLGIHGINDGVLPFNGGVGLAQKFVQNNGCQQANIGAPPSGSKSSVRTDFKGCSKPVSFIAYDGGHDSAPLGVGSSLAPDATWKFFMAA

SEQ ID NO: 440 - protein, 272 aa, Aspergillus clavatus
MVHSILLYTFLALSVFLSPVFAEARSPGCGKLPNLSNGVHKINGREYTLKVPSNYDKNKAYHLVFGLHWRGGNMGAVVKGEGVQPWYGLEKRAHGSAIFVAPNGKSAGWANTGGQDIAFLDAIIKEVESNYCVDQSSRFATGFSWGGGMSYALACSRAKQFKAVSVLSGGLISGCSGGNDPIAYLAIHGIKDNVLPFNGGISLANRFVKNNRCHQSEIHTPKSGSRSSVRTDFRGCSKPVSFIAYDGGHDAAPLGVGSSLAPDATWKFFMAA

SEQ ID NO: 441 - protein, 272 aa, Neosartorya fumigata
MVPTIIYSAILALSAFTPSVFAQTRSSGCGKQPSLANGVHNINGREYILKVPDNYDKNKAHHLVFGLHWRGGNMWNIVDGQSIQPWYGLETRAQGSAIFVAPNGKNAGWANYGGEDIAFIDAIIKQVESDLCVDQSSRFATGFSWGGGMSYSLACSRAKQFKAVSVLSGGVISGCDGGNDPIAYLGIHGINDGVLPFQGGVNLAQKFVRNNGCQQSNVGTPQPGSRGSVRTDFKGCSKPVSFIAYDGGHDAAPLGVGSSLAPDATWRFFMAA

SEQ ID NO: 442 - protein, 270 aa, Aspergillus flavus
MIKSIILQAIMVLSTLTSVHGANSSGCGKQPTLVNGVHKINDREYILKVPDNYNANKPHHLIFGLHWRGGNMNSVVNGESVEPWYGLETRAQGSAILVAPNGRNAGWANTNGEDVALIDAIIKQVEDDLCIDQSSRFATGFSWGGGMSYALACARAKEFRAVSVLSGGVISGCEGGHDPIAYLGIHGISDPVLPFDGGVTLANKFAANNGCQQAYVGKPGLGSHSSVQTDFKGCSRPVSFIAYDGGHDAAPLGVGNPLAPDATWKFFMAA

SEQ ID NO: 443 - protein, 272 aa, Neosartorya fumigata; identical to SEQ ID NO: 441

SEQ ID NO: 444 - protein, 270 aa, Aspergillus niger
MTRSIFIHTLLALSALTSVHGANSPGCGKNPTLANGVHQINGREYTLKIPDDYDANNPYHLIFGLHWRGGNMDNVVSGDSIQPWYGLESRAQGSAIFIAPNGLNAGWANTNGEDVAFIDAIMEQVESDLCVDQSSRFATGFSWGGGMSYSLACSRAKEFRAVSVLSGGVISGCDGGNDPIAYLGIHGINDPVLPFDGGVELAERFVGNNGCQPASIEKPQSGSNGWKRTDFYGCSKPVSFIAYDGGHDGAPLGVQSSLAPDATWEFFMAA

SEQ ID NO: 445 - protein, 270 aa, Aspergillus oryzae
MIKSIILQAIMVLSTLTSVHGANSSGCGKQPTLVNGVHKINDREYILKVPDNYNANKPHHLIFGLHWRGGNMNSVVNGESVEPWYGLETRAQGSAILVAPNGRNAGWANINGEDVALIDAIIKQVEDDLCIDQSSRFATGFSWGGGMSYALACARAKEFRAVSVLSGGVISGCEGGHDPIAYLGIHGISDPVLPFDGGVTLANKFAANNGCQQTYVGKPGLGSHSSVQTDFKGCSRPVSFIAYDGGHDAAPLGVGNPLAPDATWKFFMAA

SEQ ID NO: 446 - protein, 270 aa, Aspergillus terreus
MAILSRLLTTVTLGSLLTSAVAQSSGCGKQPTLTNGVQNINGREYILNIPEGYDSSKQYKLIFGLHWLGGSMNDVVSGNSIEPWYGLESRAEGSAIFVAPNGLNAGWANNGGEDTALMDAIIEAVEADLCIDQSSRFATGFSFGGGMSYALACARASKFRAVSVLSGGVISGCDGGNDPIAYLGIHGINDPVLPIDGGIEMANKFVQNNGCQSADVGRPNSGSGQSVRTDFQGCSRPVSFIAYDGGHEGAPLGVGNPLAPDATWEFFTGA

SEQ ID NO: 447 - protein, 270 aa, Emericella nidulans
MLRAVLLPTLLAFGAFTPVHGANSPGCGKQPTLTNGVNQINGREYVLKIPDGYDPSKPHHLIFGLHWRGGNMYNVVNGDSIQPWYGLEARAQGSAIFVAPNGLNAGWANTNGEDVAFIDAIMEQVEDDLCVDQASRFATGFSWGGGMSYALACARAAEFRAVSVLSGGLISGCDGGNDPIAYLGIHGINDPVLPLDGGVTLANTFVSNNGCQPTDIGQPASGSGGSVRTDFSGCSHPVSFIAYDGGHDGAPLGVGSSLAPDATWEFFMAA

SEQ ID NO: 448 - protein, 272 aa, Neosartorya fischeri
MVPTMIYSAILALSAFTPSVLAQTRSSGCGKQPSLTNGVHNINGREYILKVPDNYDKNKAHHLVFGLHWRGGNMWNIVDGQSVQPWYGLETRAQGSTIFVAPNGKNAGWANNGGEDIAFIDAIIKQVEGDLCVDQSSRFATGFSWGGGMSYSLACSRAKQFRAVSVLSGGVISGCDGGNDPIAYLGIHGINDGVLPFQGGVNLAQKFVKNNRCQQANVGTPQPGSHGSVRTDFKGCSKPVSFIAYDGGHDAAPLGVGSSLAPDATWKFFMAA

SEQ ID NO: 449 - protein, 151 aa, Neosartorya fumigata
MPTLNYPDSSPLKPAELQVLRAQYEKEGDYVGIQTKFNYAWGLIKSNARTDQQEGVRLLSEIFRAAPERRRECLYYLALGNYKLGNYGEARRYNDLLLEKEPGNLQAASLGSLIDDKVSKEGLMGIAIVGGLALAAGIVGGLVFKGAAKRR

SEQ ID NO: 450 - protein, 153 aa, Aspergillus oryzae
MGSNLPYAADAESPLKPAELQVLRAQYEKEGDYVGIQTKFNFAWGLIKSNARPDQQEGVRLLSEIFRAAPERRRECLYYLALGNYKLGNYGEARRYNDLLLEKEPANLQAASLGTLIDERVSKEGLMGFAIVGGLALAAGLVGGMVFRGAKRR

SEQ ID NO: 451 - protein, 153 aa, Emericella nidulans
MTSSNLPYAADAESPLKPAELQVLRAQYEKEGDYVGVQTKFNYAWGLIKSNFRADQQEGVRLLSEIFRAHPERRRECLFYLALGNYKLGNYGEARRYNDLLIDKEPGNLQAASLRTLIDDRVSREGMVGIAIVGGLALAAGVVGGLLFRGQRR

SEQ ID NO: 452 - protein, 235 aa, Aspergillus oryzae
MANTALIGCTGMVGSFILNNLLAHPSVARVDTISRRTPQAASAAQTKLTTIVSDDTSRWASELSSLTPTPSIFFSAFATTRASAGGFENQYKIEHGLNVEMARAARDAGTKVYVLISSAGADKNAYFAYPRMKAEIEEDVKALGFERTVILRPGLIAGQREESRPMEAAIRCIAGFAGKIHSGLKDGWAQEADVIARAAVNAGLKALEGDVPTGSEKVWVLGGSDIIKYGAGSKN

SEQ ID NO: 453 - protein, 232 aa, Aspergillus terreus
MASVALIGCTGMVGSHILTSLLAHPSVARVDTISRRTPNAASAAQAKLTTFVSDDTSKWASQLSALTPIPSIFFSSFGTTRAAAGGFENQYKIEHGLNVEMARAARDAGTKVYVLVSSSGASKDSSIPYSRMKGEIEEEAKAMGFEHTVILRPGLISGTREESRPLEAAARYIAGFAGKVHSGLKDSWAQDADVIAKAAVNAGLKALEGDVPAGSEKVWVLGGSDIIKLGKE

SEQ ID NO: 454 - protein, 234 aa, Neosartorya fischeri
MANVALIGATGMVGSHILTSLLENPAVARVDTISRRTPSAAAAAPQTQLTTFVSDDTSRWAAQLSSLTPTPSIFISAFGTTRAAAGGFENQYKVEHGLNVEMARAARDAGTKVYVLISSGGANKASSFAYPRMKGEIEEDVKALGFERTVILRPGLISGQRQESRPAEAAFRFIAGIAGKVHSGLKDGWAQDADVIARAAVNAGLKALDGDVPPGSEKLWILGGSDIIKYGGKK

SEQ ID NO: 455 - protein, 229 aa, Aspergillus oryzae
MTTAAVFGSTGAVGGQILATLLASDAFSSVKTVSRRLPNAQSPKLQTLEEGDITKWGGLIASLSPKPSIVFNAVGTTRAAAGGIANQWKIDHDLCIENAKAAKEAGVKTYVFISSGGTRGFFSRYVPYSKMKIGVEDAIKELDFEQAIILRPGLILQREKPKAALLENIVQNLNKLGQGVQDMIGQDQTVIGRAAVAAARMAEEGKAPSKYWVLEQADIVRLGRDEWKQ

SEQ ID NO: 456 - protein, 229 aa, Aspergillus terreus
MTAAAVFGCTGAVGSQILATLLASDAFSSVATVSRKLPTAESPKLQAIEEGDTSKWGTTIASLSPKPSVVFNAVGTTRAAAGGIQNQWKIDHDLCIEIAKAAKEAGVKTYVFISSGGTRGFLSRHVPYSKMKIGVEDAIKELGFEHAIILRPGMIIGREKSKAPLFEAIVGHLNKLGQGVQDRIGQDQLIIGRAAVAAARLAEDGKAPSKFWAVEMSDIVRLGRDEWKE

SEQ ID NO: 457 - protein, 231 aa, Neosartorya fischeri
MTMTTAAVFGCTGAVGSQILATLLAIDTFPSVKTISRRLPNVQSPKLEAIEEGDSSKWGGMISSFSPKPSVVFNAVGTTRAAAGGLQNQWKIDHDLCIENARAAKEAGVKTYVFISGAGIRGFVARYLPFSKMKIGVEDAIKDLDFEHAIILRPGMIIGRENPKSALLENIVGGLNKLGQGIQDSLGQDQTVIARAAVAAARMADEGKAPSKYWVVEMADIVRLGRDEWKE

SEQ ID NO: 458 - protein, 234 aa, Aspergillus clavatus
MANVALIGATGMVGGHILSTLLESPAVARVDTISRKTPPAAASAPQAKLTTFVSDDTSRWASQLSALTPTPSIFMSAFGTTRAAAGGFDNQYKVEHGLNVEMARAARDAGTKVYVLISSSGASKTSSFAYPRMKGEIEDDVKALGFERTVILRPGLISGQREESRPAEAAVRFIAGFAGKIYSGLKDGWAQDADVIARAAVNAGLKALEGDVPAGSEKVWVLTGSDIIRFGGKN

SEQ ID NO: 459 - protein, 234 aa, Neosartorya fumigata
MANVALIGATGMVGSHILTSLLENPAIARVDTISRRTPSAAAAAPQTKLTTFVSDDTSRWAAQLSSLTPTPSIFISAFGTTRAAAGGFENQYKVEHGLNVEMARAARDAGTKVYVLISSGGANKASSFAYPRMKGEIEEDVKALGFERTVILRPGLISGQRQESRPAEAALRFIAGIAGKVHSGLKDGWAQDADVIARAAVNAGLKALDGDVPPGSEKLWILGGSDIIKYGGKK

SEQ ID NO: 460 - protein, 234 aa, Aspergillus niger
MANVALLGCTGMVGSHILTHLLGNSSVARIDTISRRTPQPATAAPQEKLTTFVSDDSSKWASQLSSLTPTPDIFISAFGTTRGAAGGFENQYKIEHGLNVEMARAARDAGTKVYVLISSTGADKNSSFGYPRMKGEIEEEVKAMGFDRTIILRPGLISGERQESRPAEAVMRGFAGLVGKIHSGLKDGWAQDADVIAKAAVNAGVKALNGEVPAGSEKVWVMYGKDIIQYGKGQ

SEQ ID NO: 461 - protein, 233 aa, Emericella nidulans
MANVALIGCTGMVGAHILTSLIANPAVTRIDTISRRTPQAASSAPQAKLTTIVSTDTSKWASELSSLTPIPSIFISALGTTRAAAGSFENQYKLDHDLNLEMAKAARDAGTKVYVLISSSGADVKSNFAYTRMKGEIEEGVKALGFERTVILRPGLIAGQREESRPAEAVARFFAGALGKVHSSLKDGWAQESDVIGKAAVNAGLKALNGEVPAGSEKVWYLYGSDIIQHGKE

SEQ ID NO: 462 - protein, 356 aa, Neosartorya fumigata
MLGKTVLLPLLVLLCHSLASASLVYRGADISSLLIEEKAGIEYKNVNGQTQPLENILKANGVNSVRQRVWVNPSDGSYNLDYNVKLAKRVKAAGMSVYLDLHFSDTWADPSHQTTPRGWSTNDIGTLTWQVYNYTMEVCNTFASNGIDVSIVAIGNEIRNGLLWPLGKPDNYANIANILHSAAFGVKDSTLSPKPKIMIHLDNGWDWSAQKFFYDRVLSSGANLVKSDFDLIGVSYYPFYNPSATLSALTTSLKNLRSTYGKDVLVVETDWPVLCPNPAYAFPSDLKDIPFSVAGQTTFVQRVANIVAQTPGGIGLYYWEPAWVQNAALGSSCADNLMVDWSTRQARTSLSVFATI

SEQ ID NO: 463 - protein, 347 aa, Aspergillus flavus
MLFSYLLATLPLLANAALTYKGADISSVFIEEKAGVAYKNLAGETQALEAILTDNGVNSIRQRVWVKNGDYDLTYNVNLAKRVAATGASIYLDLHYSDDWADPKHQTTPDGWSTDDINTLADQIYQYTLSVCNTFAEEKINVEIVSIGNEITSGLLWPLGKTPNYENIARLLHSGAWGVKDSKLATKPKILIHLDNGWDWDQQKYFYDTALGTGLLTSDDFDMIGVSYYPFYNEKATLASLKTSLTNIQTTYGKEVAVVETNWPVKCSSPEFAFPADLKDIPFSVDGQVTFLQRLADTLTATKASGFFYWEPAWTKNAGLGSSCEDNLLVDYNTNQVRSSVKAFGQV

SEQ ID NO: 464 - protein, 356 aa, Neosartorya fumigata
MLGKTVLLPLLVLLCHSLASASLVYRGADISSLLIEEKAGIEYKNVNGQTQPLENILKANGVNSVRQRVWVNPSDGSYNLDYNVKLAKRVKAAGMSVYLDLHFSDTWADPSHQTTPRGWSTNDIGTLTWQVYNYTMEVCNTFASNGIDVSIVAIGNEIRNGLLWPLGKPDNYANIANILHSAAFGVKDSTLSPKPKIMIHLDNGWDWSAQKFFYNRVLSSGANLVKSDFDLIGVSYYPFYNPSATLSALTTSLKNLRSTYGKDVLVVETDWPVSCPNPAYAFPSDLKDIPFSVAGQTTFVQRVANIVAQTPGGIGLYYWEPAWVQNAALGSSCADNLMVDWSTRQARTSLSVFATI

SEQ ID NO: 465 - protein, 350 aa, Aspergillus niger
MIYSLLLSALPLLSSAALTYRGADISSLLIEEDAGISYKNLNGETQALEDILVNNGVNSIRQRVWVDPSDGSYDLDYNLKLAKRVQAAGMSIYLDLHLSDTWADPSDQTTPTGWSTTDIDTLTWQLYNYTLDVCNTFAENDIDIEIVSIGNEISSGLLWPLGKTSNYDNIAKLLHSGAWGVKDSNQATTPKIMIHLDNGWDWEEQEYFYKTVLATGSLLSTDFDLMGVSYYPFYSSEATLSALQTSLTNMQSNYDKSVVVVETNWPVSCPDPEYSFPSDLSSIPFSAAGQEEFLEKLAEVVEGVTDGLGIYYWEPAWVDNAALGSSCADNLMVDIDTDEVLESVTVFEDL

SEQ ID NO: 466 - protein, 350 aa, Aspergillus niger
MIYPLLLSALPLLSSAALTYRGADISSLLIEEDAGISYKNLNGETQALEDILVNNGVNSIRQRVWVDPSDGSYDLDYNLKLAKRVQAAGMSIYLDLHLSDTWADPSDQTTPTGWSTTDIDTLTWQLYNYTLDVCNTFAENDIDIEIVSIGNEISSGLLWPLGKTSNYDNIAKLLHSGAWGVKDSNQATTPKIMIHLDNGWDWEEQEYFYKTVLATGSLLSTDFDLMGVSYYPFYNSEATLSALQTSLTNMQSNYDKSVVVVETNWPVSCPDPEYSFPSDLSSIPFSAAGQEEFLEKLAEVVEGVTDGLGIYYWEPAWVDNAALGSSCADNLMVDIDTDEVLESVTVFEDL

SEQ ID NO: 467 - protein, 347 aa, Aspergillus oryzae
MLFSYLLATLPLLANAALTYKGADISSVFIEEKAGVAYKNLAGETQALEAILTDNGVNSIRQRVWVKNGDYDLTYNVNLAKRVAATGASIYLDLHYSDDWADPKHQTTPDGWSTDDINTLADQIYQYTLSVCNTFAEEKINVEIVSIGNEITSGLLWPLGKTPNYENIARLLHSGAWGVKDSKLATKPKILIHLDNGWDWDQQKYFYDTALGTGLLTSDDFDMIGVSYYPFYNEKATLASLKTSLTNIQTTYGKEVAVVETNWPVKCSSPEFAFPADLKDIPFSVDGQVTFLQRLAETLTATKASGFFYWEPAWTKNAGLGSSCEDNLLVDYNTNQVRNSVKAFGQV

SEQ ID NO: 468 - protein, 349 aa, Aspergillus terreus
MLLSFLPLLPLATAALTYRGADISSLLIEEDAGIAYKNLNGQTQALESILADNGVNSIRQRLWVNPSDGSYDLDYNLKLAKRAKAAGMSVYLDLHYSDTWADPSHQTTPAGWSTDDIGTLAWQVYNYTKEVCDTFAANDIALEMVSIGNEIRNGLLWPLGATDSYPNIARLLHSGAWGVKDSALATTPQILLHLDNGWDWAAQKYFYDTVLAAGSELTSADFDLIGVSYYPFYNADATLSALKTSLGNLASAYGKKVLVVETNWPVACPNPEYQFPADLADIPFSVDGQSTFLRRLGEVVAGTDGGAGVYYWEPAWTKNAGLGSSCQDNLLVDYNTDQVRASISALGGI

SEQ ID NO: 469 - protein, 350 aa, Aspergillus tubingensis
MIYPLLLSALPLLSSAALTYRGADISSLLIEEDAGISYKNLNGETQALEDILVNNGVNSIRQRVWVDPSDGSYDLDYNLKLAKRVQAAGMSIYLDLHLSDTWADPSDQTTPTGWSTTDIDTLTWQLYNYTLEVCNTFAENDIDVEIVSIGNEISSGLLWPLGKTSNYDNIAKLLHSGAWGVKDSDLTTTPKIMIHLDNGWDWDEQEYFYKTVLATGSLLSTDFDLMGVSYYPFYSSEATLSSLKTSLTNMQSNYDKPVVVVETNWPVSCPDPEYSFPSDLTSIPFSAAGQEEFLEKLAEVVEGVTDGLGIYYWEPAWIDNAGLGSSCADNLMVDVNTDEVLESVTVFEDL

SEQ ID NO: 470 - protein, 350 aa, Emericella nidulans
MILSSLLPLSLVTLTSAALTYRGADISSLLIEEDSGVAYKNLNGETQAFELILANNGVNSIRQRIWVNPSDGSYNLEYNLELAKRVQDAGMSVYLDLHLSDTWADPGDQATPSGWSTTDIDTLAWQVYNYTLDVCNTFAENNVAVEIVSIGNEIRNGLLHPLGSTDHYDNIARLLHSGAWGVKDSSLSTTPKILFHLDNGWDWDAQKYFYDTVLATGTLLSTDFDLIGVSYYPFYNADATLSSLKTSLTNLKSNYGKNVLVVETDWPVQCSSPEYAFPSDLSSIPFSADGQETFLGRLADTLEDVGGVGIYYWEPGWVDNAGLGSSCEDNLMVDWRDRTVRESISVFGDL

SEQ ID NO: 471 - protein, 356 aa, Neosartorya fischeri
MLGKMILLPLFVLLCHSLASASLAYRGADISSLLIEEKAGIKYKDVNGQAQPLENILKANGVNSVRQRVWVNPSDGSYNLDYNVKLAKRVKAAGMSVYLDLHFSDTWADPSHQTTPRGWSTNDIGTLTWQVYNYTKEVCDTFASNGIDVSIVAIGNEIRNGLLWPLGKPNNYANIANILHSAAFGVKDSTLSPKPKIMIHLDNGWDWSAQKFFYDSVLSSGAKLVKSDFDLIGVSYYPFYNPSATLSALTTSLKNLRSTYGKDVLVVETDWPVSCPNPAYAFPSDLKDIPFSVAGQKTFVQRVANVVAQTPGGIGLYYWEPAWVQNAALGSSCADNLMVDWRTDQARTSLSVFGTI

SEQ ID NO: 472 - protein, 632 aa, Neosartorya fumigata
MATVRICVCGDEGTGKSSLITSLVKGVFVTNKIQPVLPQITIPPTIGTPENVTTTTVVDTSALPQERSNLAREIRKSNVILLVYSDHYSYERVALFWLPYFRSLGVNVPVVLCANKSDLAADHTEAQVIEEEMLPVMAEFKEIDSCIRTSAREHRNVNEAFFLCQKAVTHPIAPLFDSKESALKPAAVAALQRIFYLSDKDRDGYLSDKEIEDFQMRCFDKPLSKEDLVHIKETIQKTHPDSVTPFGIDCRGFIHLNKMYAEKGRHETVWIILRAFQYTDNLSLQESFLHPRFEVPPFASAELSPEGYRFFVNLFLLSDKDNDGGLNDAELASLFAPTPGLPASWADGSFPSSTVRNEAGHVTLQGWLAQWSMTTFQSPKTTLEYLAYLGFESSDRSNPSTTAALKVTRPRKKRKRPGRVGRNVVLGHVLGAPGSGKSALLDAFLARGFSHTYRPTIQPRTAVNTVELPGGKQCYLILDELGELEPAILENQAKLLDQCDVIVYTYDSSDPDSFAYIPQLRSKYPHLEELPSVFIALKADLDRTTQRAEHQPHEYTAMLNMPSPPLHVSATWSSIQEVFVHIAEAAMEPSTAFPRSEEDVEGKWMAWGIALGAVVCAGAAAVMIWRRVSGSG

SEQ ID NO: 473 - protein, 633 aa, Aspergillus oryzae
MATVRICVCGDEGTGKSSLITSLVKGVFVTNKIQPILPQITIPPTIGTPENVTTTTVVDTSALPQERSNLAREIRKSNVILLVYSDHYSYERVALFWLPYFRSLGVNVPVVLCANKSDLAADHSEAQVIEEEMLPLMAEFKEIDSCIRTSAREHRNVNEAFFLCQKAVTHPIAPLFDSKESALKPAAVAALQRIFYLSDKDRDGYLSDKELEDFQMRCFEKPLSEEDLVHIKETIQKTHPTSVAPSGIDCRGFIHLNKMYAEKGRHETVWIILRAFQYTDNLSLQESFLHPRFEVPPYASAELSPEGYRFFVNLFLLSDKDNDGGLNDAELASLFAPTPGLPASWADGSFPSSTVRNEAGHVTLQGWLAQWSMTTFTSPKTTLEYLAYLGFESSDRSNPSTTAALKVTRPRKRRKRPGRVGRNVVLGHVLGPPGSGKSALLDAFLARGFSTTYHPTIQPRTAVNTVELPGGKQCYLILDELGELEPAILENQVKLLDQCDVIVYTYDSSDPDSFAYIPELRSKYPHLEELPSVFVALKADLDRTTQRAEYQPHEYTAMLNMPSSPLHVSVTWSSMQEVFVHIAEAAMEPSTAFPRSEEDVEGKWMAWGIALGAVVCAGAAAVMIWRRVSGSGT

SEQ ID NO: 474 - protein, 634 aa, Emericella nidulans
MLCCMRICVCGDEGTGKSSLITSLVKGVFVTNKIQPILPQITIPPTIGTPENVTTTTVVDTSAVPQERSNLAREIRKSNVILLVYSDHYSYERVALFWLPYFRSLGVNVPVVLCANKSDLAADHTETQVIEDEMLPLMSEFKEIDSCIRTSAREHRNVNEAFFLCQKAVTHPIAPLFDAKESALKPAAVAALQRIFYLSDKDRDGYLSDKEIKDFQMRCFEKPLSEEDLVHIKETIQKTHPDSVTPSGIDCRGFIHLNKMYAEKGRHETVWIILRAFQYTDSLSLQESYLHPKFEVPPFASAELSPEGYRFFVNLFLLSDKDNDGGLNDAELASLFAPTPGLPPSWADGSFPSCTVRNEAGHVTLQGWLAQWSMTTFTSPKTTLEYLAYLGFESSDRSNPSTTAALKVTRPRKRRKRPGRVGRNVVLGHIVGAPGSGKSALLDAFLSRGFSTTYHPTIQPRTAVNTVELPGGKQCYLIMDELGELEPAILENQAKLLDQCDVIVYTYDSSDPDSFAYIPALRAKYPHLEELPSVYIALKADLDRTTQRAEHQPHEYTALLNMPGPPLHVSVTWSSIQEVFVHIAEAAMEPSTAFPRSEEDVEGKWMSWGIALGAVVCAGAAAVMIWRRVSGSGV

SEQ ID NO: 475 - protein, 605 aa, Aspergillus niger
MQTLLVSSLVVSLAAALPHYIRSNGIEASLLTDPKDVSGRTVDYIIAGGGLTGLTTAARLTENPNISVLVIESGSYESDRGPIIEDLNAYGDIFGSSVDHAYETVELATNNQTALIRSGNGLGGSTLVNGGTWTRPHKAQVDSWETVFGNEGWNWDNVAAYSLQAERARAPNAKQIAAGHYFNASCHGVNGTVHAGPRDTGDDYSPIVKALMSAVEDRGVPTKKDFGCGDPHGVSMFPNTLHEDQVRSDAAREWLLPNYQRPNLQVLTGQYVGKVLLSQNGTTPRAVGVEFGTHKGNTHNVYAKHEVLLAAGSAVSPTILEYSGIGMKSILEPLGIDTVVDLPVGLNLQDQTTATVRSRITSAGAGQGQAAWFATFNETFGDYSEKAHELLNTKLEQWAEEAVARGGFHNTTALLIQYENYRDWIVNHNVAYSELFLDTAGVASFDVWDLLPFTRGYVHILDKDPYLHHFAYDPQYFLNELDLLGQAAATQLARNISNSGAMQTYFAGETIPGDNLAYDADLSAWTEYIPYHFRPNYHGVGTCSMMPKEMGGVVDNAARVYGVQGLRVIDGSIPPTQMSSHVMTVFYAMALKISDAILEDYASMQ

SEQ ID NO: 476 - protein, 237 aa, Aspergillus aculeatus
MKAFHLLAALAGAAVAQQAQLCDQYATYTGGVYTINNNLWGKDAGSGSQCTTVNSASSAGTSWSTKWNWSGGENSVKSYANSGLTFNKKLVSQISQIPTTARWSYDNTGIRADVAYDLFTAADINHVTWSGDYELMIWLARYGGVQPIGSQIATATVDGQTWELWYGANGSQKTYSFVAPTPITSFQGDVNDFFKYLTQNHGFPASSQYLITLQFGTEPFTGGPATLSVSNWSASVQ

SEQ ID NO: 477 - protein, 87 aa, Neosartorya fumigata
MKFSLACLLALAGLQAALADPATCEKEAQFVKQELIGQPYTDAVANALQSNPIRVLHPGDMITMEYIASRLNIQVNENNEIISAHCA

SEQ ID NO: 478 - protein, 68 aa, Aspergillus flavus
DPATCEKEAQFVKQELIGQPYTDAVANALQSNPIRVLHPGDMITMEYIASRLNIQVNENNEIISAHCA

SEQ ID NO: 479 - protein, 87 aa, Neosartorya fumigata; identical to SEQ ID NO: 477

SEQ ID NO: 480 - protein, 721 aa, Aspergillus clavatus
MFRVGSWLYGKKPANASTQSLDSLVELRDPATLILNDDVDGAEDGLAEGTSSFHNLGRGVVAFIRATLGFEQDIMRQASERLNEAETTASVDQHRAQHNSQAPNTYHSAMYTPGTEFALCQAMAQLMGAVVGVLNESLTESIKGFYRLRKAYITLDAILKMEQKYLQESRMATPIESAAPGSIPLSMKRQGSSNLQSSSSSISSAKIKKAASSATTLAAPVENTDLSERLTGLNLSSETLAPGDVKEASTLGPADMLNHDPDSDIFHNQIDIFVHSGSNFCFGILLLLISMVPPAFSKLLSIIGFHGDKERGLRMLWQASKFHNLIGAIAAFSVLGYYNGFVRYCDIMPDSIPGQDEDVQGYPQERLELLLAKMRKQFPKSQLWVLEESRMCGANKNLDRALELLCGGESSPLKQVEALRLFERSLNAMYLHKYELCAASFLECFELNTWSRSLYYYITGSCHLSLYRNALDKDPAKAAEHAELAEKYFRLAPPLAGKKRFMARQLPFDVFVARKVAKWEARAKDWKVPLVDAVGVDPIEEMIFFWNGHSRMTDEHLLESLQKLAWCESSANKTWSREGPEEKAILKLLRAAVFRSLRKHSQAKDLLEDILSQDRNLFKGHLKDDWICPVAHFEMAANMWMERPTYIAIHGGSKEFTDPEATEPADSSKSLEYEREKVHKCKEYLEKAAKWESYELDARIGLKVTAAMEAVQKWENTHPPA

SEQ ID NO: 481 - protein, 725 aa, Neosartorya fumigata
MFRVGSWLYGKKPAANASTQSLDSLVELRDLEDAMRAATLILNDDVDGAEAGLAEGTSAFHNLGRGVVAFIRATLGFEQDIMRQASERLNEAETSASVDQHRAQHNSYAPNTYHSPMYLPGTEFALCQAIAQLMSAIVGVLNESLTESIKAFYRLRKAYITLDAILKMEQKYMEESRAATLVESTTSGSVPSSLRHSSSNLHSSSSSISSAKGKEAAADTLAAPSNDTDVQERLADLSLSGEPAVAEDPGQTPTPINTDILDHDPDSDIFQNQIDVFVHSGSNFCFGVLLLLISMVPPSFSKLLSIIGFHGDKERGLKMLWQASKFHNLIGGIAAFAILGYYNGFVRYCDIMPDSIPGKDGDVQGYPQKRLELLLAKMRERFPKSQLWLLEESRMSGANKNLDRALELLCGEERSPLKQVEALRVFERSLNAMYLHKYELCADSFLECVDLNSWSRSLYYYIAGSCHLSLYRDVKETDSAKAAKHAELAEKYFRMAPTVAGKKRFMARQLPFDVFVARKFAKWEARAKEWKVSLVDAVGVDPIEEMIFFWNGHSRMTDEQLQESLQKLAWSESSANTTWSREGPEEKAILKLLRAAVHRSLRKHTQAKEMLEDILGQDRTLFKGHLKDDWICPVAHFEMAANLWMERPTYIATHGGAKQDSNKESARPASVNDALQYEREKVRKCKEYLEKAAKWESYELDARIGLKVTAAMEAVQKWESTHPTL

SEQ ID NO: 482 - protein, 725 aa, Neosartorya fumigata
MFRVGSWLYGKKPAANASTQSLDSLVELRDLEDAMRAATLILNDDVDGAEAGLAEGTSAFHNLGRGVVAFIRATLGFEQDIMRQASERLNEAETSASVDQHRAQHNSYAPNTYHSPMYLPGTEFALCQAIAQLMSAIVGVLNESLTESIKAFYRLRKAYITLDAILKMEQKYMEESRAATLVESTTSGSVPSSLRHSSSNLHSSSSSISSAKGKEAAADTLAAPSNDTDVQERLADLNLSGEPAVAEDPGQTPTPINTDILDHDPDSDIFQNQIDVFVHSGSNFCFGVLLLLISMVPPSFSKLLSIIGFHGDKERGLKMLWQASKFHNLIGGIAAFAILGYYNGFVRYCDIMPDSIPGKDGDVQGYPQKRLELLLAKMRERFPKSQLWLLEESRMSGANKNLDRALELLCGEERSPLKQVEALRVFERSLNAMYLHKYELCADSFLECVDLNSWSRSLYYYIAGSCHLSLYRDAKETDSAKAAKHAELAEKYFRMAPTVAGKKRFMARQLPFDVFVARKFAKWEARAKEWKVSLVDAVGVDPIEEMIFFWNGHSRMTDEQLQESLQKLAWSESSANTTWSREGPEEKAILKLLRAAVHRSLRKHTQAKEMLEDILGQDRTLFKGHLKDDWICPVAHFEMAANLWMERPTYIATHGGAKQDSNKESARPASVNDALQYEREKVRKCKEYLEKAAKWESYELDARIGLKVTAAMEAVQKWESTHPTL

SEQ ID NO: 483 - protein, 692 aa, Aspergillus niger
MFRVGSWLYGKKPASTQSLDSLSELRDLEDAMRAATLILNDDVDGAEDGLSEGTSSFHNLGRGVVAFIRATLGFEQEIMRQASERLNAAETSAANDQHRAQHNSHAPNTYHSQIYAPGTEFALCQAMAQLMSAVVGVLNESLTESIKGFYRLRKAYITLDAILKMEQKFIMQARNSGNSTSTESLPRGAGQGAGSKSVPASPVEPIDLKKELSDLSISADSEASASGPSDMLSHDPDSDIFKNQIDVFVHSGANFCFGILLLLISMVPPAFSKLLGIIGFHGDKERGLRMLWQASKFHNLIGALAAFSILGYSNGFVRYCDIMPDPVPGDDVQGYPQERLEALLALMRKRFPKSQLWLLEESRMNGANKKLDVALELLCGEDRSPLKQVEALRVFERSLNAMYLHRYELCAESFLECVELNSWSRSLYYYIAGSAHLSLYRNIAGTDATAAAKHAEKAVEYFRKAPPLAGKKKFMARQLPFDVFVSRKIAKWEARAKEWKVPLVDAVGVDPIEEMIFFWNGHSRMTQEQLEESMTKLAWSESEANKTWSREGPEEKAILQLLRAAVLRAMRRHDEAKEMIRTSIFSQDKSQFTGHLKDDWIYPVAHFEMAANLWMERPTYSAIHGGPASSSEKPSTDSDMQLERRQVRECKEHLEKAAKWESYELDARVGLKVTAALEAVEKWESAHATTSG

SEQ ID NO: 484 - protein, 691 aa, Aspergillus terreus
MFKVGSWLYGKKPGTASTQSLDSLTELRDSATLILNDDVDGAEDGLSEGISSFHNLGRGVVAFIRATLGFEQEIMRQASERLNIAETSAASDQHKAQHNSHAPNTYHSQIYVPGTEFALCQAMAQLMSAVVGVLNESLTESIKGFYKMRKAYITLDGILKMEQKFMQMKRSGELSPPELAQSSSRSSGQGADAKSNPTTPVEAGGLSQKLSELNVSREPTDSDMSVETSSEMLSHDPDSDIFRNQIDVFVHSGANFCFGILLLLISMVPPAFSKLLGIIGFHGDKERGLKMLWQASKFHNLIGAIAAFAMLGYYNGFVRYCDIMPDPVSREEGDVQAYPQERLEALLAKMRKQFPKSQLWLLEESRMEGANKNLERALELLCGEERSPLKQVEALRVFERSLNAMYLHRYQLCSESFIECVDLNSWSRSLYYYIAGAAHVSLYRSALGKDASEATKHAEQATEYFRTAPPLAGKKRFMARQLPFDVFVARKIAKWEARAKEWKVPLVDAVGVDPIEEMIFFWNGHSRMTQAHLEESLQHLAWSESDANKHWSREGPEEKAILQLVRAAVLRSMRKHSEAKDLLQRGILDHDKSLFVGHLKDNWIGPAAHFEMAANLWMERPTYIEIHGGPDEENPGEDAHQLERNKVRQCKEYLEKAARWESYELDARIGLKVTAALEAVHKWETAHSATS

SEQ ID NO: 485 - protein, 719 aa, Neosartorya fischeri
MFRVGSWLYGKKPAANASTQSLDSLVELRDPATLILNDDVDGAEAGLAEGTSTFHNLGRGVVAFIRATLGFEQDIMRQASERLNEAETSASVDQHRAQHNSHAPNTYHSPMYSPGTEFALCQAIAQLMSAIVGVLNESLTESIKAFYRLRKAYITLDAILKMEQKYMEESRSATLVESTTSGSVPSSQRHSSSNLQSSSSSISSAKVKEATADTLAAPSKDTDVNERLADLSLSGEAPVAEDPGQTPTPINTDILDHDPDSDIFQNQIDVFVHSGSNFCFGVLLLLISMVPPSFSKLLSIIGFHGDKERGLKMLWQASKFHNLIGGIAAFAILGYYNGFVRYCDIMPDSIPGKDGDVQGYPQKRLELLLAKMRERFPKSQLWLLEESRMSGANKNLDRALELLCGEERSPLKQVEALRVFERSLNAMYLHKYELCADSFLECVDLNSWSRSLYYYIAGSCHLSLYRDVKETDSAKAAKHAELAEKYFRMAPTVAGKKRFMARQLPFDVFVARKFAKWEARAKEWKVSLVDAVGIDPIEEMIFFWNGHSRMTDEQLQESLQKLAWSESNANTTWSREGPEEKAILKLLRAAVHRSLRKHTQAKEMLEDILGQDRTLFKGHLKDDWICPVAHFEMAANLWMERPTYIANHSGAKQDSDKESAGPADAKDALQYERERVRKCKEYLEKAAKWESYELDARIGLKVTAAMEAVQKWESTHPTV

SEQ ID NO: 486 - protein, 516 aa, Aspergillus ficuum
MLNPKVAYMVWMTCLGLTLPSQAQSNDYRPSYHFTPDQYWMNEPNGLIKIGSTWHLFFQHNPTANVWGNICWGHATSTDLMHWAHKPTAIADENGVEAFTGTAYYDPNNTSGLGDSANPPYLAWFTGYTTSSQTQDQRLAFSVDNGATWTKFQGNPIISTSQEAPHDITGGLESRDPKVFFHRQSGNWIMVLAHGGQDKLSFWTSADTINWTWQSDLKSTSINGLSSDITGWEVPDMFELPVEGTEETTWVVMMTPAEGSPAGGNGVLAITGSFDGKSFTADPVDASTMWLDNGRDFDGALSWVNVPASDGRRIIAAVMNSYGSNPPTTTWKGMLSFPRTLSLKKVGTQQHFVQQPITELDTISTSLQILANQTITPGQTLLSSIRGTALDVRVAFYPDAGSVLSLAVRKGASEQTVIKYTQSDATLSVDRTESGDISYDPAAGGVHTAKLEEDGTGLVSIRVLVDTCSVEVFGGQGEAVISDLIFPSDSSDGLALEVTGGNAVLQSVDVRSVSLE

SEQ ID NO: 487 - protein, 564 aa, Aspergillus niger
MRSTGYLLTLSAAFQVAQAAVTANNSQLLTWWHNTGEINTQTPVADGNVRQSGLYSVKVQTTPASSSLYYDSFVYLAIPGNGMSDQLQYTQGYNQTQAWTSFLYSHDATVKISRNGSSANSNVVIRPTSLNFPVRYDNQSVYITVPYSPTGYRFSVEFDDDLISLAPSGARQPENALLIFASPFENSSTKPQPGSPNSIAPAPGRVLGLNTTSASTVVFNPGVYYFTGHDHMVLSSSVTWVYFAPGAYVKGAVEFLSTASEVKASGHGVLSGEQYVWYADPDEGYQKASGANNNGLRMWRGTLGNSSQTFVLNGVTVSAPPFNSMDWSGNSLDLITCRVDDYKQVGAFYGQTDGLEMYPGTILQDVFYHTDDDGLKMYYSNVTARNIVMWKESVAPVVEFGWTPRNTENVLFDNVDVIHQAYANAGNNPGIFGAVNNYLYAPDGLSSNHSTGNSNMTVRNITWSNFRAEGSSSALFRINPIQNLDNISIKNVSIESFEPLSINTTESWMPVWYDLNNGKQITVTDFSIEGFTVGNTTITASNAASVGRIDGVDPAYAGSVHYID

SEQ ID NO: 488 - protein, 257 aa, Aspergillus clavatus
MAPITDEAVNGLKDMIGKLEARVQELEGRLVGDLKPKSTAEQMRIILMGPPGAGKGTQAPRLKEKYCVCHLATGDMLRSQVAKKTELGKEAKKIMDQGGLVSDEIMVNMIKSELETNSECKNGFILDGFPRTVAQAERLDDMLEARKQKLQHAVELQIDDALLVARITGRLVHPASGRSYHKIFNPPKNEMLDDITGEPLIQRSDDNAETLKKRLSTYHAQTAPVVDYYKKTGIWRGIDASQEPGQVWKSLLGVFQK

SEQ ID NO: 489 - protein, 257 aa, Neosartorya fumigata
MAPITEEVVHGLKDMIEKLENRVQELEARLGGESKPKSIAEQMRIVLMGPPGAGKGTQAPRLKEKYCVCHLATGDMLRSQVAKKTELGKEAKKIMDQGGLVSDEIMVNMIKNELDTNSECKNGFILDGFPRTVAQAERLDDMLEARNQKLQHAIELQIDDALLVARITGRLVHPASGRSYHKIFNPPKNDMKDDVTGEPLIQRSDDNAETLKKRLSTYHAQTAPVVEYYKKTGIWRGIDASQEPGQVWKSLLGVFQK

SEQ ID NO: 490 - protein, 257 aa, Neosartorya fumigata; identical to SEQ ID NO: 489

SEQ ID NO: 491 - protein, 258 aa, Aspergillus niger
MAPITDEVVNGLKDTIGKLEARVEELEGRLSNQVKPKSVAEQMRIILMGPPGAGKGTQAPRLKEKYCVCHLATGDMLRSQVAKKTALGKEAKKIMDQGGLVSDEIMVNMIQSELDNNAECKNGFILDGFPRTVAQAERLDDMLNARQQKLQHAVELQIDDALLVARITGRLVHPASGRSYHKIFNPPKEEMKDDVTGEPLIQRSDDNADTLKKRLGTYHAQTAPVVEYYKKTGIWRGIDASQEPGQVWKSLLGVFRQN

SEQ ID NO: 492 - protein, 258 aa, Aspergillus oryzae
MAPITEEAVSGLKDIIGKLEARVEELESRLSNGFKPKSVAEHMRMVLMGPPGAGKGTQAPALKDKYCVCHLATGDMLRSQVAKKTELGKEAKKIMDQGGLVSDEIMVNMIKSELDNNSECKNGFILDGFPRTVAQAERLDDMLAARQQKLQHAVELQIDDALLVARITGRLVHPASGRSYHKVFNPPKQEMKDDITGEPLIQRSDDNAETLKKRLGTYHAQTAPVVDYYKKTGIWRGIDASQEPGQVWKSLLGVFQQN

SEQ ID NO: 493 - protein, 257 aa, Aspergillus terreus
MAPITEETVAGLKDTIGKLEARIEDLEGRLGQSKPKSVAEQMRIILMGPPGAGKGTQAPRIKEKYCVCHLATGDMLRSQVAKKTELGKEAKKIMDQGGLVSDEIMVNMIKSELENNAECKNGFILDGFPRTVAQAERLDDMLAARQQKLQHAIELQIDDALLVARITGRLVHPASGRSYHKIFNPPKQEMKDDITGEPLIQRSDDNAETLKKRLGTYHAQTAPVCDYYKKTGIWRGIDASQEPGQVWKSLLGVFQKN

SEQ ID NO: 494 - protein, 259 aa, Emericella nidulans
MAPITDDVVAGLKSTIGKLEARIEDLESRLGGEPKPKSIAEHMRIILMGPPGAGKGTQAPKIKEKYCVCHLATGDMLRSQVAKKTDLGREAKKIMDQGGLVSDEIMVNMIKSELENNAECKNGFILDGFPRTVAQAERLDEMLVARNQKLQHAIELKIDDALLVARITGRLVHPASGRSYHKIFNPPKEAMKDDITGEPLVQRSDDNAEALKKRLVTYHAQTAPVCDYYKKTGIWRGIDASQEPGQVWKSLLGVFNNKN

SEQ ID NO: 495 - protein, 257 aa, Neosartorya fischeri
MAPITEEVVHGLKDMIEKLENRVQELEGRLGGESKPKSIAEQMRIVLMGPPGAGKGTQAPRLKEKYCVCHLATGDMLRSQVAKKTELGKEAKKIMDQGGLVSDEIMVNMIKNELDTNTECKNGFILDGFPRTVAQAERLDDMLEARKQKLQHAIELQIDDALLVARITGRLVHPASGRSYHKIFNPPKNDMKDDVTGEPLIQRSDDNAETLKKRLSTYHAQTAPVVEYYKKTGIWRGIDASQEPGQVWKSLLGVFQK

SEQ ID NO: 496 - protein, 609 aa, Emericella nidulans
MYLSTVLFPLLALNLGLSHARFVRETLELTWEYGSPNGGTPREMVFTNGEYPGPDLIFDEDDDVEVLVINNLPFNTTVHWHGLEMRETPEADGVPGLTQTPIEPGATFTYRFRAYPAGTFWYHSHYKGLMQDGQVGAMYIRRKPDALRPYAVITEDPRELAEIQYAEDNPYLMLATDWTYLTSAEYHNIEVESGYNVFCVDSLLINGRGSVYCPGYQYLEEVSDDGLTAVLEGTHLTEKGCLQPDLHNVQGDYGPWNLSAVPTEVVFNCTPSSVEPPVIYVDPEFNGWVSLNFIGGAAQKAITFSVDNHPMWVYEVDGQFVEPREVEMVGVYSGARYAVMIKLDQTPGDYAIRIAVNGGDQVMSVYAILSYVNQDWIHRENVPKAAIGPHTDTVGYMNYGGGNTSADVRQLLFTENLPAFGVPPPPPSSEVSTTLRTGMIRVNNSYSWSLGNNVLYEPEMTSSTPLLFEPDPLAVIAPKYALTTENNTWVDIVLEITADPRDLIHPPHPIHKHGNRAYIIGNGVGKFRWENVSAAEAEVPDLFYVNETAALRDTFVTDFFDSRLMDGAWIVIRYFVQDKFPSILHCHIASHQMGGMALALLDGVDVWDS

SEQ ID NO: 497 - protein, 388 aa, Aspergillus clavatus
MRVLAAIALGATGLRGALAAVVPQEVLGTNPHIHHEQEKYLIELAPYQTRWVTEEEKWALKLDGVNFIDITEEHNTGFYPTLNSASYVKYPLKMQYADEVVALNKNLSTANMKANLEHFTSFHTRYYKSQTGIESATWLASQVEKVITESGAANHGATVERFAHPWGQFSIIARIPGQTNKTVVLGAHQDSINLFLPSILAAPGADDDGSGTVTILEALRGLLQSGSVAQGNATNTIEFHWYSAEEGGMLGSQAVFSSYKKNRREVKAMLQQDMTGYTKGALDAGAKEAVGIMIDYVDQGLTRFVKEIVTTYCSLGYVETKCGYACSDHTSASKYGYPAAMATESEMENTNRKIHTTDDQIKYLSFDHMLEHAKLTLGFAYELAFAPF

SEQ ID NO: 498 - protein, 388 aa, Neosartorya fumigata
MKVLTAIALSAIAFTGAVAAVITQEAFLNNPRIHHDQEKYLIELAPYRTRWVTEEEKWALKLDGVNFIDITEEHNTGFYPTLHSASYVKYPPKMQYAEEVAALNKNLSKENMKANLERFTSFHTRYYKSQTGIRSATWLFDQVQRVVSESGAAEYGATVERFSHPWGQFSIIARIPGRTNKTVVLGAHQDSINLFLPSILAAPGADDDGSGTVTILEALRGLLQSDAIAKGNASNTVEFHWYSAEEGGMLGSQAIFSNYKRNRREIKAMLQQDMTGYVQGALNAGVEEAIGIMVDYVDQGLTQFLKDVVTAYCSVGYLETKCGYACSDHTSASKYGYPAAMATEAEMENTNKKIHTTDDKIKYLSFDHMLEHAKLSLGFAFELAFAPF

SEQ ID NO: 499 - protein, 388 aa, Neosartorya fumigata; identical to SEQ ID NO: 498

SEQ ID NO: 500 - protein, 387 aa, Aspergillus flavus
MKIRAALALSATASGVLAAVVPQQALLNNPQIHHENEKYLIELAPYQTRWVTEEEKWALKLDGVNFIDITEERNPGFYPTLHQASNVRYPTKMEHVEEVVGLTHRLTKANMERDLEKFTSFHTRYYKSQTGIESATWLYNQVQTVIEQSGAAEHGATVDRFAHSWGQFSIIARIPGKSNKTVVLGAHQDSINLFLPSILAAPGADDDGSGTVTILEALRGLLQSDTVAQGKAPNTIEFHWYSAEEGGMLGSQAIFSQYKQERRDIKAMLQQDMTGYVQGALNAGRKEAVGIMIDYVDRGLTQFLKDVVTAYCNVGYLETKCGYACSDHTSASKYGYPSAMATEAEMENTNKRIHTTDDRIKYLSFDHMLEHAKLTLGFAYELAFASF

SEQ ID NO: 501 - protein, 388 aa, Neosartorya fumigata; identical to SEQ ID NO: 498

SEQ ID NO: 502 - protein, 391 aa, Aspergillus niger
MKLSIALALGATASTGVLAAVVPQQEPLITPQDPPTHHHQEKFLIELAPYQTRWVTEEEKWDLKLDGVNFIDITEERNTGFYPTLHAGSYVHYPPTMKHAEKVVPLLRGLSKDNMEQNLNKFTSFHTRYYRSSTGIESAKWLYSRVSDVIEQSGAAEYGATVEQFAHSWGQFSIIARIPGQTNKTVVLGAHQDSINLFLPSILAAPGADDDGSGTVTILEALRGLLQSDAIVRGNASNTIEFHWYSAEEGGMLGSQAIFSQYKRDKRDIKAMLQQDMTGYTQGALDAGRQEAIGIMVDYVDEGLTQFLKDVTTEYCGIGYIETRCGYACSDHTSASKYGYPAAMATESEMENSNKRIHTTDDSIRYLSFDHMLEHARLTLGFAYELAFAQF

SEQ ID NO: 503 - protein, 387 aa, Aspergillus oryzae; identical to SEQ ID NO: 500

SEQ ID NO: 504 - protein, 377 aa, Aspergillus sojae
MRFLPCIATLAATASALAIGDHIRSDDQYVLELGPGETKVVTEAEKWALRAEGKRFFDITGRTSSLELASNKKQKLAVTYPDSVQHNETVQNLINSLDKKNFETVLQPFSEFHNRYYKSDNGKKSSEWLQGKIQEIISASGAKGVTVEPFKHFFPQSSLIAKIPGKSDKTIVLGAHQDSINLNSPSEGRAPSADDDGSGVVTILEAFRVLLTDEKVAAGEAPNTVEFHFYAGEEGGLLGSQDIFEQYLQKSRDVKAMLQQDMTGYTKGTTDAGKPESIGIITDNVDENLTKFLKIIVDAYCTIPTVDSKCGYGCSDHASATKYGYPAAFAFESAFGDDSPYIHSADDTIETVNFDHVLQHGRLTLGFAYELAFADSL

SEQ ID NO: 505 - protein, 390 aa, Emericella nidulans
MKLSTALVLGATATGAWSYAIPQLEQEVLELPETHYEQQEKYLIELSPYQTRWVTEEEKWALKLDGVNFIDITEDRNYGLFPTLDAGSYVNYPQKMGYVDTVKGLIAGLSMDNMRKDLENFTSFHTRYYKSSSGVESAQWLYDQVSKVVRDSGADKFGATVQKFDHSWGQFSIIARIPGLSKKTVVLGAHQDSINLFLPSFLGAPGADDDGSGTVTILEALRGLLKSDIVAHGQSPNTIEFHWYSAEEGGMLGSQAIFSKYKKNQADVKAMLQQDMTGYVQGTKHAGQKESIGVMTDFVDPALTSFLKNTIVTYCAIPFVETKCGYACSDHTSASKYGYPSAMATESTMENSNKHIHTTDDKISYLSFDHMLEHAKLTLGFAYELAFAAL

SEQ ID NO: 506 - protein, 388 aa, Neosartorya fischeri
MKVLAAIALSATAFTGAVAAVLTQEAFLNNPRIHHDQEKYLIELAPYRTRWVTEEEKWALKLDGVNFIDITEEHNTGFYPTLHSASYVKYPPKMQYAEEVAALSKNLSKENMKANLERFTSFHTRYYKSQTGIQSATWLYDQVQRVVSESGAAEYGATVERFSHPWGQFSIIARIPGRTNKTVVLGAHQDSINLFLPSILAAPGADDDGSGTVTILEALRGLLQSDAIANGNASNTVEFHWYSAEEGGMLGSQAIFSSYKRDRREIKAMLQQDMTGYIQGALNAGVEEAIGIMVDYVDQGLTQFLRDVVTAYCSVGYLETKCGYACSDHTSASKYGYPAAMATEAEMENTNKKIHTTDDQIKYLSFDHMLEHAKLTLGFAFELAFAPF

SEQ ID NO: 507 - protein, 501 aa, Neosartorya fumigata
MVTMKLLYLTSFASLAVANGPGWDWKPRVHPKVLPQMIHLWDLLQGAQQLEDFAYAYPERNRVFGGRAHEDTVNYLYRELKKTGYYDVYKQPQVHQWTRADQALTVDGQSYDATTMTYSPSVNATAPLAVVNNLGCVEADYPADLTGKIALISRGECTFATKSVLSAKAGAAAALVYNNIEGSMAGTLGGATSELGAYAPIAGISLADGQALIQMIQAGTVTANLWIDSQVENRTTYNVIAQTKGGDPNNVVALGGHTDSVEAGPGINDDGSGIISNLVVAKALTRFSVKNAVRFCFWTAEEFGLLGSNYYVNSLNATEQAKIRLYLNFDMIASPNYALMIYDGDGSAFNLTGPAGSAQIERLFEDYYTSIRKPFVPTEFNGRSDYQAFILNGIPAGGLFTGAEAIKTEEQAQLFGGQAGVALDANYHAKGDNMTNLNREAFLINSRATAFAVATYANSLDSIPPRNMTTVVKRSQLEQAMKRTPHTHTGGTGCYKDRVEQ

SEQ ID NO: 508 - protein, 496 aa, Aspergillus oryzae
MRSLLWASLLSGVLAGRALVSPDEFPEDIQLEDLLEGSQQLEDFAYAYPERNRVFGGKAHDDTVNYLYEELKKTGYYDVYKQPQVHLWSNADQTLKVGDEEIEAKTMTYSPSVEVTADVAVVKNLGCSEADYPSDVEGKVALIKRGECPFGDKSVLAAKAKAAASIVYNNVAGSMAGTLGAAQSDKGPYSAIVGISLEDGQKLIKLAEAGSVSVDLWVDSKQENRTTYNVVAQTKGGDPNNVVALGGHTDSVEAGPGINDDGSGIISNLVIAKALTQYSVKNAVRFLFWTAEEFGLLGSNYYVSHLNATELNKIRLYLNFDMIASPNYALMIYDGDGSAFNQSGPAGSAQIEKLFEDYYDSIDLPHIPTQFDGRSDYEAFILNGIPSGGLFTGAEGIMSEENASRWGGQAGVAYDANYHAAGDNMTNLNHEAFLINSKATAFAVATYANDLSSIPKRNTTSSLHRRARTMRPFGKRAPKTHAHVSGSGCWHSQVEA

SEQ ID NO: 509 - protein, 377 aa, Aspergillus oryzae
MRFLPCIATLAATASALAIGDHVRSDDQYVLELAPGQTKVVTEAEKWALRAEGKRFFDITERASSLELASNKKQKLAVTYPDSVQHNETVQNLIKSLDKKNFETVLQPFSEFHNRYYKSDNGKKSSEWLQGKIQEIISASGAKGVTVEPFKHSFPQSSLIAKIPGKSDKTIVLGAHQDSINLDSPSEGRAPGADDDGSGVVTILEAFRVLLTDEKVAAGEAPNTVEFHFYAGEEGGLLGSQDIFEQYSQKSRDVKAMLQQDMTGYTKGTTDAGKPESIGIITDNVDENLTKFLKVIVDAYCTIPTVDSKCGYGCSDHASATKYGYPAAFAFESAFGDDSPYIHSADDTIETVNFDHVLQHGRLTLGFAYELAFADSL

SEQ ID NO: 510 - protein, 388 aa, Aspergillus terreus
MKLSPLMALAGLASAQLALALPQATPSASATPSPTPGDGSFASTNGLQFVIDGETGYFAGSNSYWIGFLTNNADVDLVFTHMKEAGLRILRVWGFNDVNEKPADGTVWFQMHADGQSTINTGADGLQRLDYVVQSAEKHGIKLIVNFVNYWDDYGGMNAYVQAYGGSDNTDFYASKDMQAAYRAYIKAVVSRYLDSPAIFAWELANEPRCQGCAPSVLHDWIDSTSQYIKSLDSKHMTCIGDEGFGLDIGSDGSYPYGYSEGGNFTMSLALPTIDFGTFHLYPSSWGTNNDWGNGWVASHGAACKAAGKPCLFEEYGVTSDHCAVEKPWQMTALNTTGIAADLYWQYGDQLSSGQSPNDGNTIYYGTDEFTCLVTDHIASIGSRATRK

SEQ ID NO: 511 - protein, 396 aa, Aspergillus terreus
MKVPRLLLALGGLASIHIASALPQGAVERDMHATSAVVHGGNVKTKFPSTTGLKFTIDGETGYFAGSNSYWIGFLTNNADVDLVFQHMKESGLKILRVWGFNDVNTKPATGTVWYQLHANGTSTINTGPDGLQRLDYVVHSAERHGIKLIINFVNNWNDYGGINSYLQAYGGASNEDFYNSEPMQKAYRAYIKEVVSRYIDSPAVFAWELANEPRCKGCDTSVLHSWIEKTSRYIKSLDKKHMVTTGEEGFGLDLMSDGSYPFTYVEGGNFTDTLSIPTIDFGTFHLYPSSWGTTNDWGNLWVEAHGAACKAAGKPRLFEEYGVTADHCALEKPWQTTALKTKGVSGDLYWQYGDTLSTGPSPDDGNTFYYGTDEFDCLVSDHVAAIDEMEKHGRH

SEQ ID NO: 512 - protein, 377 aa, Aspergillus aculeatus
MKLSHMLLSLASLGVATALPRTPNHNAATTAFPSTSGLHFTIDGKTGYFAGTNSYWIGFLTNNDDVDLVMSQLAASDLKILRVWGFNDVNTKPTDGTVWYQLHANGTSTINTGADGLQRLDYVVTSAEKYGVKLIINFVNEWTDYGGMQAYVTAYGAAAQTDFYTNTAIQAAYKNYIKAVVSRYSSSAAIFAWELANEPRCQGCDTSVLYNWISDTSKYIKSLDSKHLVTIGDEGFGLDVDSDGSYPYTYGEGLNFTKNLGISTIDFGTLHLYPDSWGTSYDWGNGWITAHAAACKAVGKPCLLEEYGVTSNHCAVESPWQQTAGNATGISGDLYWQYGTTFSWGQSPNDGNTFYYNTSDFTCLVTDHVAAINAQSK

SEQ ID NO: 513 - protein, 360 aa, Aspergillus clavatus
MKLSQILTFASLLSGALAAPGKPHGKPGFASTSGLQFSIDGQTGYFAGSNSYWIGFLTNKADVDIGFNDVNTVPGEGTVYYQLHANGKSTINTGANGLQRMDYVVKSAEKHGIKLIINFVNNWDDYGGMNAYVKGYGAADHNDFYSNAKIQKAYRQYIRAVVSRYTKSDAVFAWELANEPRCKGCDTDVLYDWIKSTSEYIKSLDAKHMVCIGDEGFGLETLSDGSYPFTYVEGSDFARNLAIPTIDFGTFHLYPDSWGTSHEWGNLWTQAHGAACQAAGKPCLFEEYGVTSDHCALETPWQKTSLNTTGVSADLYWQYGDTLSSGPSPNDGHTVYYGTDDFKCMVTDHVAAIKAKQGWV

SEQ ID NO: 514 - protein, 386 aa, Aspergillus flavus
MKLNPSLLTAAGLVSAQLASALPQASSSTVSPSPSPSATPGSFVTTSGLNFVIDGKTGYFAGSNSYWIGFQKNNDDVDLVFSHLQESGLKILRVWGFNDVNQKPTDGSVYYHLLADGTATVNEGEDGLQRLDYVVSSAEKHGIKLIINFVNFWDDYGGINAYVKAFGGSKEDFYTNDAMQAAYRAYIKAVISRYSDSTAIFAWELANEPRCQGCETTVLYNWIESTSQYIKSLDSKHLVCIGDEGFGLDTGSDGSYPYQYSEGSDFAKNLAIPTIDFGTFHLYPSSWGTTNDWGNGWVTSHGAACKEAGKPCLFEEYGVTSDHCAVEKPWQNTALNTTAISGDLYWQYGDQLSGGPSPDDGNTFYYGTDDFKCLVTDHIAAINSRN

SEQ ID NO: 515 - protein, 383 aa, Aspergillus niger
MKLSNALLTLASLALANVSTALPKASPAPSTSSSAASTSFASTSGLQFTIDGETGYFAGTNSYWIGFLTDNADVDLVMGHLKSSGLKILRVWGFNDVTSQPSSGTVWYQLHQDGKSTINTGADGLQRLDYVVSSAEQHDIKLIINFVNYWTDYGGMSAYVSAYGGSGETDFYTSDTMQSAYQTYIKTVVERYSNSSAVFAWELANEPRCPSCDTSVLYNWIEKTSKFIKGLDADRMVCIGDEGFGLNIDSDGSYPYQFSEGLNFTMNLGIDTIDFGTLHLYPDSWGTSDDWGNGWITAHGAACKAAGKPCLLEEYGVTSNHCSVEGSWQKTALSTTGVGADLFWQYGDDLSTGKSPDDGNTIYYGTSDYQCLVTDHVAAIGSA

SEQ ID NO: 516 - protein, 386 aa, Aspergillus oryzae
MKLNPSLLTAAGLVSAQLASALPQASSSTVSPSPSPSATPGSFVTTSGLNFVIDGKTGYFAGSNSYWIGFQKNNDDVDLVFSHLQESGLKILRVWGFNDVNQKPTDGSVYYHLLADGTATVNEGEDGLQRLDYVVSSAEKHGIKLIINFVNFWDDYGGINAYVKAFGGSKEGFYTNDAMQAAYRAYIKAVISRYSDSTAIFAWELANEPRCQGCETTVLYNWIESTSQYIKSLDSKHLVCIGDEGFGLDTGSDGSYPYQYSEGSDFAKNLAIPTIDFGTFHLYPSSWGTTNDWGNGWVTSHGAACKAAGKPCLFEEYGVTSDHCAVEKPWQNTALNTTAISGDLYWQYGDQLSGGPSPDDGNTFYYGTDDFKCLVTDHIAAINSRK

SEQ ID NO: 517 - protein, 383 aa, Emericella nidulans
MKFSQALLSLASLALAAALPHASTPVYTPSTTPSPTPTPSASGSFATTSGIQFVIDGEAGYFPGSNAYWIGFLKNNSDVDLVFDHMASSGLRILRVWGFNDVNTAPTDGSVYFQLHQDGKSTINTGKDGLQRLDYVVHSAEKHGIKLIINFVNYWDDYGGMNAYMRAYGGGDKADWFENEGIQAAYQAYVEAVVKRYINSTAVFAWELANEPRCTGCEPSVLHNWIEKTSAFIKGLDEKHLVCIGDGSDGSYPFQYTEGSDFAAALTIDTIDFGTFHLYPDSWGTNNDWGKLWITSHAAACAAAGKPCLFEEYGVTSNHCAIEKQWQNAALNATGIAADLYWQYGDTLSSGPSPDDGNTFYYGSEEFECLVTNHVETIERSAK

SEQ ID NO: 518 - protein, 373 aa, Neosartorya fischeri
MKFSFLTVASFLIGQVALAALSAKKFASASDLQFTIDGKTGYFAGSNSYWIGFLTNNADVDLVFDHMKESGLKILRVWGFNDVNTVPGQGTVYYQVHANGKSTINTGADGLQRLDYVVHSAEKRGIKLIINFVNNWDDYGGMNAYVKAYGETDHNAFYSNKNIQNAYRRYVKAVVSRYTNSPAVFAWELANEPRCKGCDTEVLYEWIKSTSEYIKKLDKRHMVCIGDEGFGLDLLSDGSYPYTYVEGSNFTRNLAIPTIDFGTFHLYPDSWGTTHEWGNGWAQSHGAACKAAGKPCLFEEYGVTSNHCALETPWQKTSLNTTGVSGDLYWQYGDTLSTGQSPNDGNTIYYGTDEFKCIVKDHVAAIKAKQGWV

SEQ ID NO: 519 - protein, 937 aa, Aspergillus aculeatus
MRALPTTATTLLGVLFFPSASRSQYVRDLGTEQWTLSSATLNRTVPAQFPSQVHMDLLREGIIDEPYNDLNDFNLRWIADANWTYTSGKIEGLGEDYESTWLVFDGLDTFASISFCGQFVGATDNQFRQYMFDVSSILKACPEEPTLGIQFGSAPNIVDAIAQDPSSPTWPEGVQITYEYPNRWFMRKEQSDFGWDWGPAFAPAGPWKPGYVVQLKQAAPVYVRNTDLDIYRLGQINYLPPDQTQPWVVNASLDYLGSLPENPSMAIEVKDLQSGEILASRPLTNITVTEGSVTGVTVLEGVDPKLWWPQGLGDQNLYNVTISVTDGGNQSVAEVTKRTGFRTIFLNQRNITDAQLAQGIAPGANWHFEVNGHEFYAKGSNLIPPDCFWTRVTEDTMTRLFDAVVAGNQNMLRVWSSGAYLHDYIYDLADEKGILLCSEFQFSDALYPTDDAFLENVAAEVVYNVRRVNHHPSLALWAGGNEIESLMLLLVEAADPESYPFYVGEYEKMYISLFLPLVYENTRSISYSPSSTTEGYLDIDLSAPVPMAERYSNTTEGEYYGDTDHYNYDASIAFDYGTYPVGRFANEFGFHSMPSLQTWQQALTDPADLTFNSSVVMLRNHHYPAGGLMTDNYHNTVARHGRNDPGRAGLLPDAQHSVRPRGQLQRLVPRDPALPGGPLQVTNPVLPAGQRAARTPARVPVLAARGHLAGALVGGDRVRRPLEGPHYVARDIYKPVIVSPFWNYTTGALDIYVTSDLWTAAAGSVTLTWRDLSGKPIASNGGLPTKPLPFHVGALNSTRLYRMNMKQQPLPRHEDAILALELTATGSLPNTDEEVTFTHEQWFTPAFPKDLDLVNLRVRVEYDAPLGKFAVEATAGVALYTWLEHPEGVVGYFEENSFVVVPGQKKVVGFVVQADETDGEWVHDVTVRSLWDLNEGE

SEQ ID NO: 520 - protein, 932 aa, Aspergillus clavatus
MRIREQTILALLSPGLPPVTGQHVLDLSEPGWTVSSKALNRTVPGRLPSQVHLDLFEAGVIATMGSMILTFAGLRMPTGRTPATLLLGCELTDHESTWLVFDGLDTFTTITFCDQIIGSTYNQFRQYHFDVSQVLKECKQEGPVLSINFGSAPNIANAIANGPSAEEWPAGVQITNEYPNRWYIRKEQSDFGWDWGPAFAPAGPWKPAYIVQNKNPDRLYVLNTDLDIYRRGQINHLPPDQSQSWVVNASIDVLGSVPQWPSMSVEIKDAYSGVVLSSGLLENVTVSGNSVTGVTVVDGRTPKLWWPNGMGDQSLYNVTIAVHNHRNQVVAEVMKRTGFRTIFLNQRNITEEQLAQGVAPGANWHFEINGREFYAKGSNIIPPDAFWPRVTPSRMERLFDAVTAGNQNMLRVWASGAYLHDFIYDLADEKGILLWSEFQFSDALYPVDDAFLENVAAEVVYNVRRVNHHPSLALWAGGNEIESLMLPMVRRADHKGYAKYVGEYEKLYISLILPLVYENTRSITYSPSSTTEGYLHVNLSAPVPMTERYSNTTPGSYYGDTDYYNYDTSVSFNYHKYPVGRFANEFGFHSMPSLQTWQQAVDPKDLYFNSSVVVLRNHHYTAGGLFTDNYQNSSRGMGEMTMGVESYYPIPSKSDPVANFSAWCHATQLFQADMYKAQIQFYRRGSGMPERQLGSLYWQLEDTWQAPTWAGIEYDGRWKMLHYVARDIYEPIIVSPFWNYTTGDLEVYVTSDLWEPAQGTVNLTWVDLSGKSIAGNAGTPESIPFSVGALNATDVYSANVADLSPPDLTDSILILSLAGEGYLPNARTRSEFRHENQFTPVFPKDLALRDPKLELAYNPDTRTFTVEATAGVSLYTWLDYPAGVVGYFEQNGFVLLPGMKKEIGFVVQEGSVDEDWMRSVTVTSLWDQKVRE

SEQ ID NO: 521 - protein, 926 aa, Neosartorya fumigata
MHVKAETVLALLTPAPPSVVGQHVVDLSGDGWTLSSTALNRTVPGHLPSQVHLDLFEAGVIDIMASMILTFVGLRMPIGRIPATRLKAYFESTWLVFDGLDTFATITFCDQHVGSTDNQFRQHHFDVSQILKECKQDPVLRINFGSAPNIANTIAKSPDAEEWPPGVQITNEYPNRWYIRKEQSDFGWDWGPAFAPVGPWKPSYIVQNSHAELYVLNTDIDIYRQGQINYLPPDQSQPWIVNASIDFLGPVPCKPSMSIEIKDAATGSVLSSGLLQNVTVSGKSITGTTTIDGDAPKLWWPSGMGKQNLYNVTITVQNDMKKSLAKVTKRTGFRTIFLNQRNITDDQLAQGIAPGANWHFEINGYEFYAKGSNIIPPDAFWPRVTQARMARLFDAVTAGNQNMLRVWASGAYLHDFIYDLADEKGILLWSEFQFSDALYPVNDAFLENVAAEVVYNVRRVNHHPSLALWAGGNEIESLMLPMARRADPTGYSKYIGEYEKLYISLILPLVYENTRSITYSPSSTTEGYLYVNLSAPVPMAERYSNTTPGSYYGDTDYYNYDTSVSFDYNHYPVGRFANEFGFHSMPSLQTWQQAVDPEDLQFNSSVVVLRNHHYTAGGLFTDNFKNSSKGMGEMTMGVEAYYPIPSKSDSVANFSAWCHATQLFQADLYKSQIQFYRRGSGMPERQLGSLYWQLEDIWQAPTWAGIEYDGRWKVLHYVARDIYQPIIVSPFWNYTTGRLEVYVTSDLWEPAQGTVNLTWVDLSGKSIANNAGTPETVSFTVGALNTTNIYTTNISELSLPDLKDSILILSLSGEGRLPNASSKKAFVHQNHFTPVFPKDLSLKDPKLEVSYSPESRKFTVQATGGVSLYTWLDYPAGAVGYFEANAFVLLPGVPKEVSFVAQEGNVTDDWLQRVTVQSLWDQKVRD

SEQ ID NO: 522 - protein, 914 aa, Aspergillus flavus
MRFTATAAALVASSIPATLGQHVRDLSNEKWTLSSDALNHTVPGNLPSHAHLDLLKAGVIDDPYHGLNDFNLRWIPESNWTYTTDKIKDLMPIEFCGKYVASTNNQYRQYSFDVSQILEGCNEDPILKIDFGSAPNIVNAIAEDRNSPVWPDGIQQTYEYPNRWFMRKEQSDFGWDWGPAFAPAGPWKPAYIVQLPKAQNIHVLNTDLDIYRKGQINHLPPDQSQPWVVNASIDFVGSLPPNPSMSIEFKDTKSGEILTSKRIGNVTVSGNSVTGVTVLGGVTPKLWWPLGLGDQNLYNITVTVTGHQNQTLAHVTKRTGFRTIFLNQRNITDAQLAQGIAPGANWHFEVNGHEFYAKGSNIIPPDAFWPRVTEARMARLFDAVVAGNQNMLRVWSSGIYLHDFIYDLADERGILLWSEFEFSDALYPVDDAFLDNIAAEVVYNVRRVNHHPSLALWAGGNEIESLMLPTVERKAPEEYAKYVGEYEKLYISLILPLVYQNTRSITYSPSSTTEGYLDVDLSAPVPMVERYHNTTPGSYYGDTDFYNYDSSVSFNSHVYPVGRFANEFGYHSMPSLQTWQQAVDPEDLHFNSTTVMLRNHHYPAGGTFTDNFHNTSLGMGEMTIAVQRYYPIPNKLDSVANFSAWCHATQLFQADMYKSEIQFYRRGSGMPERQLGSLYWQLEDIWQAPSWAGIEYGGRWKVLHYVSRDIYQRIIVSPFWNYTTGDLDLYVTSDLWESAKGKVNLTWLDLSGTPLPHNAGTPGSVPFNVGALNTTKIYSTNIKNLTLPNPKDAILVLSLSGEGHLPNSDKKTTFTHQNHFTPVFPKDLALVDPGLELSYNTKSKTFTVEAKSGVSLYTWLDYPADVVGYFDENAFVLLPGQKKEIGFTVQEDNTDGKWVQGVTVQSLWNQTLEK

SEQ ID NO: 523 - protein, 926 aa, Neosartorya fumigata
MHVKAETVLALLTPAPPSVVGQHVVDLSGDGWTLSSTALNRTVPGHLPSQVHLDLFEAGVIDIMASMILTFVGLRMPIGRIPATRLKAYFESTWLVFDGLDTFATITFCDQHVGSTDNQFRQHHFDVSQILKECKQDPVLRINFGSAPNIANTIAKSPDAEEWPPGVQITNEYPNRWYIRKEQSDFGWDWGPAFAPVGPWKPSYIVQNGHAELYVLNTDIDIYRQGQINYLPPDQSQPWIVNASIDFLGPVPCKPSMSIEIKDAATGSVLSSGLLQNVTVSGKSITGTTTIDGDAPKLWWPSGMGKQNLYNVTITVQNDMKKSLAKVTKRTGFRTIFLNQRNITDDQLAQGIAPGANWHFEINGYEFYTKGSNIIPPDAFWPRVTQARMARLFDAVTAGNQNMLRVWASGAYLHDFIYDLADEKGILLWSEFQFSDALYPVNDAFLENVAAEVVYNVRRVNHHPSLALWAGGNEIESLMLPMARRADPTGYSKYIGEYEKLYISLILPLVYENTRSITYSPSSTTEGYLYVNLSAPVPMAERYSNTTPGSYYGDTDYYNYDTSVSFDYNHYPVGRFANEFGFHSMPSLQTWQQAVDPEDLQFNSSVVVLRNHHYTAGGLFTDNFKNSSKGMGEMTMGVEAYYPIPSKSDSVANFSAWCHATQLFQADLYKSQIQFYRRGSGMPERQLGSLYWQLEDIWQAPTWAGIEYDGRWKVLHYVARDIYQPIIVSPFWNYTTGRLEVYVTSDLWEPAQGTVNLTWVDLSGKSIANNAGTPETVSFTVGALNTTNIYTTNISELSLPDLKDSILILSLSGEGRLPNASSKKAFVHQNHFTPVFPKDLSLKDPKLEVSYSPESRKFTVQATGGVSLYTWLDYPAGAVGYFEANAFVLLPGVPKEVSFVAQEGNVTDDWLQRVTVQSLWDQKVRD

SEQ ID NO: 524 - protein, 931 aa, Aspergillus niger
MRHSIGLAAALLAPTLPVALGQYIRDLSTEKWTLSSRALNRTVPAQFPSQVHLDLLRAGVIGEYHGLNDFNLRWIAAANWTYTSQPIKGLLDNYDSTWLVFDGLDTFATISFCGQQIASTDNQFRQYAFDVSTALGSCKGDPVLSINFGSAPNIVDAIAQDSNSQKWPDDVQLTYEYPNRWFMRKEQSDFGWDWGPAFAPAGPWKPAYIVQLDKKESVYVLNTDLDIYRKGQINYLPPDQSQPWVVNASIDILGPLPTKPTMSIEVRDTHSGTILTSRTLNNVSVAGNAITGVTVLDGLTPKLWWPQGLGDQNLYNVSITVQSRGNQTVASVNKRTGFRTIFLNQRNITEAQRAQGIAPGANWHFEVNGHEFYAKGSNLIPPDSFWTRVTEEKMSRLFDAVVVGNQNMLRVWSSGAYLHDYIYDLADEKGILLWSEFEFSDALYPSDDAFLENVAAEIVYNVRRVNHHPSLALWAGGNEIESLMLPRVKDAAPSSYSYYVGEYEKMYISLFLPLVYENTRSISYSPSSTTEGYLYIDLSAPVPMAERYDNTTSGSYYGDTDHYDYDTSVAFDYGSYPVGRFANEFGFHSMPSLQTWQQAVDTEDLYFNSSVVMLRNHHDPAGGLMTDNYANSATGMGEMTMGVVSYYPIPSKSDHISNFSAWCHATQLFQADMYKSQIQFYRRGSGMPERQLGSLYWQLEDIWQAPSWAGIEYGGRWKVLHHVMRDIYQPVIVSPFWNYTTGSLDVYVTSDLWSPAAGTVDLTWLDLSGRPIAGNAGTPKSVPFTVGGLNSTRIYGTNVSSLGLPDTKDAVLILSLSAHGRLPNSDRTTNLTHENYATLSWPKDLKIVDPGLKIGHSSKKTTVTVEATSGVSLYTWLDYPEGVVGYFEENAFVLAPGEKKEISFTVLEDTTDGAWVRNITVQSLWDQKVRG

SEQ ID NO: 525 - protein, 931 aa, Aspergillus niger
MRHSIGLAAALLAPTLPVALGQHIRDLSSEKWTLSSRALNRTVPAQFPSQVHLDLLRAGVIGEYHGLNDFNLRWIAAANWTYTSQPIKGLLDNYGSTWLVFDGLDTFATISILWTANRIHGQSVSPVSGSMYLPALEACQRRILIRKVSFRGGVTAEVNTCYLHIEWPDDVQLTYEYPNRWFMRKEQSDFGWDWGPAFAPAGPWKPAYIVQLDKKESVYVLNTDLDIYRKNQINYLPPDQSQPWVVNASIDILGPLPAKPTMSIEVRDTHSGTILTSRTLNNVSVAGNAITGVTVLDGLNPKLWWPQSSVIRTSTMFLSLSKVEGTRPWPVWTNGRASAPFFLNQRNITEVQRAQGIAPGANWHFEVNGHEFYAKGSNLIPPDSFWTRVTEERISRLFDAVVVGNQNMLRVWSSGAYLHDYIYDLADEKGILLWSEFEFSDALYPSDDAFLENVAAEIVYNVRRVNHHPSLALWAGGNEIESLMLPRVKDAAPSSYSYYVGEYEKMYISLFLPLVYENTRSISYSPSSTTEGYLYIDLSAPVPMAERYDNTTSGSYYGDTDHYDYDTSVAFDYGSYPVGRFANEFGFHSMPSLQTWQQAVDTEDLYFNSSVVMLRNHHDPAGGLMTDNYANSATGMGEMTMGVISYYPIPSKSDHISNFSAWCHATQLFQADMYKSQIQFYRRGSGMPERQLGSLYWQLEDIWQAPSWAGIEYGGRWKVLHHVMRDIYQPVIVSPFWNYTTGSLDVYVTSDLWSPAAGTVDLTWLDLSGRPIAGNAGTPKSVPFTVGGLNSTRIYGTNVSSLGLPDTKDAVLILSLSAHGRLPNSDRTTNLTHENYATLSWPKDLKIVDPGLKLGYSSKKTTVTVEATSGVSLYTWLDYPEGVVGYFEENAFVLAPGEKKEIGFTVLDDTTNGAWVRNITVQSLWDQKVRG

SEQ ID NO: 526 - protein, 914 aa, Aspergillus oryzae
MRFTATAAALVASSIPATLGQHVRDLSNEKWTLSSDALNHTVPGNLPSHAHLDLLKAGVIDDPYHGLNDFNLRWIPESNWTYTTDKIKDLMPIEFCGKYVASTNNQYRQYSFDVSQILEGCNEDPILKIDFGSAPNIVNAIAEDRNSPVWPDGIQQTYEYPNRWFMRKEQSDFGWDWGPAFAPAGPWKPAYIVQLPKAQNIHVLNTDLDIYRKGQINHLPPDQSQPWVVNASIDFVGSLPPNPSMSIEFKDTKSGEILTSKRIGNVTVSGNSVTGVTVLGGVTPKLWWPLGLGDQNLYNITVTVTGHQNQTLAHVTKRTGFRTIFLNQRNITDAQLAQGIAPGANWHFEVNGHEFYAKGSNIIPPDAFWPRVTEARMARLFDAVVAGNQNMLRVWSSGIYLHDFIYDLADERGILLWSEFEFSDALYPVDDAFLDNIAAEVVYNVRRVNHHPSLALWAGGNEIESLMLPTVERKAPEEYAKYVGEYEKLYISLILPLVYQNTRSITYSPSSTTEGYLDVDLSAPVPMVERYHNTTPGSYYGDTDFYNYDSSVSFNSHVYPVGRFANEFGYHSMPSLQTWQQAVDPEDLHFNSTTVMLRNHHYPAGGTFTDNFHNTSLGMGEMTIAVQRYYPIPNKLDSVANFSAWCHATQLFQADMYKSEIQFYRRGSGMPERQLGSLYWQLEDIWQAPSWAGIEYGGRWKVLHYVSRDIYQPIIVSPFWNYTTGDLDLYVTSDLWESAKGKVNLTWLDLSGTPLPHNAGTPGSVPFNVGALNTTKIYSTNIKNLTLPNPKDAILVLSLSGEGHLPNSDKKTTFTHQNHFTPVFPKDLALVDPGLELSYNTKSKTFTVEAKSGVSLYTWLDYPADVVGYFDENAFVLLPGQKKEIGFTVQEDNTDGKWVQGVTVQSLWNQTLEK

SEQ ID NO: 527 - protein, 783 aa, Aspergillus terreus
MRVPAQATIAVLASAVSSPLNDPQIYDLDDPYHDLNDFNLRWIADANWTYTSDPIRGLGNNTHSTWLVFEGLDTFATIKYCDKQIASTNNQFRQYAFDISEAVKDCTADPVLSLNFGSAPKIVDQIAADPASPQWPFGIQQSYEYPNRWFMRKEQSDFGWDWGPAFAPAGPWKPAYLVQLSSEQNVHVLNTDLDIYRQGQINYLPPDQTQPWVLNASIDFFGSLPSNSSMSIAISETNSGAELTTQSLRNITILNGSITGVAVLKDASPKLWWPYGLGEQNLYNVTITVSDGVRSLARVTKRTGFRTIFLNQRNITDTEIAQGVAPGAHWNFEVNGHEFYAKGSNLIPPDAFWARVTTTKMARLFDSVVAANQNMLRVWSSGAYLPDFMYDLADERGVLLWSEFEFSDAMYPVDKAFLDNVAAEVVYNVRRVNHHPSLALWAGGNEIESLILPTIERSYPDQYAKYVGDYETLYINLILPLVYENTHSITYSPSSTTEGYLDVNLSAKIVMAERYQNLTEGHYYGDTDYYNYDTSVAFDFSQYPVGRFANEFGFHSMPSLQSWQQAVDPEDLHFNSSVIMLRNHHYPAGNLSTHNFHNTSMGMGETTMGVMNYYPVPDKTDPIANFSAWCHATQLFQADFYKSQIQFYRRGSGMPERQLGSLYWQLEDIWQAPSWAGIEYDGRWKVLHYVARDIYQPVIVSPFWNSTTRRLDVYVTSDLWEPVSGTVDLAWMDLSGKPIAQNARTPKTAAFVVGALNTTKIYSMNINERALPDPKNSVLIFPG

SEQ ID NO: 528 - protein, 940 aa, Emericella nidulans
MHFHGIATQAVLASNITTGSGRHVSLSDVKWTLSSSALNSTVPASLPSQAHLDLLNAGVIDDPYYGLNEIDLQWIAQANWTYTSDPIPDLLEEYESTWLVFEGLDTFATVTFCGHNIASTNNQFRQYAFDVSSALKECTGGPVVRIDFASAPNTVDAIAADPKTPVWPVQLTAQLPNRWLMRKQQSDFGWDWGPAFAPCGPWKPAYVVQLEKTAPIHVLNTDLDIYRQGNINHLPPDQKQPWVVNASIDFIGRLPAEPRLLIEIKELETGDVLASQISDSVTLIGTSITGVTTLKDASPKLWWPSSLGAQNLYNVTITVFNKTEEVARITKRTGFRTIFLNQRNITATQLSQGIAPGANWHFEVNGKEFYAKGSNFIPPDTFWPRVTKQKMTRLLDAVVAGNQNMLRIWSSGAYLPDFIYDLADERGILLWSEFQFSDSMYPVDEDFLDNVAQEVVYNVRRVNHHPSLALWAGGNEIESLMLPLTREADPDNYPKYLAEYEKLYISLILPLVYENTRSISYSPSSTTEGYLSVNLSAPVPMTERYENDEPGAYYGDTDYYNYDTTVSFDYSIYPVGRFANEFGFHSMPSLQTWQQVADPEDLYFNSTTVVIHNRHYTSEGYGRIENSSRGMAEMTLGVERYYPIPDNPDSVANFSAWCLATQLFQADFYKSQIQFYRRGSGMPERQLGSLYWQLEDIWQGPTWAGIEYDGRWKVLHYVARDVYQPIIVSPFWNYTTGDLEIYVTADLWESAAGTVNLKWLNLSGEQIIDNAGTPTEIPFTVGAINTTKVYSTNIHDLNLPDTRASILTLSLSSQANLPNAAVKTSLTHENHFTPSFPKDLELVNPGLELSYDAHSGIFTVEAKSGVSLYTWLDYPAGLVGYFTENAFLLVPGQKKKVQFVVQDGPKDQDWEWQSEVTVRSLWDQKSSTFLYALRVATGRP

SEQ ID NO: 529 - protein, 930 aa, Neosartorya fischeri
MHVKAETVLALLTPGLPSVVGQHVVDLSGDGWTLSSTALDRTVPGHLPSQVHLDLFEAGVINITASMILTFVGLLMPIGRIPATRLKACDLENFESTWLVFDGLDTFTTITFCDQHVGSTDNQFRQYHFDVSQILKECKQDPVIRINFGSAPSIANAIAKSPDAEEWPPGVQITNEYPNRWYIRKEQSDFGWDWGPAFAPVGPWKPSYIVQNNHAELYVLNTDLDFYRQGQINYLPPDQSQPWIVNASIDILGPVPWKPSMSIEIKDAATGSVLSSGLLQNVTVSGNSITGTTTIDGDAPKLWWPSGMGEQNLYNVTVTVQNDKKKSLAKVTKRTGFRTIFLNQRNITDDQLAQGIAPGANWHFEINGHAFYAKGSNIIPPDAFWPRVTQARMARLFDAVTAGNQNMLRVWASGAYLHDFIYDLADEKGILLWSEFQFSDALYPVNDAFLENVAAEVVYNVRRVNHHPSLALWAGGNEIESLMLPMVKRADPTGYSKYVGEYEKLYISLILPLVYENTRSITYSPSSTTEGYLYVNLSAPVPMAERYSNTTPGSYYGDTDYYNYDTSVSFDYNHYPVGRFANEFGFHSMPSLQTWQQAVDPEDLHFNSSVVMLRNHHYTAGGLFTDNFKNSSKGMGEMTMGVEAYYPIPSKSDSVANFSAWCHATQLFQADMYKSQIQFYRRGSGMPERQLGSLYWQLEDIWQAPTWAGIEYDGRWKVLHYVARDIYQPIIVSPFWNYTTGRLEVYVTSDLWEPAQGTVNLTWVDLSGKTIANNAGTPETVNFTVGALNTTNIYTTNISELSLPDLKDSILILSLSGEGRLPNTSSKKAFVHQNHFTPVFPKDLSLKDPKLEISYSPESRKFTVQATGGVSLYTWLDYPAGAVGYFEENAFVLLPGVQKEVSFAAQEGNVTDDWVRRVTVQSLWDQKVRD

SEQ ID NO: 530 - protein, 845 aa, Aspergillus clavatus
MAALQRFPLSKGWSFKDSEDKSEDAWMPVPVVPSVVQQDLQANNKLKDPYIGFNELETRWVNEKSWTYKTTFQKPAVPAGSAIFLAFDGLDTFATVKLDGNVILESDNMFLAHRLDVTKALEAEGDHSLEIDFDCAFLRAKELRKQDSKHNWASFNGDPSRLSVRKSQYHWGWDWGPVLMTAGIWREVRLEVYTARVADLWTDVQLASDHQNAQITAFAEVESVNSDAHKARFTLSLHGQELGREEVSVSEDGSAKVSFDVKSPSLWWPHGYGDATLYEVSVSLVKDQDEVHQVSKKFGIRTAEVVQQPDKHGKSFFFRVNGVDIFCGGSCWIPADNYLPSVTADRYRKWIELMVHGRQVMIRVWGGGNYEDDSFYDACDELGVLVWQDFMFGCGNYPTWPNLLESIRKESVYNVRRLRHHPSIVVWVGNNEDYQVQESAGLTYDFEDKNPENWLKTDFPARYIYEKILPEVVEEYSPSTFYHPGSPWGDGKTTSDPTVGDMHQWNVWHGTQEKYQIFDTLGGRFNSEFGMEAFPHMSTIDYFVENEADKFPQSHVLDFHNKADGHERRIATYLVENLRTATDLETHVYLTQVVQAETMMFGYRGWRRQWGDERHCGGALLWQLNDCWPTISWAIVDYFLRPKPAFYAVARVLNPIAVGVRREHHDWSVTHAQPPKTSKFELWVASSLQKEVQGTVELRFLSINTGLEVRERIVHENVSIVPNGTTNLIVDGLIDYKVHPEPHVLAVRIWVNGELVARDVDWPQPFKYLDLSNRGLEVKLVSESENEQTLLLSAQKPVKCLVFEEREGVRISDSAIDIVPGDEQRVTIKGMKPGDAPLKYKFLGQ

SEQ ID NO: 531 - protein, 845 aa, Neosartorya fumigata
MSKLQQFPLSKGWSFRDNEATSEDAWMPVPVVPSVVHQDLQANNKLKDPYIGFNELEARWVNEKSWTYKTVFQKPAAPAGSCIVLAFDGLDTFAKVKLDGNVILENDNMFLARRVDVTKALEAEGDHVLEIDFDCAFLRAKELRKQDPRHNWASFNGDPSRLSVRKAQYHWGWDWGPVLMTAGIWREVRLEVYSARVADLWTEVQLASDHQSAQVTAFVEVESVHSGSHRACFTLSLHGQEITREEIGVTENGTAKATFDVKEPSLWWPHGYGDATLYEVSVSLVKEQEELHRVSKKFGIRTAEVIQRPDKHGKSFFFRVNGVDIFCGGSCWIPADNLLPSITAERYRKWIELMVHGRQVMIRVWGGGIYEDYSFYDACDELGVLVWQDFMFGCGNYPTWPNLLESIRKESVYNVRRLRHHPSIVIWVGNNEDYQVQEQAGLTYNYEDKDPENWLKTDFPARYIYEKLLPEVVQEYSPGTFYHPGSPWGDGKTTSDPTVGDMHQWNVWHGTQEKYQIFDTLGGRFNSEFGMEAFPHMSTIDYFVENEADKYPQSHVLDFHNKADGHERRIATYLVENLRTATDLETHIYLTQVVQAETMMFGYRGWRRQWGDERHCGGALLWQLNDCWPTISWAIVDYFLRPKPAFYAVARVLNPIAVGVRREHHDWSVTHAQPPKTSKFELWVASSRQQEIQGTVELRFLSVNTGLEVRERIVHENVSIVPNGTTNLIVDGLIDHTVHSEPHVLAARIWVDGQLVARDVDWPQPFKYLDLSDRGLEVKKISESEDEQTLLISTKKPVKCLVFEEREGVRISDSAMDIVPGDDQRVTIKGLKPGDAPLKYKFLGQ

SEQ ID NO: 532 - protein, 844 aa, Aspergillus flavus
MAAFSQYPLSTGWSFKDSDDQSPEAWMPVPVVPSVAHQDLQANQKLKNPYIGFNELDARWVNDKSWTYRTVFQKPAVAAGSSIILAFDGLDTFATVKLDGSVILQSDNMFLAHRVDVTKALEAEGDHVLEIDFDCAMRRARELREKDTKHNWASFNGDPARMAVRKAQYHWGWDWGPLLSTAGIWREVRLEVYSAKISDLWTEVELASDHQTARVSAFTEVDAADSVDSYKASFLLSLHGKEVAREVATLKDKVAKVTFDVTQPSLWWPNGYGDPALYEISVSLEKEDCEIHSVSKKIGIRTAELIQQPDRHGKSFFFRINGVDVFCGGSCWIPADNLLPSITAERYRKWIELMVAGRQVMIRVWGGGCYEDDSFYQACDELGVLVWQDFMFGCGNYPTWPELLESIEKEANYNVRRLRHHPSIVVYVGNNEDYQVQESAGLVYDYEDKNPENWLKTDFPARYIYEKLLPSVVEKLSPKTVYHPGSPWGDGKITSDPTVGDMHQWNVWHGTQEKYQIFDTLGGRFNSEFGMEAFPHMSTIEYFVENEADKYPQSHVLDFHNKADGHERRIATYLVENLRTATDLETYVYLTQVVQAETMMFGYRGWRRQWGDERHCGGALLWQLNDCWPTISWAIVDYFLRPKPAFYAVARVLKPIAVGVRREHHDWSVTHAQPPKTSKYELWIASSLQKETVGTIELRFLSVNTGLDVRAPILRDNVKIVPNGTTNILEGVINHKAQPEPHVLAARLWVDGEVTARDVDWPQPFKYLDLSDRGLEVNKVSESGNEQKLLITAKKPVKCLVFEERDGIRVSDSAMDIVPGDGQTVTVTGLKAGDAPLKYKYLGQ

SEQ ID NO: 533 - protein, 845 aa, Neosartorya fumigata
MSKLQQFPLSKGWSFRDNEATSEDAWMPVPVVPSVVHQDLQANNKLKDPYIGFNELEARWVNEKSWTYKTVFQKPAAPAGSCIVLAFDGLDTFAKVKLDGNVILENDNMFLARRVDVTKALEAEGDHVLEIDFDCAFLRAKELRKQDPRHNWASFNGDPSRLSVRKAQYHWGWDWGPVLMTAGIWREVRLEVYSARVADLWTEVQLASDHQSAQVTAFVEVESVHSGSHRACFTLSLHGQEITREEIGVTENGTAKATFDVKEPSLWWPHGYGDATLYEVSVSLVKEQEELHRVSKKFGIRTAEVIQRPDKHGKSFFFRVNGVDIFCGGSCWIPADNLLPSITAERYRKWIELMVHGRQVMIRVWGGGIYEDNSFYDACDELGVLVWQDFMFGCGNYPTWPNLLESIRKESVYNVRRLRHHPSIVIWVGNNEDYQVQEQAGLTYNYEDKDPENWLKTDFPARYIYEKLLPEVVQEYSPGTFYHPGSPWGDGKTTSDPTVGDMHQWNVWHGTQEKYQIFDTLGGRFNSEFGMEAFPHMSTIDYFVENEADKYPQSHVLDFHNKADGHERRIATYLVENLRTATDLETHIYLTQVVQAETMMFGYRGWRRQWGDERHCGGALLWQLNDCWPTISWAIVDYFLRPKPAFYAVARVLNPIAVGVRREHHDWSVTHAQPPKTSKFELWVASSRQQEIQGTVELRFLSVNTGLEVRERIVHENVSIVPNGTTNLIVDGLIDHTVHSEPHVLAARIWVDGQLVARDVDWPQPFKYLDLSDRGLEVKKISESEDEQTLLISTKKPVKCLVFEEREGVRISDSAMDIVPGDDQRVTIKGLKPGDAPLKYKFLGQ

SEQ ID NO: 534 - protein, 844 aa, Aspergillus niger
MAAFAQYTLSTGWYFKDRDELASEAWMPVPVVPSVVHQDLQANGKLKNPYVGFNELDARWVNEKSWTYRKILQKPTVLAGSRIVLAFDGLDTFAKVKLDNNIILESSNMFQAYRVDVTKALDCGDEHVLEIEFDCAMLRAQELRKQDPNHNWASFNGDPARMSVRKAQYHWGWDWGPVLMTAGIWRAVRLEVYSTRLADLWTEINLDPTHKTASISAFTELESVDLDPSYKVKFTITLHGKQIAQAEATPQEGRAKVEFNIDQPCLWWPHGYGDSTLYEVSASLNADQLELHRVTKKIGIRTAEVVQRPDKHGKSFFFRINGVDIFCGGSCWIPADNLLPNISPQRYRKWIQLMVAGRQAMIRVWGGGCYEDDSFYEACDELGVLVWQDFMFGCGNYPTWPELLKSIEQEAIYNVRRLRHHPSIVVYVGNNEDYQVQEQAGLEYNYEDKNPENWLKTNFPARYIYEELLPSVVERCSPKTFYHPGSPWGDGKITSDPTVGDMHQWNVWHGTQEKYQIFDTLGGRFNSEFGMEAFPHLSTIEYFVENEKDKYPQSHVLDFHNKADGHERRIATYLVENLRTATDLETYIYLTQVVQAETMMFGYRGWRRQWGDERHCGGALLWQLNDCWPTISWAIVDYFLRPKPAYYAVARVLNPVAVGVRREHHDWSITHAQPPKTSKYELWVVSSLQKPASGKVELRFLSVDTGREIRERIVRENVDIVPNGTTNLITDGLIDHTVDAEPHVLAARLWVDGEIVARDVDWPQPFKYLDFADRGLEVKRVSEASDQQVFQISTEKPVKCLVFEERDGVKFSDSAMDIVPGDVQTVKVTGLRADEKLKYKFLGQ

SEQ ID NO: 535 - protein, 833 aa, Aspergillus oryzae
MAAFSQYPLSTGWSFKDSDDQSPEAWMPVPVVPSVAHQDLQANQKLKNPYIGFNELDARWVNDKSWTYRTVFQKPAVAAGSSIILAFDGLDTFATVKLDGSVILQSDNMFLAHRVDVTKALEAEGDHVLEIDFDCAMRRARELREKDTKHNWASFNGDPARMAVRKAQYHWGWDWGPLLSTAGIWREVRLEVYSAKISDLWTEVELASDHQTARVSAFAEVDAADSVDSYKASFLLSLHGKEVAREVATLKDKVANVTFDVTQPSLWWPNGYGDPALYEISVSLEKEDCEIHSVSKKIGIRTAELIQQPDRHGKSFFFRINGVDVFCGGSCWIPADNLLPSITAERYRKWIELMVAGRQVMIRVWGGGCYEDDSFYQACDELGVLVWQDFMFGCGNYPTWPELLESIEKEANYNVRRLRHHPSIVVYVGNNEDYQVQESAGLVYDYEDKNPENWLKTDFPARYIYEKLLPSVVEKLSPKTVYHPGSPWGDGKITSDPTVGDMHQWNVWHGTQEKYQIFDTLGGRFNSEFGMEAFPHMSTIEYFVENEADKYPQSHVLDFHNKADGHERRIATYLTYVYLTQVVQAETMMFGYRGWRRQWGDERHCGGALLWQLNDCWPTISWAIVDYFLRPKPAFYAVARVLKPIAVGVRREHHDWSVTHAQPPKTSKYELWIASSLQKETVGTIELRFLSVNTGLDVRAPILRDNVKIVPNGTTNILEGVIDHKAQPEPHVLAARLWVDGEVTARDVDWPQPFKYLDLSDRGLEVNKVSESGNEQKLLITAKKPVKCLVFEERDGIRVSDSAMDIVPGDGQTVTVTGLKAGDAPLKYKYLGQ

SEQ ID NO: 536 - protein, 843 aa, Aspergillus terreus
MASFFQQSLATGWSFKDAEDNSAEAWMPVAQVPSVVHQDLIANNKLQDPYVGFRELDARWVNEKSWTYRTVFQKPAVPAGSSVILAFDGLDTFAKVKLNGNVILESNNMFLAHRIDVTKALGADGDHVLEIDFDCAMLRARELRAKDPQHKWVGFNGDPARMGVRKAQYHWGWDWGPVLMTAGIWRDVRLEVYTARVADLWTETDLAVDHHAAQISAFAQVEGAISSSKVNFILSLHGQEVARAVAEPQDQVAKVAFDVQQPSLWWPNGYGDPTLYEISATLDQDGATVHQISKKIGIRTAEVVQRPDKHGKSFFFRINGVDIFCGGSCWIPADNLLPSISAERYRKWIELMVHGRQVMIRVWGGGCYEDDSFYQACDELGVMVWQDFMFGCGNYPTWPEMLESVEKEAIYNVRRLRHHPSIVVYVGNNEDYQVQEQQGLTYNFEDKDPQNWLKSDFPARYIYEKILPEVVQRYSPSTFYHPGSPWGDGKITSDPTVGDMHQWNVWHGTQEKYQIFDTLGGRFNSEFGMEAFPHMSTIEYFVENEKDKYPQSHVLDFHNKADGHERRIATYLVENLRTATDLETYIYLTQVVQAETMMFGYRGWRRQWGDERHCGGALLWQLNDCWPTISWAIVDYFLRPKPAFYAVARVLNPIAVGVRREHHDWSVTHAQPPKKSKFELWVASNLQKETRGMVELKFLSVDTGREIRERIVREDVIIVPNGTTDIIVDGVIDHQEYAEPHVLAARLWVDGKIVARDVDWPQPFKYLDLSGRGLEVKTVSTSDDQQTLLISAQKPVKCLVFEERDGVRVSDSAMDIVPGDEQTVTITGLKADAPPLKYKYLGQ

SEQ ID NO: 537 - protein, 843 aa, Emericella nidulans
MGAFTQHVLSEGWSFKDSGDQSPDAWLSVPTVPSVVHQDLQANGKLDDPFIGLNELSARWVNEKSWTYRNVFQKPTVPAGSSIFLVFDGLDTFAKVKLDGQVILESDNMFLAHRVDITKALDVEGEHTLEIDFDCALLRARELRKQHPDHKWVGFNGDTARLSVRKAQYHWGWDWGPVLMTAGIWKEVRLEVYSAKISDLWTEVHLAEDHSKARITAAAEVETQGTGNSYKATFTLSLQGQQIGKEVATLDGNVAKTTFDVQEPSLWWPNGYGDQTLYEISVSLEKEEEQAHQVSKKFGIRTAEVIQRPDKHGKSFFFRINGVDIFCGGACWIPADSLLTNITPDRYRKWIELMAVGHQVMIRVWGGGIYEDESFYQACDEVGVMVWQDFMFGCGNYPTWPEILESIEKEAEYNLRRLRHHPSIVIWVGNNEDYQVQEQQGLTYNYADKDPESWLKTDFPARYIYEHLLPKAVQKIIPSAYYHPGSPWGDGKITSDPTVGDMHQWNVWHGTQEKYQIFDTLGGRFNSEFGMEAFPHMSTIDHFVTNEADKYPQSHVLDFHNKADGHERRIATYLVENLRTATDLEVYIYLTQVVQAETMMFGYRGWRRQWGDERHCGGALLWQLNDCWPTISWAIVDYFLRPKPAFYAVSRVLKPLAIGVRREHHDWSVSHAQPPKTSKYELWVVSSLLKEVIGKVELRFISIKTGLAIHESIVRENVTIVPNGTTNILDGVIDHAVDEPHVLAARLWVDGELVARDVDWPQPFKYLDLSDRGLEITRISKTESEQVLELSARKPVKCLVFEERDNVRVSDSAIDIVPGDEQFVTIKGLKRSDAPLKYKFLGQ

SEQ ID NO: 538 - protein, 845 aa, Neosartorya fischeri
MSKLQQFPLSKGWSFRDSEDTSEDAWMPVPVVPSVVHQDLQANSKLKDPYIGFNELEARWVNEKSWTYKTVFQKPAAPAGSCIVLAFDGLDTFAKVKLDGNVILENDNMFLARRVDVTKALEAEGDHVLEIDFDCAFLRAKELRKQDPKHNWASFNGDPSRLSVRKAQYHWGWDWGPVLMTAGIWRDVRLEVYSARVADLWTEVQLASDHQSAQVTAFAEVESVHSGSHRACFTLSLHGQEIAREEIGVTENGTAKATFDVKEPSLWWPHGYGDATLYEVSVSLRKEQEELHKVSKKFGIRTAEVVQRPDKHGKSFFFRVNGVDIFCGGSCWIPADNLLPSITAERYRKWIELMVHGRQVMIRVWGGGIYEDNSFYDACDELGVLVWQDFMFGCGNYPTWPNLLESIRKESVYNVRRLRHHPSIVIWVGNNEDYQVQEQAGLTYNYEDKDPESWLKTDFPARYIYEKLLPEVVQEFSPSTFYHPGSPWGDGKTTSDPTVGDMHQWNVWHGTQEKYQIFDTLGGRFNSEFGMEAFPHMSTIDYFVENEADKYPQSHVLDFHNKADGHERRIATYLVENLRTATDLETHIYLTQVVQAETMMFGYRGWRRQWGDERHCGGALLWQLNDCWPTISWAIVDYFLRPKPAFYAVARVLNPIAVGVRREHHDWSVTHAQPPKTSKFELWVASSRQQEVQGTVELRFLSVNTGLEVRERIVHENVSIVPNGTTNLIVDGLIDHRVHSEPHVLAARIWVDGQLVARDVDWPQPFKYLDLSDRGLEIKKISESEDEQTLLISTQKPVKCLVFEEREGVRISDSAMDIVPGDDQRVTIKGLKPGDAPLKYKFLGQ

SEQ ID NO: 539 - protein, 387 aa, Emericella nidulans
MRLIHAVLGLLAGAAPALVAASPAAPIGNGRDQVSKAVGRHFEIDGKVQYFAGTNCWWLGNLLNDFEVELAVSQIAETGYKVVRTWGFFGVNDPSNPGQPVYYQVLNESLYEGGLGINYGSNGIRRLDTVVSLAERYDIQLVLTFMNNWNDFGGINIYSNAFGSNATTWYTDKKSQRAYREYIKFIVNRYKGSSAIFAWELGNEPRCKGCDPSVIYNWAKSVSAYIKKLDKKHMVALGDEGWLCPPEGDGTYAYDCSEGVDFVKNLEIETLDYGTFHLYPESWGYNYSWGSEWVLQHDAIGKRFNKPVVFEEYGTPLNHTQLERPWQLTTVKETQVAADFIWQFGTVLPVEGTEWGDVNSIYYGTEEYEVLAVQHAWEMARKKVPRH

SEQ ID NO: 540 - protein, 406 aa, Aspergillus terreus
MLINFEKVLSLALLAGSVSGRKHVPRGFVTTSGMKFQLDGKDFYFAGSNAYYFPFNDNQTDVELGLAAAKQAGLTVFRTWGFNDKNATYIEGGLPAYGGEGAGTTEVVFQRWANGTSTIDLEPFDKVVNAAKNTGMKLVVALTNNWADYGGMDVYTINLGGQYHDDFYRLPAIKKAYKRYVKEMVTRYRDSPAIMAWELANEPRCGADGVRNLPRSADGCNPEVLTAWIDEMSTYIKKLDPHHLVTWGGEGGFNIESDDWAYNGADGGDFDNELALPNIDFGVFHSYPDWWSKTVSWTNQWIRDHAAAMRTGRKPVVHEEYGWLTPEARLEYLGTVSNITRLEAVGGWQQISVSEKMSDMYWQYGYSGYSYGRNHNDGFTIYLDDPEAKELVYKHAKEVKKLNRRH

SEQ ID NO: 541 - protein, 399 aa, Emericella nidulans
MIFSTLLSLALLATTATARKGFVTTKGDKFQLDGKDFYFAGSNAYYFPFNNNQTDVELGLSAAKKAGLLVFRTWGFNDKNVTYIEDGLPQYGGEGAGTTEVVFQWWQNGTSTIDLEPFDKVVNAAAKTGIKLIVTLVNNWADYGGMDVYTVNLGGQYHDDFYRLPQIKKAYKRYVKEMVTRYRNSPAIMAWELANEPRCGADGVRNLPASDECTPELLTSWIDEMSTYVKRLDPHHLVTWGGEGGFNYDSDDWAYNGSDGGDFEAELKLKNIDFGVFHSYPDWWSKTVEWTNKWIVDHARAARRVGKPVVHEEYGWLTPQGRLDNLGTVSNITRLEAVGGWQSISLREKMSDMFWQFGYSGYSYGRNHDDGFTIYLDDAEAQELVYKHAKEVNKLNRRR

SEQ ID NO: 542 - protein, 381 aa, Emericella nidulans
MKHLLSLVCTLGAATLAASAAAEAGSMPSANGLDFVIDGEASYFAGSNAYWLSFLTNNADVDLALDHFAESGLKILRIWGFSDVTAEPSDNKVYFQLHQNGSSTVNTGPNGLERLDYIISGAEKRGIKLVIPLVNYWDDFGGMNAYISAYGGDKPGWYTNDKIQAAYHAYVKAVVSRYVDSPAIFAWELANEPRCSGCDTSIINQWATKTSSFIKSLDPNHMVAMGDEGMGLPGDSNYPYSYYEGNDFALNLAIPDIDFGTLHLYTTDWGVSNNSWGNKWVQDHAAVCKSAGKPCLFEEYGMKGNHCTYELAWQKTALATPGMAADLFWQFGENLSSGQTHNDKYTVYYGSNEWKCVVSDHVAAVAVRRYRLPVGGGQHGP

SEQ ID NO: 543 - protein, 355 aa, Emericella nidulans
MKFSQLILPFSAALSLVGSGVATPTTKPVNPRASRPARNLLAHLVRSAGNGTTLSGQQELKDADWVTDNVGFSPVILGVDLMDYSPSRVEFGAVSTSIEDAITYATQGGIITICWHWGELSHDWMTDERLTTLLTLGSPSGTYNTTEQPWWSNFYTEATSFNLSAAMNPASRDYKLILRDIDAIAEQLARLKDIPVLFRPLHEAEGGWFWWGATGAEPCKALYRLLFDRLTKKHGLNNLLWVWNSKDPLWYPGNEYVDVVSVDVYADNGDHSSQLEAYQALQGLTGNFSKLIALGEVGNIPDPELMREDGAQWAYWVTWNGDFIRGETKNPMEFKKAVYASELVYTLDEIQGWNL

SEQ ID NO: 544 - protein, 436 aa, Aspergillus clavatus
MRSLSSVALLSAIGAASAQAGPWGQCAGISHTGPTTCESGWSCVYLNDWYSQCQPGAATSSSTTVSSTKQPSSTVAAPSSTTSAHTLPTGSGSFAKTDGLKFNIDGKTKYFAGTNAYWLPFLTNNADVDAVFDHLQQTGLKILRTWGFNDVNTIPGSGTVYFQLHDKATGTSTINTGANGLQRLDYVISAAEKHGIKLIIPFVNNWDDYGGMNAYINAYGGSKTEWYTNEKIQSVYQAYIKAIVSRYRDSPAIFAWELGNEPRCKGCSTDVIYNWVAKTSAYIKSLDPNHMVTTGEEGMGLTVDSDGSYPYSKDEGSDFARNLAAPDIDFGVYHLYVADWGVSDNAWGNRWIKSHAKVCEAAGKPCLFEEYGIKDDHCGDSLKWQKTSLTTTANSADLFWQYGQQLSTGASPNDHYTIYYGTDDWKCAVIDHISQI

SEQ ID NO: 545 - protein, 438 aa, Neosartorya fumigata
MHPLPSVALLSAIGAVAAQVGPWGQCGGRSYTGETSCVSGWSCVLFNEWYSQCQPATTTSTSSVSATAAPSSTSSSKESVPSATTSKKPVPTGSSSFVKADGLKFNIDGETKYFAGTNAYWLPFLTNDADVDSVMDNLQKAGLKILRTWGFNDVNSKPSSGTVYFQLHDPSTGTTTINTGADGLQRLDYVVSAAEKRGIKLLIPLVNNWDDYGGMNAYVKAYGGSKTEWYTNSKIQSVYQAYIKAVVSRYRDSPAIMAWELSNEARCQGCSTDVIYNWTAKTSAYIKSLDPNHMVATGDEGMGVTVDSDGSYPYSTYEGSDFAKNLAAPDIDFGVFHLYTEDWGIKDNSWGNGWVTSHAKVCKAAGKPCLFEEYGLKDDHCSASLTWQKTSVSSGMAADLFWQYGQTLSTGPSPNDHFTIYYGTSDWQCGVADHLSTL

SEQ ID NO: 546 - protein, 463 aa, Aspergillus flavus
MRSLSSIALLSVVGAASAQAGPWAQCGGKSFSGSSECASGWKCQELNEWFSQCVPGAESTTPTVSSTPTPTDAPSVSITASATTGINKSISVSSASKSTPLPSSSSASPSPRPTGSGSFAKADGLQFSIDGETKYFAGTNAYWLPFQMNDADIDSVFDHLEQAGLKILRVWGFNDVNTAPSPGTVYFQLHDKEKSTSTINTGKDGLQRLDYVVAAAEKHGVKLIIPFVNSWDDYGGYNAYVKAYGGSKTEWFTNEKIQSVYQAYIKAVVSRYRDSPAIFAWELGNEPRCSGCSTDVIHGWATKISAYIKSLDPNHMVALGDEGMGLTIGSDQSYPYGTSEGNDFEKNLAIPDIDFGTLHLYTTDWGIKDNAWGNGWVENHAKACKAAGKPCLFEEYGMKGNHCTDELKWQKTSLSSGTAADLIWQYGQQLSTGESPKDAYSIFYGTDEWKCAVMDHMENVNKN

SEQ ID NO: 547 - protein, 438 aa, Neosartorya fumigata; identical to SEQ ID NO: 545

SEQ ID NO: 548 - protein, 463 aa, Aspergillus oryzae
MRSLSSIALLSVVGAASAQAGPWAQCGGKSFSGSSECASGWKCQELNEWFSQCVPGAESTTPTVSSTPTPTDAPSVSITASVTTGINKSISVSSASKSTPLPSSSSASPSPRPTGSGSFAKADGLQFSIDGETKYFAGTNAYWLPFQMNDADIDSVFDHLEQAGLKILRVWGFNDVNTAPSPGTVYFQLHDKEKGTSTINTGKDGLQRLDYVVAAAEKHGVKLIIPFVNSWDDYGGYNAYVKAYGGSKTEWFTNEKIQSVYQAYIKAVVSRYRDSPAIFAWELGNEPRCSGCSTDVIHGWATKISAYIKSLDPNHMVALGDEGMGLTIGSDQSYPYGTSEGNDFEKNLAIPDIDFGTLHLYTTDWGIKDNAWGNGWVENHAKACKAAGKPCLFEEYGMKGNHCTDELKWQKTSLSSGTAADLIWQYGQQLSTGESPKDAYSIFYGTDEWKCAVMDHMENVNKN

SEQ ID NO: 549 - protein, 433 aa, Emericella nidulans
MKRQALTLIPLLGAAAAQSGPYGQCGGNDWSGATTCVSGYVCVYQNEWYSQCVPGTATSSSTTLTTTTSATTRTTTTTTSTTSVPSSTNFPSASGLNFTIDGVTDYFAGSNSYWISMLTNDADVDLVLDHIASSGHKILRIWGFNDVNTEPSTGQVWFQKHQGGVSTINTGQYGLQRLDAVVSSAEKRGIKLIINFVNNWDDYGGMSAYLNAYGGSTKTDWYTSATIQAAYRTYIKAVIDRFIDSPAIFAWELANEPRCNGCDTSILYDWIADTSAYIKSLDPLHMVCIGDEGFGLDEGSDGSYPFSYNEGLDFAANLAIDTIDFGTFHLYPGSWGVSYDWGNLWAITHGAACATAGKPCLFEEYGAPSDHCAIEVPWQTTAVSSTGIAGDLFWQWGDTLSTGQTHNDGNTIYYGSDEYTCMVTEHMERIAAR

SEQ ID NO: 550 - protein, 456 aa, Neosartorya fischeri
MRPLSSAALLSAIGAVAAQVGPWGQCGGQSYTGGTSCVSGWACVFLNDWYSQCQPGAEYTPPLCGRNDNPNIFQATTTSTSVSATAPPSSTSSSTASVSSSTSSTPIPTSSGSFVKAEGLKFNIDGETKYFAGTNAYWLPFLTNNADVDSVFDHLQQTGLKILRTWGFNDVNSVPNPGTVYFQLHDPSTSTTTINTGADGLQRLDYVVSAAEKHGIKLLIPLVNNWDDYGGMNAYIKAYGGSKTEWYTNSKIQSVYQAYIKAVVSRYRDSPAIMAWELSNEARCQGCSTDVIYNWATKTSAYIKSLDPNHMVATGEEGMGLTVDSDGSYPYSTYEGSDFEKNLAIPHIDFGVFHLYTADWGITDNSWGNRWVTSHAKLCEAAGKPCLFEEYGLKDDHCSAAVVWQKTSLTTAGMAADLFWQYGQTLSTGQSPNDRYTIYYGTSDWQCAVIDHVSRI

SEQ ID NO: 551 - protein, 322 aa, Aspergillus clavatus
MFARQPLRFAQPLKQGFRKYSTEAPAKGKSSLAPIYISVGLAGLGVGLYRYSTASAETPVVDRPKVFTGGEQGWVDLKLSEIENLSHNTKRLRFEFADKEAVSGLQVASALLTKFKPAEGKPVIRPYTPVSDEDQPGYLDLVVKVYPNGPMSEHLHSMNVDQRLEFKGPIPKYPWETNKHKHICLIAGGTGITPMYQLARQIFKNPEDQTKVTLVFGNVSEEDILLKKELQELENTHPRRFKAFYVLDNPPKEWTGGKGYVTKELLKTVLPEPKEEDIKIFVCGPPGMYKAISGPKVSPKDQGELTGLLAELGYNKDQVYKF

SEQ ID NO: 552 - protein, 323 aa, Neosartorya fumigata
MFARQSLRVAQPLKQGFRKYSTEAPSKGKSSLAPIYLGVGLIGLGVGLYRYNSASAEAPPAERPKVFTGGDQGWVDLKLAQIENLSPNTKRLRFEFPDKEAVSGLHVASALLTKFKPQGAEKPVIRPYTPVSDEEQPGYLDLVVKVYPNGPMSEHLHSMNVDQRLEFKGPIPKYPWEANKHKHICLIAGGTGITPMYQLARKIFKDPEDQTKVTLVFGNVREEDILLKKELEELENTYPRRFRAFYLLDHPPKEWTGGKGYITKELLKTVLPEPKEENIKIFVCGPPGMYKSISGPKVSPTDQGELTGILAELGYSKDQVFKF

SEQ ID NO: 553 - protein, 322 aa, Aspergillus niger
MFARQAFRCAQPLKQGFRKYSTEAPKGKSSLAPIYAAVGITGVGVGLYRYNSATAEAPAAVDRPKVFKGGDQGWFDLKLSEIEVLNHNTKRLRFEFEDKEALSGLQVASALLTKFKPADAKAVIRPYTPTSDEETPGYIDLVVKVYPNGPMSEHLHSMNVGQRLDFKGPIVKYPWETNKHNHICLIAGGTGITPMYQLAREIFKNPEDQTKVTLVFGNVKEEDILLKKEFEELENTYPRRFRAFYVLDNPPKEWTGGKGYISKELLKTVLPEPKEENIKIFVCGPPGMYKAISGTKNSPTDQGELSGILKELGYSKEQVFKF

SEQ ID NO: 554 - protein, 323 aa, Aspergillus oryzae
MFARQTFRCAQPLRQSFRKYSTEAPKAKSLAPIYTAVGLTGLSVGLYRYYYGAGATAEAPVERAKVFTGGDQGWVDLKLSEIEVLSHNTKRLRFEFEDKEAVSGVTIASALLTKFKPVGAEKAVLRPYTPTSDEDQPGYLDLVVKVYPNGPMSEHLHSMNVDQRLSFKGPLPKYQWETNKHEHIALIAGGTGITPMYQLIRQIFKNPDDKTKVTLVYGNVTEDDILLKKELQDLENTYPQRFKAFYLLDKPPKEWTGGKGYINKELLKTVLPEPKEENQKIFVCGPPGLYNAVSGNKVSPKDQGELSGILKELGYNKDQVYKF

SEQ ID NO: 555 - protein, 319 aa, Aspergillus terreus
MFARQTFRYAQPLKQSFRKYSTEAPKGKSLAPVYLTVGLAGLGVGLYRYNSATAEAPAERAKVFTGGDQGWVDLKLSEIEVLNHNTKRFRFEFEDKEAVSGLNVASALLTKFKPEGGKAVLRPYTPVSDESQPGFLDLVVKVYPNGPMSEHLHSMNVDQRLEFKGPLPKYPWEANKHQHICLIAGGTGITPMYQLARHIFKNPEDKTKVTLVYGNVSEQDILLKKELEELENTYPQRFKAFYVLDNPPKEWTGGKGYISKELLKTVLPEPKEENIKIFVCGPPGLYKAISGNKVSPKDQGELTGILKELGYSQEQVFKF

SEQ ID NO: 556 - protein, 322 aa, Emericella nidulans
MFSRYAFRCAQPLRQSARQYSTEAPKSKSLAPVYVAVGLAGLGVGLYRYQSGAATAEAPAERPKVFTGGDQGWVNLKLSDIEILSHNTKRLRFEFPDKEAVSGLHIASALLTKYSPPDGSKPVIRPYTPTSDEDQPGYLELVVKRYPNGPMSEHLHNMNVDQRLDFKGPLPKYPWEANKHKHICLVAGGTGITPMYQLAREIFKNPEDKTKVTLVFGNVSEEDILLKREFEDLENTYPQRFRAFYVLDNPPEGWTGGKGYITKELLKTVLPEPKEENIKIFVCGPPGMYKAISGPKVSPKDQGELTGILKELGYSKDQVYKF

SEQ ID NO: 557 - protein, 323 aa, Neosartorya fischeri
MFARQSLRFAQPLKQGFRKYSTEAPSKGKSSLAPIYVAVGLTGLGVGLYRYNSASAEAPPAERPKVFTGGDQGWVDLKLAQIENLSPNTKRLRFEFPDKEAVSGLHVASALLTKFKPHGAEKPVIRPYTPVSDEEQPGYLDLVVKVYPNGPMSEHLHSMNVDQRLEFKGPIPKYPWEANKHKHICLIAGGTGITPMYQLARKIFKDPEDQTKVTLVFGNVREEDILLKKELQELENTYPRRFRAFYVLDHPPKEWTGGKGYITKELLKTVLPEPKEENIKIFVCGPPGMYKSISGPKVSPKDQGELTGILAELGYSKDQVFKF

SEQ ID NO: 558 - protein, 465 aa, Aspergillus clavatus
MLDFMDYIQLAFAEATSWNRDNSYSSLTATAQSLLDFSTPERLRVHISSLATPHFATSYTLGTVGLIDGSVSYLYSTVPLDNTPSRSALIPLRKLARGYRQVQPPVAPVEDWGWNSLLDGLGSFQSTHAGDGNTHVSLSQKATLLHATLHLPPPTTLNALFLRRISPTMQLSLAVCSTRGPPLSKSAPQASLLGQLCHDTGKYSNEYLFSTDNSLFGWRGLWNFGPDPRHPRDPSSPPVSLLSAGAEAYYSPVSSLIGMSTGLRFSTLPAATETPSSTTTTTPISTFPYTLTLILTPLTGSLSTTYSLRASPNLAFSSRFGFNVYSWESEMVAGCELWRRRRKPQHQQDDPADHDGLEWARRKMRMHDPDYAPPTAPAPAPVAAESDEGNESVLKIRVDQSWNVRLLWEGRVKELLVSAGVGLGPSSFSPSSWSVPASGSAQAGGGGGHAKSYWHGVGVSVSYSS

SEQ ID NO: 559 - protein, 471 aa, Neosartorya fumigata
MLDFMDYIQLAFAEATNWNRDNSYSSLTATAQSLLDFSTPERLRVHLSSLATPHFATSYTLGTVGLIDGSVSYLYSTVPLNNTPSRSALIPLRKLARGYRQVQPPVAPVEDCGWQSCLGGLGSSESKPSGNDDSQPSLGRKATLLNATLHLPPPTILNALFLRRMSPTMQLSLAVCSTRGAPLSNSAPQASLLGQLSHDTGKYSNEYLFSTDNSLFGWRGLWNFGPDPRHPKENSSPQLSLLSAGAEAYYSPVSSLIGMSTGLRFSTLPAATEMPSSSSSASSTTTTSNHGTPISTFPYTLTLVLTPLTGSLSTTYSLRASPNLAFSSRFGFNVYSWESEMVAGCELWRKRRKPSPPPVDDDGLEWARRKMRMADTPAFAPVEPPTTHNRDEENESVLKIRVDQSWNVRLLWEGRVKELLVSAGVGLGPSSFSSPSRAANSTPAGGGQSVGGGISGRSYWHGVGVSISYSS

SEQ ID NO: 560 - protein, 450 aa, Aspergillus flavus
MLDFMDYIQLAFAEGTNWNRDNSYSSLTATAQSLLDFSTPERLRVHLSSLSTPNFATSYTLGTVGLIDGSVSYLYSTVPFTNTPSRSALIPLRKLSPGYRQVTPPSAPIEDWNLDSILDNPQNVQPSFASKPTLLHATLHLPPPTTLNALFLRRISPTMHLTLAVCSTRGPPLSKSAPQASLLTQLSHDTGKYSNEYLFSTDNALFGWRGLWNFGPDPRSATDTAAPRLSLLSAGAEAYYSPVSSLIGMSTGLRFSTLPAATDVPASTATGSATANQSTPISTFPYTLTLTLTPLTGSLSTTYSLRASPNLAFSSRFGFNVYSWESEMVAGCELWRKSRKQDDGLEWARRKMRASEPLSLPSLPAESTERQEEEEATDSVLKIRVDQSWNVRVLWEGRVKELLVSAGVGLGPSSFSSSSWAAAAAGSGQSSGGGVPSYWRGVGVSVLYSS

SEQ ID NO: 561 - protein, 471 aa, Neosartorya fumigata
MLDFMDYIQLAFAEATNWNCDNSYSSLTATAQSLLDFSTPERLRVHLSSLATPHFATSYTLGTVGLIDGSVSYLYSTVPLNNTPSRSALIPLRKLARGYRQVQPPVAPVEDCGWQSCLGGLGSSESKPSGNDDSQPSPGRKATLLNATLHLPPPTILNALFLRRMSPTMQLSLAVCSTRGAPLSNSAPQASLLGQLSHDTGKYSNEYLFSTDNSLFGWRGLWNFGPDPRHPKENSSPQLSLLSAGAEAYYSPVSSLIGMSTGLRFSTLPAATEMPSSSSSASSTTTTSNHDTPISTFPYTLTLVLTPLTGSLSTTYSLRASPNLAFSSRFGFNVYSWESEMVAGCELWRKRRKPSPPPVDDDGLEWARRKMRMADTPAFAPVEPPTTHNRDEENESVLKIRVDQSWNVRLLWEGRVKELLVSAGVGLGPSSFSSPSRAANSTPAGGGQSVGGGISGRSYWHGVGVSISYSS

SEQ ID NO: 562 - protein, 434 aa, Aspergillus niger
MLDFMDYIQLAFAEATNWNRDNSYSSLTATAQSLLDFSTPERLRVHLSSLSTPHFATSYTLGTVGLIDGSVSYLFSTVPLDKFPSRSALIPLRKLSPGYRQVQAPIAPIAETILINDDLNDASAYTTIGKKATLFHATLHLPPPTTLNALFLRRISPTMQLSLAVCSTRGPPLSKSAPQASLLAQLSHNTGKYNNEYLFSTDNALFGWRGLWNFGPDPRDPVASGSSPRLSLLSAGAEAYYSPVSSLIGMSTGLRFSTANANTPISTFPYTLTLTLTPLTGSLSTTYSLRASPNLAFSSRFGFNVYSWESEMVAGCELWRKSKSRYRDDGDGVEWARRKIRESLFPHPHPHLSTSTPNDIKDLAGHALEKSGKGEEEENESVLKIRVDQSWNVRLLWEGRVKELLVLIDRVVEVYSNERCLRELRLMVVFNLDL

SEQ ID NO: 563 - protein, 431 aa, Aspergillus oryzae
MLDFMDYIQLAFAEGTNWNRDNSYSSLTATAQSLLDFSTPERLRVHLSSLSTPNFATSYTLGTVGLIDGSVSYLYSTVPFTNTPSRSALIPLRKLSPGYRQVAPPSAPIEDWNLDSILDNPQNVQPSFASKPTLLHATLHLPPPTTLNALFLRRISPTMHLTLAVCSTRGPPLSKSAPQASLLMQLSHDTGKYSNEYLFSTDNALFGWRGLWNFGPDPRSSTDTAAPRLSLLSAGAEAYYSPVSSLIGMSTGLRFSTLPAATDVPASTATGFATANQSTPISTFPYTLTLTLTPLTGSLSTTYSLRASPNLAFSSRFGFNVYSWESEMVAGCELWRKSRKQDDGLEWARRKMRASEPLSLPSLPAESKERQEEEEATDSVLKIRVDQSWNVRVLWEGRVKELLVSAGVGLGPSDTAFAWMYIFSVRAGLNR

SEQ ID NO: 564 - protein, 459 aa, Aspergillus terreus
MLDFMEYIQLGFAEATNWNRDNSYSSLTATAQSLLDFKTPERLRVHLSSLSTPHFATSYTLGTVGLIDGSVSYLYSTVPFDHTPSRSALIPLRKLAPGYRQVQPPVAPIENWGWDSTLNHETTPLAQKATLLHATMHMPPPTTLNALFLRRISPTMQLTLAVCSTRGPPLSKSAPQASLLTQLSHDTGKYSNEYLFSTDNALFGWRGLWNFGPDPRNPADDAAPRLSLLSAGAEAYYSPVSSLVGMSTGLRFSTLPAATDASSAPSSSSSPSSATPTQISTFPYTLTLTLTPMTGSLSTTYSLRASPNLSFSSRFGFNVYSWESEMVAGCELWRQSRKRVPAEEEDDGLEWARRKLRMMDDAAVPLPPTSSVPAEPEQDETTESVLKIRVDQSWNVRLLWEGRVKELLVSAGVGLGPSSFSSSAWTNSTAGGAGGQASGGGNAGTSYWRGVGVSVSYSS

SEQ ID NO: 565 - protein, 427 aa, Emericella nidulans
MLDFMDYIQLAFAEGTQRNCDNSYSSLTATTQNLLDFTTPERVRIHLSSLSTPNFATSYTLGTVGLIEGSISYLYSNISFDNTPSKSALIPLRKLAPGYRQVQAPIAPPSSKGQKATLLHATLHLPPPTTLNALFLRRISPTMQLSLAVSSTRGPPLSKSAPQATLLTQLTHDTGKYSNEYLFSTDNSLFGWRGLWNFGPDPRFNNNAQRLSLLSAGAEAYYSPVSSLIGMSTGLRFCTLPAATSSTPNPNTPISTFPYTLTLTLTPLTGSLSTSYSVRASPNLSFSSRFGFNVYSWESEMVAGFELWRQSRKAAIVDNDGLEWARNKARIWDIPASSQVPEPITPSEEETQESVLKVRVDQSWNVRLLWEGRVKELLVSAGVGLGPSSFSPSSYANSQATAGAQGSSGGPPTSYWRGVGVSVSYSS

SEQ ID NO: 566 - protein, 471 aa, Neosartorya fischeri
MLDFMDYIQLAFAEATNWNRDNSYSFLTATAQSLLDFSTPERLRVHLSSLATPHFATSYTLGTVGLIDGSVSYLYSTVPLNNTPSRSALIPLRKLARGYRQVQPPVAPVEDWGWQSLLGGLGSSESKPSGNGDSQPSLGRKATLLNATLHLPPPTTLNALFLRRISPTMQLSLAVCSTRGAPLSNSAPQASLLGQLSHDTGKYSNEYLFSTDNSLFGWRGLWNFGPDPRHPKENPSPRLSLLSAGAEAYYSPVSSLIGMSTGLRFSTLPAATEMPSSSSSTSSTTTTSNHGTPISTFPYTLTLVLTPLTGSLSTTYSLRASPNLAFSSRFGFNVYSWESEMVAGCELWRKRRKSSPPPVDDDGLEWARRKMRMADTPGVPPVEPPSTHNRDEENESVLKIRVDQSWNVRLLWEGRVKELLVSAGVGLGPSSFSSSSWAANSTAAGGGQSVGGGVSGKSYWHGVGVSVSYSS

SEQ ID NO: 567 - protein, 437 aa, Aspergillus clavatus
MSIDINWRTATSGPDGEALAERIRSFIHDRFQQVALPRFIRSVQVHSFDFGTIPPELEIKDFCEPFADFYEEDDDADTSDVSEDLLSEHSSQWDRTHSELNEPPYREESAMNHGLRDPFHEGFPPSPLRSPLGEHLNPHFLPRAGTPGIPGGTSNLGYHLMSLGGLSGTQTPLAAVAGGNPFASGWSDSGMGFGNRGRSERQGPIPQHRPEPEIDTSNSTSRPSTANTLPSHLSESNNLNADGATGRNERGSLHNGDPLADHTCSGHLPLPPRMRERRPEDFQVLCHAKYAGDVRLSLTAEILLDYPMPSFVGLPLKLNVTGITFDGVAVVAYIRKRVHFCFLSAEDADALIGSEQQQESGGDDHRPRSGADSSAHTSQKRQGGLLQEIRVESEIGRKENGKQVLKNVGKVERFVLAQVRRIFEEELVYPSFWTFLI

SEQ ID NO: 568 - protein, 439 aa, Neosartorya fumigata
MSIDVNWRFATSGPDGEALAERIRSFIHDRFQQVALPRFIRSVQVHAFDFGTIPPELEIKDFCEPFADFYEEDDDDHTSDASEERGEEHSSRWNSTHPELNEPSYREDTAVNHSLRDPFPDGFPTSPLRSPLGEHLNPHFLPRASTPGIPGGTSTLGYHLMSLGGLSGTQTPLAAVAGGNPFASGWSDSGMGPGNRGRSETHAGMQHPRAEPEIDTSNSTSRPSTANTLPSHPSGSSKNSGQAATGRNDHPSLHAGEHLEDSVTQGQLPLPPRMRERRPEDFQVLCHVKYAGDVRLSLTAEILLDYPMPSFVGLPLKLNVTGITFDGVAVIAYIRKRVHFCFLSAEDADALIGPEQQQQRESAGDDHRPQSRPDSSASASQKRHGGLLQEIRVESEIGRKEDGKQVLKNVGKVERFVLAQVRRIFEEELVYPSFWTFLI

SEQ ID NO: 569 - protein, 432 aa, Aspergillus flavus
MSIEVDWRAATSGPDGEALAERIRSFIHDKFQQVALPRFIRSVQVHSFDFGTIPPDLEVKDICEPFADFYEEDEDDETSDVSEELVSGHGTQWHRDLNEPPFHEEMAMNRPLRDPFDEAFHSSTLRSPMEHLNPHFLPRAGTPGIPGGTSTLGYHLMSLGGLSGTQTPLAAVAGGTPFANGWTDPGMGASSRGHPSISGPTAVHPSRMEADIDTSNPTSRPSTSSTLPSHPSASNQPSGDATTGKEHGSLAEDEHLDDPMTSGHPLRLPPRMRERRPEDFQVLCHAKYAGDVRLSLTAEILLDYPMPSFVGLPLKLNVTGITFDGVAVIAYIRKRVHFCFLSAEDADALIGSDQQEARGQDDRPWSSADPTASPKRQGGLLREIRVESEIGRKEDGKQVLKNVGKVERFVLAQVRRIFEEEMVFPSFWTFLI

SEQ ID NO: 570 - protein, 439 aa, Neosartorya fumigata; identical to SEQ ID NO: 568

SEQ ID NO: 571 - protein, 435 aa, Aspergillus niger
MSIEVDWGAATSGPDGEALAERIRSFIHDKFQQVALPRFIRSVQVHSFDFGTIPPELEIKDLCEPFADFYEEDEDDEASDVSEGLVSRHGSPWHGTHPELNESSFRDDNAINHSLRDPFTEGFQPSALRSPIALSDHLNPHFRSGTPGIPGGTSTLGYHLMSLGGLSGTQTPLAAVAGGSPFAGGWNDSGMMGPGNRGRPPPPIFTAHQSRPEADIDSSNPTSRPSTSSTLPSHPSGSNKNNGDGAGGPDHGSHPEEHGHLDDPTSEEPLRFPRMRERRPEDFQVLCHAKYAGDVRLSLTAEILLDYPMPSFVGLPLKLNVTGITFDGVAVVAYIRKRVHFCFLSSEDADALIGSDQPDVGAQTEYSRSGGDATVSAKRQGGLLQEIRVESEIGRKEDGKQVLKNVGKVERFVLAQVRRIFEEELVYPSFWTFLV

SEQ ID NO: 572 - protein, 432 aa, Aspergillus oryzae
MSIEVDWRAATSGPDGEALAERIRSFIHDKFQQVALPRFIRSVQVHSFDFGTIPPDLEVKDICEPFADFYEEDEDDETSDVSEELVSGHGTQWHRDLNEPPFHEEMAMNRPLRDPFDEAFHSSTLRSPMEHLNPHFLPRAGTPGIPGGTSTLGYHLMSLGGLSGTQTPLAAVAGGTPFANGWTDPGMGASSRGHPSISGPTAVHPSRMEADIDTSNPTSRPSTSSTLPSHPSASNQPSGDATTGKEHGSLAEDEHLDDPMTSGHPLRLPPRMRERRPEDFQVLCHAKYAGDVRLSLTAEILLDYPMPSFVGLPLKLNVTGITFDGVAVIAYIRKRVHFCFLSAEDADALIGSDQQEARGQDDRPWSSADPTASPKRQGGLLREIRVESEIGRKEDGKQVLKNVGKVERFVLAQVRRTFEEEMVFPSFWTFLI

SEQ ID NO: 573 - protein, 426 aa, Aspergillus terreus
MSIEVDWKTATSGPDGEALAERIRSFIHDKFQQVALPRFIRSVQVHSFDFGTVPPDLEIKDFCEPFADFYEEDEDDETSEVSEELVSAHGNQWHRTHSELNEPPYRDEVTMNQPLRDPFDEGFHPSPLRSPMEHLNPHFLPRAGTPGIPGGTSTIGYHLMSLGGLSGTQTPLAAVAGGTPFANGWTDHNLGPGNRGHASGPAAGAMRQHRPEDIDSSNPTSRPSTSSTLPSHPSGSNRNSGDGSHPEEEHLDDPAEPDHPFRFPKMRERRPEDFQVMCRAKYAGDVRLSLTAEILLDYPMPSFVGLPLKLNITGVTFDGVAVVAYIRKRVNFCFLSAEDADALIGADDQETRDKDDHPRSGLDPTTSPKRQGGLLREIRVESEIGRKEDGKQVLKNVGKVERFVLAQVRRIFEEELVFPSFWTFLI

SEQ ID NO: 574 - protein, 436 aa, Emericella nidulans
MSIEVNWGTATSGPDGEALAERIRSFIHDKFQQVPLPRFIRSVQVHSFDFGTVAPDLEIKDFCEPFADFYEDDEDGDSGSEISEELQHRTHDNPWDRTQSELNETSFRDDRPVTSHHALRDPFDEDFRQHTSSPLRSPIALGDHLNPHFLPRAGTPGIPGGTSTLGYHLMSLGGLSGTQTPLAAVAGGSPFTTNWTDPSPMGQGNKTGIRPSPLHRADADIDSSNPASRPSTASTHPSGSNRSSHPDGHPEHNDDPISSSENPLLQNQPPPRMRERRPEDFQILCHVKYAGDIRLSLTAEILLDYPMPSFVGLPLKLNVTGITFDGVAVIAYIRKRVHFCFLSPEDAEALVGSGSYSGQQETPGPSTGSSGGGNPSPHQKGLSLLQEIRVESEIGRKEDGKQVLKNVGKVERFVLAQVRRIFDEELVFPSFYTFLI

SEQ ID NO: 575 - protein, 439 aa, Neosartorya fischeri
MSIDVNWRSATYGPDGEALAERIRSFIHDRFQQVALPRFIRSVQVHAFDFGTIPPELEIKDFCEPFADFYEEDDDDHTSDASEELGSEHSSQWNRTHPELNEPSYREDTAVNHSLRDPFPDGFPTSPLRSPLGEHLNPHFLPRAGTPGIPGGTSTLGYHLMSLGGLSGTQTPLAAVAGGNPFASGWSDSGMGPGNRGRSERHAGMKHQRAEPEIDTSNSTSRPSTANTLPSHPSSSSKNSGQGATGRNDHPSLHAGEHIEDPVAPGHLPLPPRMRERRPEDFQVLCHVKYAGDVRLSLTAEILLDYPMPSFVGLPLKLNVTGITFDGVAVIAYIRKRVHFCFLSAEDADALIGSEQQQQQESAGDDHRPQSRPDSSASASQKRHGGLLQEIRVESEIGRKEDGKQVLKNVGKVERFVLAQVRRIFEEELVYPSFWTFLI

SEQ ID NO: 576 - protein, 572 aa, Aspergillus clavatus
MAFNFNWSPLMADASFYTRAQDLLTAALNKSPKPPIIVDDIIVTELNLGSIPPELEILEIGDLAEDRFRGIFKMSYSGDAFLTLKTRVQANPLNTYLLTRPSFATPLPLAAATPLTIPLQITLSDIKLSGFVILVFSKQKGITVVFRNDPLESLKVSSTFDSIPFVRDFLQKEIEAQLRILFMDELPAIIHRLSLRLWVPEYRAGEDFETQAEKAETANGEGPGQDPLASPPQDPVDALGHALDESDIASLSLDSSVEAHSLFSQKNLLRLAALTDSQRTLSLFTPSIREVVYRAWTSPTDQTDAAGSVTSPVLSRTHSQVGSMSSFQDSASIASMQTRSSTPSHTFSGYGLSLGAGRHSKAHSRKRKKRVVDLRRPKTTDDAPSVSDESAFTESTSAPSVCSAPLPILNEQSDDPVTPPLSPDNDLHLPIIPDRHRMSISRPAPRRDIAAEMMRDMGGPSSTSDPATQATQSEDTSATPRATMRAQIPSIYLNEKQDAGSSTGVPRQLPSAILPFLNDNPMNRVVDQALVERLAGEIARRMRDEKFMATNACGSFWDRHSQEESPPPAYGH

SEQ ID NO: 577 - protein, 572 aa, Neosartorya fumigata
MAFNFNWSPLMADASFYTRAQDLLTAALNKSPKPPIIVDDIIVTELNLGSIPPELEILEIGDLAEDRFRGIFKMSYSGDAFLTLKTRVQANPLNTYLLTRPSFATPRPLAAATPLTIPLQITLSDFKLSGFVILVFSKQKGITVVFRNDPLESLKVSSTFDSIPFVRDFLQKEIEAQLRILFMDELPAIIHRLSLRLWVPEYRAGEELQTQTASANGEGPGQDPLASPPQDPVDALGNALNESEIESLSLDSSVETHSLFSQKNLLRLAALTDSQRTLSLFTPSIREVVYRAWTSPSDQTDASGSVTSPFFPVLSRTQSQVGSMSSFPDSASMVSSQSRSSTPSHTFSGYGLSLGAGRHSKAHARKRKKRVVDLRRPKTTDDAPSVSDESSFTESTSAPSICSAPLPVLDEQTDDPVTPPLSPDNDLHLPAIPERHRMSISRPALRRENASEMIRDTAECKPSSNAVGQAIQEEDLSATPRAAVRAHGASVLEKGKQDPDSSAGSSRQLPSTILPFINDNPTGGVVDQALVERLAGEIARRMRDEKFMASNACGPFWDRHSQEESPPPAYGH

SEQ ID NO: 578 - protein, 566 aa, Aspergillus flavus
MAFNFNWSPLMADASFYTRAQDLLTAALNKSPKPPIIVDDIIVTELNLGSIPPDLEILEIGDLAEDRFRGIFKMSYTGDAFLTLKTRVQANPLNTYLLTRPSFASPLPLAAATPLTIPLQITLSDFKLSGFVILVFSKQKGITVVFRNDPLESLKVSSTFDSIPFVRDFLQREIEAQLRILFMDELPAIIHRLSLRLWVPEYRAGEDIQTQPEQTAGEGPGQDPLASPPQDPVDSLGNALDESEIASLSLDSSVEAHSLFSQKNLLRLGALTDSQRTLSLFTPSIQEVVYRAWTSPSEQGDANGISTAPLSPMLSRTHSQVGSMSSFQDSASIVSSQSRSSASTHTFSGYGLNLGAGRHSKAHSRKRKKRVVDLRRPKTTSDTASVSDESAYTETASNPSVCSAPLPVVNEQPDPITPPLSPESDFRLPAIPERRRASLSRPVPRRDIATEMLRETGGPSAEPPRHRPQPADVDATPRGSLRAHITAQHDNEKQETGPSRQLPSTILPFTDEKSSSSTVDQALVERLAGEIARRMRDEKLMPTSSCGGAFWGRPDHEEYPPPAYGQ

SEQ ID NO: 579 - protein, 572 aa, Neosartorya fumigata
MAFNFNWSPLMADASFYTRAQDLLTAALNKSPKPPIIVDDIIVTELNLGSIPPELEILEIGDLAEDRFRGIFKMSYSGDAFLTLKTRVQANPLNTYLLTRPSFATPRPLAAATPLTIPLQITLSDFKLSGFVILVFSKQKGITVVFRNDPLESLKVSSTFDSIPFVRDFLQKEIEAQLRILFMDELPAIIHRLSLRLWVPEYRAGEELQTQTASANGEGPGQDPLASPPQDPVDALGNALNESEIESLSLDSSVETHSLFSQKNLLRLAALTDSQRTLSLFTPSIREVVYRAWTSPSDQTDASGSVTSPFFPVLSRTQSQVGSMSSFPDSASMVSSQSRSSTPFHTFSGYGLSLGAGRHSKAHARKRKKRVVDLRRPKTTDDAPSVSDESSFTESTSAPSICSAPLPVLDEQTDDPVTPPLSPDNDLHLPAIPERHRMSISRPALRRENASEMIRDTAECKPSSNAVGQAIQEEDLSATPRAAVRAHGASVLEKGKQDPDSSAGSSRQLSSTILPFINDNPTGGVVDQALVERLAGEIARRMRDEKFMASNACGPFWDRHSQEESPPPAYGH

SEQ ID NO: 580 - protein, 563 aa, Aspergillus niger
MAFNFNWSPLMADASFYTRAQELLTAALNKSPKPPIIVDDIHVTELNLGSIPPELEILEIGDLAEDRFRGIFKMSYTGDAFLTLKTRVQANPLNTYLLTRPSFATPLPVAAATPLTIPLQITLSDFKLSGFVILVFSKQKGITVVFRNDPLESLKVSSTFDSIPFVRDFLQREIEGQLRVLFMDELPAIIHRLSLRLWVPEYRAGEEMANRATNTAGEGPGQDPLASPPQDPVDAQGNALDESEIASLSLDSSVETHSLFSQKNLLRLAALTDSQRTLSLFTPSIQEVVYRAWTSPSDAGEVSGGVMSPLSPVLSRTQSQVGGMSSFHDTASMVSSQTRSSTNTHTFSSYGLSLGAGRHSKSNARRRKKRVVDLRRPKTTEDAVSVSGESTYTETTSAPSICSAPLPVVSEQTDDPVTPPLSPDSELHLPTVPERHRLSISRQMPRRDIATEMLRETGESSAQPVNHSAVDVNATPRVAVHPYIAAQHESEKEEASAPRQLPSKALPLSDAKPTSSIVDQALVERLAGEIARRMREEKLTPGNSCSSFWDRLSHDDAPPAYGQ

SEQ ID NO: 581 - protein, 566 aa, Aspergillus oryzae; identical to SEQ ID NO: 578

SEQ ID NO: 582 - protein, 565 aa, Aspergillus terreus
MAFNFNWSPLMADASFYTRAQDLLTAALNKSPKPPIIVDDIIVTELNLGSIPPELEILEIGDLAEDRFRGIFKMSYSGDAFLTLKTRVQANPLNTYLLTRPSFASPLPLAAATPLTIPLQITLSDFKLSGFVILVFSKQKGITVVFRNDPLESLKVSSTFDSIPFVRDFLQREIEAQLRILFMDELPAIIHRLSLRLWVPEYRAGEEDQDQNTNTAGEGPGQDPLASPPQDPVDALGNALNESEIASLSLDSSVETHSLFSQKNLLRLAALTDSQRTLSLFTPSIQEVVYRAWTSPSDQGDISGGVTSPLSPALSRTQSQVGGMSSFQDNASTISSYSRTSTSTHTFSTYGLNLGAGRHSKAHARKRKKRVVDLRRPKQPESETASVTDESSFTETTSAPSVRSAPLPRVNEQPDDPVTPPLSPDSDFHLPPIPERHRFSISRPALRRDIATEMLRETGESSSEPARRHAEVDDIDATPRTIIRHEPSRYEGEKQEAGPSRQLPSTILPFTEEKSTPGPVDQALVERIAGEIARRMREDKLMGTNSCAFWNRPGHEESPPPAYGQ

SEQ ID NO: 583 - protein, 561 aa, Emericella nidulans
MAFNFNWSPLTADANFYTRAQDLLTAALNKSPKPPIIVDDIIVTELNLGSIPPELEILEVGDLAEDRFRGIFKMSYSGDAFLTLKTRVQANPLNTYLLTRPSFASPLPLAAATPLTIPLQITLSDFKLSGFVVLVFSKQKGITVVFRNDPLESLKVSSTFDSIPFVRDFLQKEIEAQLRILFMDELPAIIHRLSLRLWVPEYRDGEQLETQDTASRTEGPGQDPLASPPQDPVDALGNALNESDIASLSLESSVETHSLFSQKNLLRLAALTDSQRTLSLFTPSIREVVYRAWTSPTDSGEATAGVISPASPALSRTHSQVGNISSFPDTASMVSSQTRSTTSTHSFSSYGLNTGSSRSKVHSRKRKKRVVDLRRPKTTDDAASVSDESAFTESTSAPSVYSAPLPIVREQPDDPVTPPLSPETGLHLPPVPERHRLSTSRPGIRRGADAFVQSGESSSSARRRSDVDVDATPRGTMRSHVAMTRCSEKPEPEAPQQLPSTILPFADEKASSNLVDQALVERLAGEIARRMRDEKMPGSSTCTPFWDRLNHDEAPPPAYGH

SEQ ID NO: 584 - protein, 572 aa, Neosartorya fischeri
MAFNFNWSPLMADASFYTRAQDLLTAALNKSPKPPIIVDDIIVTELNLGSIPPELEILEIGDLAEDRFRGIFKMSYSGDAFLTLKTRVQANPLNTYLLTRPSFATPRPLAAATPLTIPLQITLSDFKLSGFVILVFSKQKGITVVFRNDPLESLKVSSTFDSIPFVRDFLQKEIEAQLRILFMDELPAIIHRLSLRLWVPEYRAGEELQTQTESANGEGPGQDPLASPPQDPVDALGNALNESEIESLSLDSSVETHSLFSQKNLLRLAALTDSQRTLSLFTPSIREVVYRAWTSPSDQTDASGGVTSPFSPVLSRTQSQVGSMSSFPDSASMVSNQSRSSTPSHTFSGYGLSLGAGRHSKAHARKRKKRVVDLRRPKTTDDAPSVSDESAFTESTSTPSICSAPMPVLDEQTDDPVTPPLSPDRDLHLPAIPERHGMSISRPALRREIASEMIRDTAESKPSSNPVGQAIQDEDLSATPRAAVRAHGASVLEKEKQATGSSAGSSRQLPSTILPFINDSPTGRVVDQALVERLAGEIARRMRDEKFLASNACGPFWDRHSQEESPPPAYGH

SEQ ID NO: 585 - protein, 655 aa, Aspergillus clavatus
MAKQRRDESPSGLSDIVEPDGLLGTGLTSRHIEAFGRKVTSTAGHLMGPTTESSNGGHYHTAMVDIHRELRRPTTQRKVFSLTQTTPTDLVRSKLSTTEIQSRAISSLPDELLANIPEDSSSYSLFEGFKATQDDHEYRKSHRRRSSKAKKLLKDGQAKEALPSAPTDLKKDRDLLSRRLDLMGVRKNMCSSEIHDIDNKIANLHNMRKIVLERLAGLEMEEAELEHELTEIDNKLEDIQEDTPGTPVAVSTPKSSEAADDSVLSEDSAMDASFMSESIYQKLPSPKSLKKRSIRKRSMPILHEHFSPGSQIKEMQAHTDMVTAIDFDYPFGTMVSAALDDTVRVWDLNTGRCMGFLEGHNASVRCLQVEDNIVATGSMDASVKLWDLSRARTVPRDNRVGRPDEEDEEDDGTDAFSILSATTLEDCYVFSLDAHVDEVTALHFRGDTLISGSADKTLRQWDLVKGRCVQTLDVLWAAAQASTIGADTQWRPSGRLPDASADFVGAVQCFDAALACGTADGMVRLWDLRSGQVHRSLVGHTGPITCLQFDEVHLVTGSQDRSIRIWDLRMGSIFDAFAYEKPITSMMFDTKRIVAAAGENVVKVYDKADSNHWDCGAGLGADEVGPAPATVERVRLKDGYLLEGRKDGIVAAWTC

SEQ ID NO: 586 - protein, 658 aa, Neosartorya fumigata
MATQRRDESPSGLSDIVEPDGLLGIGLTSRHIEAFGRKVTSTAGHLMGPITDSSNGSHYHTAMADIHRELRRPTTQRKVFSLTQTSPTDLVRSKLSTSEIQSRALSSVPDELLANIPEDSSSYSLFEGFKATQDDHEFRKAHRRRSSKGKKLLKDGEAAGALPSAPTDLKKERDLLSRRLDLMGVRKNMCSSEIHEIDNKIANLHNIRKIVLDRLAGLEMEEAELEHQLTEIDNKLEDIQEEAPKTPLTAATPKSSSVNDDSVVSEDAALDASFMSESIYQKLPSHSPRSLKQRSIRKRSMPILHEHFAPGSQIKEMQAHTDMVTAIDFDYPFGTMVSAALDDTVRVWDLNTGRCTGFLEGHNASVRCLQVEDNIVATGSMDASVKLWDLSRARTVTRDNRLNKPSEGEGEDDNASDAFSLFSATTLEDCYVFSLDAHVDEVTALHFRGNTLISGSADKTLRQWDLVKGRCVQTLDVLWAAAQASTLAADTQWRPSGRLPDASADFVGALQCFDAALACGTADGMVRLWDLRSGQVHRSLVGHTGPITCLQFDEVHLVTGSQDRSIRIWDLRMGSIFDAYAYDKPITSMMFDTKRIVAAAGENVVKVYDKADGHHWDCGAGVGADESGPAPATVERVRLKDGYLLEGRKDGTVAAWTC

SEQ ID NO: 587 - protein, 657 aa, Aspergillus niger
MDKHRRRDESPSGLSDIVEPDGLLGTGITSRHIEAFGRKVTSTAGHLMGPAPDSSTGGHYHTAMADIQRELRHPNTQRKVFSLTQTTPTDLVRSKLSTTEIQSRAISSLPDELLANIPDDSSSYSLFQGFQASQDDIEYRRAHRRRSSKSKKLLKDGETRGALPSAPSDLKKERDLLSRRMELMGVRKNMCSSEIHDIDNKIANLHNMRKIVLDRLAGLEMEEADLEHELNEIENKLEDIQEEQQEAEVPPPATPKSSEANDDSIVSEDPAMGASFMSESIYQKIPSPKSVKQRSIRKRSMPVLHEHFAPGSEIKEMPAHSDMVTAIDFDYPFGTMISAALDDTVRVWDLNVGRCVGFLEGHNASVRCLQIEDNIVATGSMDASVKLWDLSRARTTTRDNRVTRREDDEESAQADDASMASHSTTLEDCYVYSLDAHVDEVTALHFKGDTLISGSADKTLRQWDLVKGRCVQTLDVLWAAAQASTLGSETTWRPSGRLPDASADFVGAVQCFDAALACGTADGMVRLWDLRSGQVHRSLVGHTGPITCLQFDDVHLVTGSQDRSIRIWDLRTGSIFDAYAYDKPITSMMFDTKRIVAAAGENVVKVYDKADGHHWDCGAGVGVDDSGPQPATVERVRLKDGFLVEGRKDGIVAAWTC

SEQ ID NO: 588 - protein, 650 aa, Aspergillus oryzae
MDKHRRDESPSGLSDIVEHDGLLGTGLTTRHIEAFGRKVTSTAGHLIGPTGDGNPAHYHNAMADIQRELRRPNTQRRVFALTQTTPTDLVRSKLSTSEIQSRALSSLPDDLLANIPDDSSSYSLFEGFQASQDDIEYRKAHRRRASKSKKLLKDGENRAALPSAPAELKKERDLLSRRMELMGVRKNMCSSEIHDIDNKIANLHNMRKIVLDRLAGLEMEEAELEHELTELENKLEDIQEETPETAVVGTPKSSANDESMASEDPAMDASFMSESIYQKIPSPKSLKHKSKRKRSMPILHEHFSPGSLIKEMEAHTDMVTAIDFDYPFGTMITAALDDTVRVWDLNVGRCTGFLEGHNASVRCLQIEDNIVATGSMDASVKLWDLSRARSRPRSSRINKHEDEEDAADDASQVSHSTTLEDCHVFSLDSHVGEVTALHFRGDNLISGSADKTLRQWDLVKGRCVQTLDVLWAAAQADTLNGDSTWRPSGRVPDASADFVGALQCFDAALACGTADGMVRLWDLRSGQVHRSLVGHTGPVTCLQFDDVHLVTGSMDRSIRIWDLRMGSIYDAFAYDKPVTSMKFDAKRIVAAAGESVVKVYDKADGNHWDCGAGVGADEQGPLPATVDRVCLKDGFLVEGRQDGIVGAWTC

SEQ ID NO: 589 - protein, 654 aa, Aspergillus terreus
MDKHRRDESPSGLSDIVEPDGLLGTGLTSRHIEAFGRKVTTTAGHLMAPSSTEATTGSHYHSAMVDIQRELRRPNTQRRVFSLTQTTPTDLVRSKLSTTEIQSRAISSLPDDLLANIPEDSSSYSLFEGFQASQDDHEYRKVHRRRISKGKKLLKDGDARAALPSTPTDLKKDRDILSRRLDLMGVRKNMCSSEIHEIDNKIANLHNMRKIVLDRLAGLEMEEAELEHELTELDNKLEDLQEEQPESQAAVATPKSSEANEDSFVSEDPAMDASFMSESIYQKMSSPKSIKQRSIRKRSMPILHEHFAPGSQIKEMPAHNDMVTAIDFDFPFGTMVSAALDDTVRVWDLNVGRCTGLLEGHNASVRCLQIEDNIVATGSMDASVKLWDLSRARSVTRDGRVNKDDEGEDTADDAHELFQSTTLEDCYVYSLDAHVDEVTALHFRGDTLISGSADKTLRQWDLVKGRCVQTLDVLWAAAQASTLGGDTQWRPSGRLPDASADFVGALQCFDAALACGTADGMVRLWDLRSGQVHRSLVGHTGPVTCLQFDDVHLVTGSLDRSIRIWDLRTGSIYDAYAYDKPVTSMMFDSKRIVAAAGENVVKVYDKADGHHWDCGAGVGADAEGPSPATVERVRLKDGFLVEGRKDGIVSAWTC

SEQ ID NO: 590 - protein, 654 aa, Emericella nidulans
MDKHRRDDSPSGLSDIVERDGLLGTGITSRHIEAFGRKVTSTAGHLMGPSGDPSTSTHYQNAMVDIHRELRRPSTQRKVFALAQTTPTDLVRSKLSTSEIQSRAISSLPDELLLNIPDDTSSYSLFEGFQATQNDHEYRKAHRRGRSKGKKLLKDKDGEQADPPSTLTELKKERDLLSRRMELMGVRKNMCSSEIVDIDNKIANFHRMRQIVLDRLAGLEMEEAELEHEVNEIDNKLDDMAEEEAAQAAQAAAAAAAATTAGSETHEEPASEDPAMDASFMSESIYQKLPSPRSLKHRSIRKRSMPVLHEHFAPGSEIKEFQAHTDVVTALDLDYPFGTMITAALDDTVRVWDLNIGRCTGFLEGHNASVRCLQIEDNVVATGSMDATVKLWDLSRARTTHRDNRVNKDEDDDAVSVAYSTSLEDCHVYSLDAHVGEVTALHFKGNTLVSGSADKTLRHWDLVKGRCVQTLDVLWAAAQASSLGNESQWRPSGRLPDASADFVGAVQCFDAALACGTADGMVRLWDLRSGQVHRSLVGHTGPVSCLQFDDVHLVTGSLDRSIRIWDLRMGSIYDAYGYDKPVTSMMFDTKRIVAAAGENVVKVYDKADGHHWDCGAGVGADETGPDPAIVERVRLKDGFLIEGRRDGIVAAWTC

SEQ ID NO: 591 - protein, 658 aa, Neosartorya fischeri
MATQRRDESPSGLSDIVEPDGLLGIGLTSRHIEAFGRKVTSTAGHLMGPITDSSNGGHYHTAMADIHRELRRPTTQRKVFSLTQTTPTDLVRSKLSTSEIQSRALSSLPDELLANIPEDSSSYSLFEGFKATQDDHEFRKAHRRRSSKGKKLLKDGEAAGALPSAPTDLKKERDLLSRRLDLMGVRKNMCSSEIHEIDNKIANLHNMRKIVLDRLAGLEMEEAELEHQLTEIDNKLEDIQEEAPKTPVTAATPKSSAVNDDSFVSEDAAMDASFMSESIYQKLPSHSPRSLKQRSIRKRSMPILHEHFAPGSQIKEMQAHTDMVTAIDFDYPFGTMVSAALDDTVRVWDLNIGRCTGFLEGHNASVRCLQVEDNIVATGSMDASVKLWDLSRARTVTRDNRLNKHEEGEGEDDNASDAFSLFSATTLEDCYVFSLDAHVDEVTALHFRGNTLISGSADKTLRQWDLVKGRCVQTLDVLWAAAQASTLAADTQWRPSGRLPDASADFVGALQCFDAALACGTADGMVRLWDLRSGQVHRSLVGHTGPITCLQFDEVHLVTGSQDRSIRIWDLRMGSIFDAYAYDKPITSMMFDTKRIVAAAGENVVKVYDKADGHHWDCGAGVGADESGPAPATVERVRLKDGYLLEGRKDGTVAAWTC

SEQ ID NO: 592 - protein, 322 aa, Neosartorya fumigata
MLPFNSCVYVLLIISLMSNCRALCRATALQGRSLCATGGPDAAFRAEHERLSAFESRPSSGSYDMRRALDPIEIETWFHIVSGETDADLVTDEMVILQLHYLQKAYEKASISYRLKGVTRHINETWARNGDDSAMKKALRRGGYSTLNVYFQTNLQPPSTTDFARWTSDGDNRHAYNSDLAPPSVLGFCTLPDPSINSSSPRSSYSKDGCNVLAKTMPGGPMTHYNRGGTAIHEIGHWNGLLHTFEGESCSEDNAGDYIADTPQQSVPTDGCPSQKDSCPDSPGLDDIHNFMDYSSDDCYASFTSNQLKRMRDMWFSMRKGK

SEQ ID NO: 593 - protein, 635 aa, Aspergillus flavus
MMRGLLLAGALGLPLAVLAHPTHHAHGLQRRTVDLNSFRLHQAAKYINATESSSDVSSSFSPFTEQSYVETATQLVKNILPDATFRVVKDHYIGSNGVAHVNFRQTAHGLDIDNADFNVNVGKNGKIFSYGHSFYTGKIPDANPLTKRDYTDPVAALRGTNEALQLSITLDQVSTEATEDKESFNFKGVSGTVSDPKAQLVYLVKEDGSLALTWKVETDIDSNWLLTYIDANTGKDVHGVVDYVAEADYQVYAWGINDPTEGPRTVISDPWDSSASAFTWISDGENNYTTTRGNNGIAQSNPTGGSQYLKNYRPDSPDLKFQYPYSLNATPPESYIDASITQLFYTANTYHDLLYTLGFNEEAGNFQYDNNGKGGAGNDYVILNAQDGSGTNNANFATPPDGQPGRMRMYIWTESQPYRDGSFEAGIVIHEYTHGLSNRLTGGPANSRCLNALESGGMGEGWGDFMATAIRLKAGDTHSTDYTMGEWAANKKGGIRAYPFSTSLETNPLTYTSLNELDEVHAIGAVWANVLYELLWNLIDKHGKNDGPKPEFKDGVPTDGKYLAMKLVIDGMALQPCNPNCVQARDAILDADKALTDGANKCEIWKAFAKRGLGEGAEYHASRRVGSDKVPSDAC

SEQ ID NO: 594 - protein, 322 aa, Neosartorya fumigata
MLPFNSCVYVLLIISLMSNCRALCRATALQGRSLCATGGPDAAFRAEHERLSAFESRPSSGSYDMRRALEPIEIETWFHIVSGETDADLVTDEMVILQLHYLQKAYEKASISYRLKGVTRHINETWARNGDDSAMKKALRRGGYSTLNVYFQTNLQPPSTTDFARWTSDGDNRHAYNSDLAPLSVLGFCTLPDPSINSSSPRSSYSKDGCNVLAKTMPGGPMTHYNRGGTAIHEIGHWNGLLHTFEGESCSEDNAGDYIADTPQQSVPTDGCPSQKDSCPDSPGLDDIHNFMDYSSDDCYASFTSNQLKRMRDMWFSMRKGK

SEQ ID NO: 595 - protein, 318 aa, Aspergillus oryzae
MSHFPTLHILILVIANLQIQCFAFVSQSRGFCATGPPTESLKAEYRRLSALGSQSYNPVDSESRAAITPIVIDTWFHIITGEAGTELISDEMIADQLSYLQNAYWNATISYRLQGVTRSANDTWARNEDEMAMKTVLRRGSYRTLNVYFHTDLQASPNAGARAFDIVRRELGVSQQQPTSMLGFCTLPDPSINASSPPSTYIKDGCNVLAETMPGGSLAHYNRGGTAIHEIGHWNGLLHTFEGESCSSDNEGDFIADTPQQSKPTEGCPAQKDSCPELPGFDAIHNFMDYSSDECYDSFTPDQVSRMRSMWFAMRDGK

SEQ ID NO: 596 - protein, 365 aa, Neosartorya fumigata
MKVTILASAILALINGALALPANTPTLDVTLTQVDNTRIKATVKNTGNEKVTFVHLNFFQDAAPVKKVSLFRNGTEVEFTGIKRRLLTEGLSDDGLTTLAPGGTFEDEFDVASTGDLTEGGTVTIRTDGFVPITTDRKVSGYIPYQSNELEIEVDPAKAAAVPQAIKLLDRRTKVASCSGSRASALSTALRNAGSLANAAASAASSGSSTRFQEYFKTTSRRPENVGGRFRAVGREASSQSSGKTTYYCNDPYGYCDSNTLAYTLPSSNLIANCDIYYSYLPALTSSCHAQDQATTTLHEFTHAPAVYSPGTDDYAYGYRASTALSASQALLNADTYALFANGSPLLPLSNHSKCRNTMVWRTLL

SEQ ID NO: 597 - protein, 639 aa, Aspergillus flavus
MHMLSFIGALALPVFVCAQSCEPASLSPRLAGVDLEKFRLTPNAEYVDSDQQIPISTTNVGLIEQSYVETAIKLVRETFPTASFRLREDHYVGDNGVAHVHFRQTVHDLDVDNGDFNVNVGRDGSVFSYGNSFYTGPVPSITQLTKRDFTDPVAALKFALTHLQLPITAGDVSAESTEHPHKYILRGTSGAVTDPKARLVYLVKPEGTLCLVWRVETDVDDNWLLTYVDAKTAEDIHGVVDYISEATFQVYGWGINDPGQVDSRAVLTDPWNLKESPLTWFSDGQKNWTTTRGNNGIAQENINNLPTYLNNFRPDSPTQNFSYEYPAGGSPKDYINASITQLFYTANAYHDLLYTLGFNEKAGNFQWNNSGLGGKDKDYVILNAQDGASRNNADFATPPDGSPARMRMYLFTHTTPPRDGVFESGIVIHEYTHGLSMRLTGGPDNSRCLSAFESASMGEGWGDFMATAIRLKPSDTRATDYGMGMWVYNDEKGIRQYLYSTSMETNPLNYTSLNRMWEAHAGGTVWASMLYEVLWNLIDKHGKNDGPRPTFDERGVPRDGKYLAMKIVIDAMALQPCNPDFVQARNAILDADQALTGGQNKCEIWTGFAKRGLGQGAEYGRGRRVGSYDIPSGVCQKKI

SEQ ID NO: 598 - protein, 634 aa, Aspergillus clavatus
MRGLLLAGLVALPASVLAHPSPAGHGIQRRAVDLNAFRLKTSATYADATETANDPALSFTSLEKQSYVDTATQFVKAIAPGLTFRVVDDHYVGDNEIAHVNFRQTANGLDIDNADFNVNVGKDGKIFSHGNSFFKGKIPDASSLTKRDFSDPTVALKGTMETLKLSLGIEKASIKPTDGEKESYVFNGVSGTVSDPKAKLVYFAKPDGTLALTWRVETDVDHDWLLTYVDAQSGKEVHGVVNYVAEADYKVYPWGLNDPTEGSRVMIKDPWDTVASEFTWNSDGTKKYPTTRGNNGIAQSNPSGEDDYINNHRPRSSNLSFNYPYSPSSSPPSSYIDASIVQLFYTANMYHDLLYTLGFTEKTGNFEFNNNGQGGRGNDYVILNSQDGSGTNNANFATPPDGQPGRMRMYTWTKSQPYRDGSFEAGIVIHEYTHGVSNRLTGGPANSNCLSTIEAGGMGEGWGDFMATAIRLKAADTRAKDYTMGAWAANDPKGIREYPYSTSLTTNPLAYSNVDGDDSVHSIGTVWATMLYELMWNLIDKHGKNVSAKPTMKGGVPTDGKYLAMKLVVDGMALQPCNPNFVQARDAILDADKALTKGANRCEIWKAFAKRGLGYGAKYNENKRVTSNKLPSGC

SEQ ID NO: 599 - protein, 634 aa, Neosartorya fumigata; identical to SEQ ID NO: 399

SEQ ID NO: 600 - protein, 631 aa, Aspergillus niger
MHGLRLVCSIGTLPLVILAYPAASLHTTSAAVDLDSLRLTSNSEYVNSVHVDTNRSVAVSAEEHYTDTAARLVQNIVPGASFRLIDDHFVGDNGVAHVYFRQTLHGIDIDNADFNVNIGKDGLVLSFGHSFFTGALPSSHLDNTNVLSPEAALRGARDAIQLPLTIDNVSTEAAEGRNEYIFREAVGAVSDPKAKLVYLVKPEGTLALTWRIETDMYEHWLLTYIDAETTTVHGVVDYVADATYQVYPWGTNDPAEGHRTIVTDPWDLSASAYTWISDGRDNYTTTRGNNAIAHWNPTGGGSYLYNLRPSDPNLNFQWPYSPNMSPPRSYINASIVQLFYTANAYHDLLYTLGFTESAGNFQWNNSAHGGRDKDYVILNAQDGSGFSNANFATPPDGIPGRMRMYIWIESTPSRDGSFDAGIVIHEYTHGVSNRLTGGSHNAGCLSALESGGMGEGWGDFMATAIRIKPNDTRTTSYTMGAWADNDKCGVRDYPYSTSFTENPLNYTSVNTMNGVHAIGTVWATMLYEVLWNLIDKYGKNDGSRPVFRNGVPTDGKYLMMKLVVDGMALQPCNPNFVQARDAILDADIVLTGGKNRCEIWRGFAKRGLGQGAAHSSLNWMRRGSTLLPTGC

SEQ ID NO: 601 - protein, 633 aa, Aspergillus terreus
MRLLSLAGAMALPLCVLAHPTHRTRGIARRGIDLTPYRLPGNAEYTSSRTSAMRSLLFERADGEDYVETAKKVLQSVHPDATFRVIDDHYVGDNGVAHVHLLQTAHGIDIDNANFNVNIDKNGKVLSYGNSFFSGKIPDSDPLTKRSFSDPVEALKAAATGLGIPLTADDVTSEGLDGTTSYTFKGTKGALSDPTADLVYLAKPDNTLALTWRVETDMNSNWLLTYVDAETAETIHGVVDYISDATYQVYPWGLNDPTEGSRQILEDPWDSKASEFTWIGDGKAKYKTTRGNNGIAQSNPDGGDDYLNNHRPESSSLKFVYPYSPNATSPSSYIDASITQLFYTANTYHDLLYTLGFNEKAGNFEANNNGAGGKGNDFVILNAQDGSGTNNAMFGSPPDGRPGRMYMFIWTESNPPRDGSMEAGIVIHEYTHGLSSRLTGGPANARCVDGEESGGMGEGWGDFMATAVRLKSGDTRQTDYTMGAWAANDPKGIRDYPYSTSMTKNPLTYAHLNNVTEVHEGGTIWASMLYEVMWNLIDKHGKNDAPKPDLKDGVPTDGKYLSMKLVMDGMALQPCNPSFIQARDAILDADVALTKSGNQCEIWKGFAKRGLGERAALKNGIRVDSFDVPKGVC

SEQ ID NO: 602 - protein, 634 aa, Neosartorya fischeri
MRGLLLAGALALPASVFAHPAHQSYGLNRRTVDLNAFRLKSLAKYVNATETVIEAPSSFAPFKQQSYVEAATQHVKMIAPDATFRVVDDHYVGDNGVAHVHFRQTANGLDIDNADFNVNVGKDGKVFSYGNSFYTGQIPSSAALTKRDFSDPVTALKGTTNTLQLPITVDSASSESTEGKESYVFKGVSGTVSDPKANLVYFVKDDGTLALTWRVETDIDSNWLLTYIDAKSGEQIHGVVDYVAEADYQVYAWGINDPTEGERTVVKDPWDSAASEFTWISDGSTKYTTSRGNNGIAQSNPNGGSSYLNNYRPSSSSLSFKYPYSPSSSPPSSYIDASIIQLFYTANTYHDLLYTLGFNEKAGNFEYNTNGQGGRGNDYVILNAQDGSGTNNANFATPPDGQPGRMRMYVWTESTPYRDGSFEAGIVIHEYTHGLSTRLTGGPANSNCLNALESGGMGEGWGDFMATAIRLKPGDKRSTDYTMGEWAANRPGGIRQYPYSTSMSTNPLTYTSVNSLNAVHAIGTVWATMLYEVMWNLIDKHGKNDAPKPTLRDGVPTDGKYLAMKLVIDGMALQPCNPNFVQARDAILDADTALTGGENQCEIWKAFAKRGLGAGAQYSSRNRVGSTEVPSGVC

SEQ ID NO: 603 - protein, 309 aa, Aspergillus clavatus
MSALSSENVNGVYIPSALLVFGTFLVKKEFVPYAVALTAVLAGFKLFTGDSKARKVLNPTEFQEFVLKEKTDISHNVSIYRFALPRPTDILGLPIGQHISLAATIEGQPKEVVRSYTPISSDNEAGYFDLLVKAYPQGNISKHLTTLKVGDVMKVRGPKGAMVYTPNMCRHIGMIAGGTGITPMLQVIKAIIRNRPRNGGTDITKVDLIFANVNPEDILLKEELDKLAAEDEDFNIYYVLNNPPQGWTGGVGFVTPEMIKERLPAPASDVKVLLCGPPPMISAMKKATESLGFTKARPVSKLEDQVFCF

SEQ ID NO: 604 - protein, 309 aa, Neosartorya fumigata
MSALSSENINGVYIPSALLLFGTFIVKKEFVPYAVAVTAILAGLKLFTGGNKPRKVLNPTEFQEFVLKEKIDVSHNVCIYRFALPRPTDILGLPIGQHISLAATIEGQPKEVVRSYTPISSDNEAGYFDLLVKAYPQGNISKYLTTLKIGDTMKVRGPKGAMVYTPNMCRHIGMIAGGTGITPMLQIIKAVIRNRPRNGGNDTTKLDLIFANVNPDDILLKEELDMLAAEDPDFNIYYVLNNPPQGWTGGVGFVTPEMIKEHLPAPASDVKILLCGPPPMISAMKKATESLGYTKARPVSKLEDQVFCF

SEQ ID NO: 605 - protein, 305 aa, Aspergillus niger
MSAFSPENITGAFIPSALFVAGTFFFKQELTPFAVALAAVLVGWKVFSNKPRKVLNPGDFQHFTLKEKNDISHNVTVYRFALPRPTDILGLPIGQHISLAATIGGKEVVRSYTPISSDNEAGYFDLLVKAYPQGNISKYLTTLEVGQTMKVRGPKGAMVYTPNMCRHIGMIAGGTGITPMYQIIKAIIRNRPRNGGNDTTQVDLIFANVNPDDILMKDELEQLAKEDDGFRIYYVLNNPPEGWTGGVGFVTPDMIKERLPAPSSDIKVLLCGPPPMVSAMKKATESLGYTKARPVSKLEDQVFCF

SEQ ID NO: 606 - protein, 292 aa, Aspergillus oryzae
MSAFASENLTSALLVVGTAIFAVLVGAKFLGGSGKPRKVLNPTEFQNFVLKEKNEISHNVAIYRFALPRPTDILGLPIGQHISLAATIEGQPKEVVRSYTPISSDNEAGYFDLLVKAYPQGNISKYLTTLKIGDNMKVRGPKGAMVYTPNMCRHIGMIAGGTGITPMLQIIKAIIRNRPRNGGNDTTQVDLIFANVNPEDILLKEELEQLVKEDDGFRVYYVLNNPPEGWTGGVGFVTPDMIKERLPAPAQDIKIMLCGPPPMISAMKKATESLGYTKARPVSKLEDQVFCF

SEQ ID NO: 607 - protein, 296 aa, Aspergillus terreus
MSTFLQDNGDLSAVLVKFAPFAVAVIAILAAWKFTGSSKPRKVLNPSEFQNFVLKEKTDISHNVAIYRFALPRPTDILGLPIGQHISLAATIEGQPKEVVRSYTPISSDNEAGYFDLLVKAYPQGNISKYLTTLKIGDTLKVRGPKGAMVYTPNMCRHIGMIAGGTGITPMLQIIKAIIRNRPRNGGNDTTKIDLIFANVNEEDILLRDELEKLAKEDDGFRIFYVLNNPPPGWNGGFGFVTAEMIKEHLPAPAKDVKILLCGPPPMVSAMKKATESLGYTKARPVSKLEDQVFCF

SEQ ID NO: 608 - protein, 310 aa, Emericella nidulans
MSALSLENITGVYAPSALLVVGTFILKKEWVPFAVALAAGFVAWKLSVGGSSKPRKVLNPNEFQNFVLKEKNDISHNVTIYRFALPRPTDILGLPIGQHISLAATIEGQPKEVVRSYTPISSDNEAGYFDLLVKAYPQGNISKYLTTLKVGDTMKVRGPKGAMVYTPNMCRHIGMIAGGTGITPMLQIIKAIIRNRPRNGGNDTTQVDLIFANVNPDDILLKDELEKLAAEDDGFRIYYVLNNPPEGWTGGVGFVTPDMIKERLPAPASDIKILLCGPPPMVSAMKKATESLGYTKARPVSKLEDQVFCF

SEQ ID NO: 609 - protein, 309 aa, Neosartorya fischeri
MSALSSENINGVYIPSALLIFGTFIVKKEFVPYAVALTAILAGLKLFTGGSKPRKVLNPTEFQEFVLKEKTDISHNVCIYRFALPRPADILGLPIGQHISLAATIEGQPKEVVRSYTPISSDNEAGYFDLLVKAYPQGNISKYLTTLKIGDTMKVRGPKGAMVYTPNMCRHIGMIAGGTGITPMLQIIKAVIRNRPRNGGNDTTKLDLIFANVNPDDILLKEELDKLAAEDPDFNIYYVLNNPPQGWTGGVGFVTPEMIKEHLPAPASDVKILLCGPPPMISAMKKATESLGYTKARPVSKLEDQVFCF

SEQ ID NO: 610 - protein, 349 aa, Aspergillus clavatus
MQLTVLASAILALAQGALAIPAKAPALDVTLSQIDNTRVKAVVKNTGAEEVTFVHLNFFRDAAPVKKVSLFRNATEVPFNGIKLRFRNKGLTDDVLTTLAAGATFEDEFDIASTADLTEGGVVTVRSQGVVPLTKDNKVSGYIPFTSNEIELEVDGAKAAAVPAAINLLDRRTKVASCSGSRATALQTALRNTVSLANAAASAAESGSSSRFSEYFKTTSSATRSTVAARLRAVAREAGSTSSGKTTYYCGDPYGYCDPNVLAYTLPSKNIVANCDIYYSDLPALARSCHAQDQATTTLHEFTHAPGVYSPGTDDLGYGYQAATALSTSDALNNADTYALFANAVNLNC

SEQ ID NO: 611 - protein, 355 aa, Neosartorya fumigata
MKITALASAILAVAQGALALPARAPALDITLSQVNNTRIKAVVKNSGTEKITFVHLNFFNDPSPVKKVSLYRNATEVEFTGIKQRLRSDGLSNDALTTLAPGATYEDEFDIASTANLTQGGPVTVRTQGFVPIAMNNKIAGYIPYSSNELELEVDAEKAVAVPASIKPLDRRTKITSSCTGNRATVLNTALRNAASIASKAADAASSGSSALFTEYFKSTSGNIRSAVAARLKAVASEASMNGGGSTTYYCSDPYGYCDSNVLAYTLPSTNEVVNCELFYTLQEVTNDCHGQDQATTIIHEFTHAPGVYPPGTEDLGYGYSAATALSTSNALNNADSYALFANGTSSFCVMTAFS

SEQ ID NO: 612 - protein, 404 aa, Aspergillus flavus
MRFISASSLLLALAPTLNAVPVEVAGSAQGLDVTLSQVGNTRIKAVVKNTGSEDVTFVHLNFFKDAAPVQKVSLFRNGMLPNLNLATTEVQFQGIKQRLITEGLSDDALTTLAPGATIEDEFDIASTSDLSEGGTITINSNGLVPITTDNKVTGYIPFTSNELSIDVDAAEAASVTQAVKILERRTKVTSCSGSRLSALQTALRNTVSLARAAATAAQSGSSSRFQEYFKTTSSSTRSTVAARLNAVANEAASTSSGSTTYYCSDVYGYCSSNVLAYTLPSYNIIANCDLYYSYLPALTSTCHAQDQATTTLHEFTHAPGVYSPGTDDLGYGYSAATALSASQALLNADTYALFANGTYSSLLSFVNPLLTPDNSCQPQLLDARTCNRQFGRSTSCKVYWKAVE

SEQ ID NO: 613 - protein, 370 aa, Neosartorya fumigata
MKVTILASAILALINGALALPANTPTLDVTLTQVDNTRIKATVKNTGNEKVTFVHLNFFQDAAPVKKVSLFRNATEVEFTGIKRRLLTEGLSDDALTTLAPGATFEDEFDVASTADLTEGGTVTIRTDGFVPITTDRKVSGYIPYQSNELEIEVDAAKAAAVPQAIKLLDRRTKVASCSGSRASALSTALRNAASLANAAASAASSGSSTRFQEYFKTTSSSTRNTVAARFRAVASEASSQSSGKTTYYCTDPYGYCDSNTLAYTLPSSNLIANCDIYYSYLPALTSSCHAQDQATTTLHEFTHAPAVYSPGTDDYAYGYRASTALSASQALLNADTYALFANGTPPPPPSPLHIHFQMLDTNNGYSREP

SEQ ID NO: 614 - protein, 353 aa, Aspergillus oryzae
MRFISVSSLLLALAPALNAVPVEVAGSAQGLDVTLSQVGNTRIKAVVKNTGSEDVTFVHLNFFKDAAPVQKVSLFRNATEVQFQGIKQRLITEGLSDDALTTLAPGATIEDEFDIASTSDLSEGGTITINSNGLVPITTDNKVTGYIPFTSNELSIDVDAAEAASVTQAVKILERRTKVTSCSGSRLSALQTALRNTVSLARAAATAAQSGSSSRFQEYFKTTSSSTRSTVAARLNAVANEAASTSSGSTTYYCSDVYGYCSSNVLAYTLPSYNIIANCDLYYSYLPALTSTCHAQDQATTTLHEFTHAPGVYSPGTDDLGYGYSAATALSASQALLNADTYALFANAVNLNC

SEQ ID NO: 615 - protein, 352 aa, Aspergillus terreus
MRFTALATAILPLACNVLALPAKTGEAPKLDVSLSQVDNTLIKAVVKNTGSEDITFVHLNFFRDKAPVKKVSLFRNATELPFQGIKQRFRTEGLTEDALTVLAPGESIEDEFDIAATSDLSEGGSITISTDGFVPIATGNKITGSVPYSSNELSIEVDAAQAASVASAVKPLDKRTKVASCSGTRSSALSTALKNTVSLANAAASAAQSGSSSRFQEYFKTTSSSVRSTVAARFRAVASEASSTSSGSTTYYCTDTYGYCSSNVLAYTLPAYNIIANCDIYYTYLSALTRTCHAQDQATTTLHEFTHAPGVYSPGTDDLGYGYDAATALSSSQALNNADTYALFANAVNLNC

SEQ ID NO: 616 - protein, 354 aa, Emericella nidulans
MKFIAPIALLGMFQAASASPVDIKTSNAGLQVTLSQINNTRIKAVVQNTGSEEVTFMHMNFFKDASPVKKVSIFRNNDEVEFQGIKYRVQTDDLSDEVLTSLAPGASFEDEFDIAATSDLSSGGPVTIRSEGIVPLVTEKSVTGSLSYSSNELTIDVDGAEAAKIETVGAQLSKLSKRTRVSSCSGTRATALQTALRNAASLASRAASAASQGGSTFTTFFKSDSSSTRNAVAARLRAVASESSSTSSGSTTYYCTDVYGYCSSNVLAYTLPAYNIIANCDIYYTYLPALTGTCYAQDQATTTLHEFTHAPGVYSPGTDDLGYGYDAATRLSASQALNNADSYALYANAVYLGC

SEQ ID NO: 617 - protein, 467 aa, Neosartorya fischeri
MKITALASAILAVVHGALALPARAPALDITLSQVNNTRIKAVVKNSGSEKITFVHLNFFNDPSPVKKVSLYRNATEVEFTGIKQRLRSDGLSNEALTTLAPGATYEDEFDIASTANLTQGGPVTVRTQGFVPIAMNNKIAGYIPYSSNELELEVDAVKAVAVPASIKPLDRRTKITSSCTGDRAAVLNTALRNAASIAGKAANAASSGSSALFAEYFKSTSGNIRSAVAARLKAVASEASLNGGGSTTYYCSDPYGYCDSNVLAYTLPSTNEVVNCELFYTLQEVTNDCHGQDQATTIIHEFTHAPGVYPPGTEDLGYGYSAATALSANNALNNADSYALFANAVYLNCQGQTGGQTMWDGNSQPGQTAPGTQTMWDGNSQPGQTEPGTQTMWDGNSQPGQTEPGTQTMWDGNSQPGQTEPGTQTMWDGNSQPGQTEPCTQTMWDGSSEPGQTEPDAHTTWGNFYQA

SEQ ID NO: 618 - protein, 370 aa, Neosartorya fumigata
MKVTILASAILALINGALALPANTPTLDVTLTQVDNTRIKATVKNTGNEKVTFVHLNFFQDAAPVKKVSLFRNATEVEFTGIKRRLLTEGLSDDALTTLAPGATFEDEFDVASTADLTEGGTVTIRTDGFVPITTDRKVSGYIPYQSNELEIEVDAAKAAAVPQAIKLLDRRTKVASCSGSRASALSTALRNAASLANAAASAASSGSSTRFQEYFKTTSSSTRNTVAARFRAVASEASSQSSGKTTYYCTDPYGYCDSNTLAYTLPSSNLIANCDIYYSYLPALTSSCHAQDQATTTLHEFTHAPAVYSPGTDDYAYGYRASTALSASQALLNADTYALFANGTPLLPLSTSTSKCSTLTMVIAVNLNC

SEQ ID NO: 619 - protein, 284 aa, Aspergillus flavus
MAFINSAAEDEVQFEGIKRRLRSSGITKEAVTSLGAGETLEDEFDIASTSDLASGGPVSIRSHGFVPIVVDGKITGYIPYKSNDLTVNVDGGKAAKVTKALSQLTRRTEVTDCKGDAESSLTTALSNAAKLANQAAEAAESGDESKFEEYFKTTDQQTRTTVAERLRAVAKEAGSTSGGSTTYHCSDPYGYCEPNVLAYTLPSKNEIANCDIYYSELPPLAQKCHAQDQATTTLHEFTHAPGVYQPGTEDLGYGYDAATQLSAQDALNNADSYALYANAIELKC

SEQ ID NO: 620 - protein, 360 aa, Emericella nidulans
MKFIAPAALLAVLQAASASPVDIRTSTTGLQVTLSQVDNTRIKAVVQNTGSQEVTFMHLNFFKDASPVKKVSLFRDSMLHPILSSCNDEVKFEGIKYRVQSSNLSDKVLTSLAPGASFEDEFDIATTADLSSGGPITIRSQGTVPLVKDRSIKGRIPYTSNELTIEVDGAEASKIGTVGSKVKRTELSGCSGDRGAALETALQNAVSLANKAASAASEGGEAFTTFFKDDSSSTRETVAARLKAVAEEAGSTSGGSTTYYCTDTLGYCEQNVLAYTLPSQDLIANCDIYYSELPALADTCYDQDQATTTLHEFTHAPGVYSPGTDDLGYGYDAATALDTDDALNNADSYALYANAINLGC

SEQ ID NO: 621 - protein, 363 aa, Neosartorya fischeri
MKVTVLASAILALINGALALPANAPTLDVTLTQVDNTRIKATVKNIGNEEVTFVHLNFFQDAAPVKKVSLFRNATEVEFTGIKRRYLTEGLSDDALTTLAAGATFEDEFDIASTADLTEGGTVTIRTDGVVPMATDRKVSGYIPYQSNELEIEVDAAKAATVPQAIKLLDRRTKVASCSGSRASALSTALRNTVSLANAAASAASSGSSARFQEYFRTTSSSTRNAVAARFRAIANEASSQSSGKTTYYCTDPYGYCDSNTLAFCLPSSNVIANCDLYYSDLPALTRSCHAQDQATTSLHEFTHAPGVYSPGTDDFAYGYRASTALSASQALLNADNYALFANGTPPSFPSPHPLSSAQTNMV

SEQ ID NO: 622 - protein, 450 aa, Neosartorya fumigata
MKITALASAILAVAQGALALPARAPALDITLSQVNNTRIKAVVKNSGTEKITFVHLNFFNDPSPVKKVSLYRNATEVEFTGIKQRLRSDGLSNDALTTLAPGATYEDEFDIASTANLTQGGPVTVRTQGFVPIAMNNKIAGYIPYSSNELELEVDAEKAVAVPASIKPLDRRTKITSSCTGNRATVLNTALRNAASIASKAADAASSGSSALFTEYFKSTSGNIRSAVAARLKAVASEASMNGGGSTTYYCSDPYGYCDSNVLAYTLPSTNEVVNCELFYTLQEVTNDCHGQDQATTIIHEFTHAPGVYPPGTEDLGYGYSAATALSTSNALNNADSYALFANAVYLNCQGQTGGQTTWDGYSQPGQTEPGTQTMWDGYSQPGQTEPGTQTMWDGYSQPGQTEPGTQTTWDGYSQPGQIEPCTQTMWDGGSEPGQTEPDAQTMWDNFYQA

SEQ ID NO: 623 - protein, 639 aa, Aspergillus oryzae
MHMLLFIGALALPVFVCTQSCEPASLSPRLAGVDLEKFRLTPNAEYVDSDQQIPISTTNVGLIEQSYVETAIKLVRETFPNATFRLREDHYVGDNGVAHVHFRQTVHNLDVDNGDFNVNVGRDGSVFSYGNSFYTGPVPSITQLTKRDFTDPVAALKFALTHLQLPITAEDVSVESTKHPHKYVLRGTSGAVTNPKARLVYFVKPDGTLCLVWRVETDVDDNWLLTYVDAKTAEEIHGVVDYVSEATFQVYGWGINDPGQVDSRAVLTDPWDLKESPLTWFRDGQKNWTTTRGNNGIAQENINNLPTYLNNFRPDSPTQNFSYEYPAGGSPKDYINASITQLFYTANAYHDLLYTLGFNEKAGNFQWNNSGLGGKEKDYVILNAQDGASRNNADFATPPDGSPARMRMYLFTHTTPPRDGVFESGIVIHEYTHGLSMRLTGGPDNSRCLSAFESASMGEGWGDFMATAIRLKPSDTRATDYGMGMWVYNNEKGIRQYLYSTSMETNPLNYTSLNRMWEAHAGGTVWASMLYEVLWNLIDRHGKNDGPRPTFDERGVPKDGKYLAMKIVIDAMALQPCNPDFVQARNAILDADQALTGGQNKCEIWTGFAKRGLGQGAEYGRGRRVGSYDIPGDVCQKKI

SEQ ID NO: 624 - protein, 634 aa, Aspergillus oryzae
MRGLLLAGALGLPLAVLAHPTHHAHGLQRRTVDLNSFRLHQAAKYINATESSSDVSSSFSPFTEQSYVETATQLVKNILPDATFRVVKDHYIGSNGVAHVNFRQTAHGLDIDNADFNVNVGKNGKIFSYGHSFYTGKIPDANPLTKRDYTDPVAALRGTNEALQLSITLDQVSTEATEDKESFNFKGVSGTVSDPKAQLVYLVKEDGSLALTWKVETDIDSNWLLTYIDANTGKDVHGVVDYVAEADYQVYAWGINDPTEGPRTVISDPWDSSASAFTWISDGENNYTTTRGNNGIAQSNPTGGSQYLKNYRPDSPDLKFQYPYSLNATPPESYIDASITQLFYTANTYHDLLYTLGFNEEAGNFQYDNNGKGGAGNDYVILNAQDGSGTNNANFATPPDGQPGRMRMYIWTESQPYRDGSFEAGIVIHEYTHGLSNRLTGGPANSRCLNALESGGMGEGWGDFMATAIRLKAGDTHSTDYTMGEWAANKKGGIRAYPFSTSLETNPLTYTSLNELDEVHAIGAVWANVLYELLWNLIDKHGKNDGPKPEFKDGVPTDGKYLAMKLVIDGMALQPCNPNCVQARDAILDADKALTDGANKCEIWKAFAKRGLGEGAEYHASRRVGSDKVPSDAC

SEQ ID NO: 625 - protein, 403 aa, Aspergillus clavatus
MQSIKRTLLLLGALLPAALAAPAREPHPSSNIIPGKYIITFKSGIDTAAIESHTAWASNIHKRNLERRGLVGGEFPAGIERKFKIKDFAAYAGSFDPATIEEIRNSEDVAHVEEDQIWYLDALTTQSGAPWGLGSISHKGQASTNYVYDTSAGAGTYAYVVDSGINVDHIEFQGRATKAYNAVGGDHVDTLGHGTHVAGTIGGKTYGVAKQTNLLSVKVFEGRTGSTSVILDGFNWAANDIVSKGRKGKAAINMSLGGGYSYAFNNAVESAYEQGVLSVVAAGNEGVDASNSSPASAPNALTVGATNKSNARASFSNYGKVLDIFAPGQDILSAWIGSTTATNTISGTSMATPHVVGLAVYLMGLEGVSGPAAVTQRILQLATSGVISDVKGSPNKLAYNGAA

SEQ ID NO: 626 - protein, 403 aa, Neosartorya fumigata
MLSIKRTLLLLGAVLPAVFGAPVQETRRAAQKIPGKYIVTFKPGTDTATIESHTLWATDLHKRNLERRDTTSGEPPVGIEKSYKIKDFAAYAGSFDDATIEEIRKSADVAHVEEDQIWYLDALTTQKGAPWGLGSISHKGQASTDYIYDTSAGAGTYAYVVDSGINVNHVEFESRASLAYNAAGGSHVDSIGHGTHVAGTIGGKTYGVAKKTNLLSVKVFQGESSSTSIILDGFNWAVNDIVSKGRTKKAAINMSLGGGYSYAFNNAVENAFDEGVLSVVAAGNENSDASNTSPASAPNALTVAAINKSNARASFSNYGSVVDIFAPGQDILSAWIGSTTATNTISGTSMATPHIVGLSVYLMGLENLSGPAAVTARIKELATNGVVTNVKGSPNKLAYNGNA

SEQ ID NO: 627 - protein, 403 aa, Aspergillus flavus
MQSIKRTLLLLGAVLPAVLAGPIFPHRRAPTTIPGKYIVTFKSDVDQAAIDKHTAWATDIHKRNLQRRDSSEEDLPIGIERNFKINKFAAYSGSFDEDTIAQIRQSDEVAAVEEDQVWHLFDLTTQSDAPWGLGSISHKGQPSTDYIYDTNGGEGTYAYVVDIGINVDHEEFEGRASLAYHAAGGQHVDGVGHGTHVSGTIGGKTYGVAKKANLLSVKVFVGESSSTSIILDGFNWAANDIVSKKRTGKAAINMSLGGGYSKAFNDAVENAFNEGVLSIVAAGNENTDASRTSPASAPDAFTVAAINVNNTRAYFSNYGSVVDIFAPGQNILSAWIGSNTATNTISGTSMATPHIVGLSIYLMSLEVLSSPKAVSDRIKELATRGVVSNVAGSPNLLAYNGNA

SEQ ID NO: 628 - protein, 403 aa, Aspergillus flavus
MQSIKRTLLLLGAILPAVLGAPVQETRRAAEKLPGKYIVTFKPGIDEAKIQEHTTWATNIHQRSLERRGATGGDLPVGIERNYKINKFAAYAGSFDDATIEEIRKNEDVAYVEEDQIYYLDGLTTQKSAPWGLGSISHKGQQSTDYIYDTSAGEGTYAYVVDSGVNVDHEEFEGRASKAYNAAGGQHVDSIGHGTHVSGTIAGKTYGIAKKASILSVKVFQGESSSTSVILDGFNWAANDIVSKKRTSKAAINMSLGGGYSKAFNDAVENAFEQGVLSVVAAGNENSDAGQTSPASAPDAITVAAIQKSNNRASFSNFGKVVDVFAPGQDILSAWIGSSSATNTISGTSMATPHIVGLSLYLAALENLDGPAAVTKRIKELATKDVVKDVKGSPNLLAYNGNA

SEQ ID NO: 629 - protein, 403 aa, Neosartorya fumigata; identical to SEQ ID NO: 626

SEQ ID NO: 630 - protein, 403 aa, Aspergillus oryzae; identical to SEQ ID NO: 628

SEQ ID NO: 631 - protein, 403 aa, Emericella nidulans
MHSFKRSLLLLGALLPAVFGAPVEPRRAAEKVPGKYIVTFKSGLNVDQIDAHTSWASNVHKRNLERRGLAERDQYSGIEKNYKINKFAAYSGSFDDATIEEIRNSADVAHVEEDQIWYIDALTSQSGAPWGLGAISHKGEASTTYVYDTSAGEGTYAYVVDTGINADHEEFGGRASLAYNAVGGQHVDSVGHGTHVAGTIGGETYGVSKKANLLSVKVFQGESSSTSIILDGFNWAANDIVSKGRTGKSAINMSLGGGYSYAFNQAVEDAYDEGVLSVVAAGNDNIDASDSSPASAPNALTVAASTKSNTRASFSNYGSVVDIFAPGQDILSAWIGSTTATNTISGTSMATPHVVGLSLYLIALEGLSSASAVVSRIKELATQGVLSNVQGSPNLLAYNGADE

SEQ ID NO: 632 - protein, 403 aa, Neosartorya fischeri
MLSIKRTLLLLGAVLPAVFGAPVQETRRAAQKIPGKYIVTFKPGTDAATIESHTLWATDLHKRNLERRDATSGEPPIGIEKNYKIKDFAAYAGSFDDTTIEEIRKSADVAHVEEDQIWYIDALTTQKGAPWGLGSISHKGQASTDYIYDTSAGAGTYAYVVDTGINVNHVEFEGRASLAYNAAGGSHVDSVGHGTHVAGTIGGKTYGVAKKTNLLSVKVFQGESSSTSIILDGFNWAANDIVSKGRTRKAAINMSLGGGYSYAFNNAVENAFDEGVLSVVAAGNENTDASNTSPASAPNALTVAAINRSNARASFSNYGSVVDIFAPGQDILSAWIGSNTATNTISGTSMATPHIVGLSVYLMGLESLSGPAAVTSRIKQLATNGVVTNAQGSPNKLAYNGNA

SEQ ID NO: 633 - protein, 452 aa, Aspergillus clavatus
MRSLTLLLSLSTALRSVAAPHPASPQGQIPLGGIPSASTSEVGIGIGIGIEEDPFPPAAGSGHNDLEDVINASPLLSFHRDLVSIESISGHEARAAAFVADFLEAHNFTVVKQPVAGDRVNIFASPRAHAHSRPEILLTSHLDTVPPFIPYSLHRNDSRPTDRQLIRIAGRGAVDAKASVAAQIFAALDILHADPSAPLGLLFVVGEEVGGDGMKAFSHDPRLNPAPSRFHTVIFGEPTDFALVAGHKGMLGFEVLASGRPAHSGYPWLGRSAVSAILPALRRVDALGHIPVHHGGLPASHKYGRTTLNIGVLEGGVATNVVPAAARADVAVRLAAGSVDDARAIIAAAVADATHRDPAVVVDFSRHLEAYPPQDLDVDVPGFEITTVNYGTDVPNLHLHPRPDGPVKRYLYGPGSIFVAHGENEGLTVGALEEAVGGYKKLVQAALERTRA

SEQ ID NO: 634 - protein, 440 aa, Neosartorya fumigata
MKPLTSLLLSAALSAAAPHPASPQAPLADIPSIVGETRTEFSQNSLDDVVNASPLLSFHRDLVSIESISGNEGAAGAFVADFLASHNFTVIKQPVTTESDARFNIFAIPESQYHSLDESHSSHSPQILLTSHIDTVPPFIPYSLHRDANDTDDRNILIAGRGTVDAKGSVAAQIFAALDILAAQPSAPLGLLFVVGEETGGDGMKAFSQSTHLNPSPSRFHTVIFGEPTELALVAGHKGMLGFEVAAHGHAAHSGYPWLGESAISAILPALARVDQLGDIPVEEGGLPASDKYGRTTVNIGRMEGGVATNVVPSKARAGVAVRLAAGTHDEAREVVLKAVRDVTGGDDRVVVNFSLEGYGPQDLDTDVPGFNITTVNYGTDVPNLQLHPRPDGKVRRYLYGPGTIHVAHGDNEALTVAQLEEAVRGYKKLIQAALDRSAS

SEQ ID NO: 635 - protein, 418 aa, Aspergillus flavus
MKATDLFHVTVLVAGALALEHQQPLIGDLSQDLNHIIDSSPLLSFHRALVQIPSISEHEKNVGEYVLDFLSSQNLTVEKQIVTPESDTEEERFNIYAYVGKNRQPDVLVTSHIDTVPPFIPYSLHAPTSDTSFIRTDLVIAGRGTVDAKASVAAIVFAALETLDENPNASIGLLFDVGEENSGVGMKHFSNSELNPTPPTYHTVIFGEPTELSLVAAHKGTLGFKLVAEGKAAHSGYPWLGESAISSLIPVLAHLDTLQDLPPEKGGLLRSETLGKSTLNIGRVHGGIAANVVPAHAEAAISVRLAAGTPEDTRTIIERAVAKVTSGDRSVYPDFGDRKAGAPPQYFDVDVDGFEVITVNYGTDAPALKIHDQRTQRVKRYLYGPGSILVAHADNEAITVGELEEAVRGYKRLIAASL

SEQ ID NO: 636 - protein, 440 aa, Neosartorya fumigata; identical to SEQ ID NO: 634

SEQ ID NO: 637 - protein, 416 aa, Aspergillus niger
MKSPISLLAAVGVASAASPQTLLSLASTASDIIDASPFLSFHRDIVQIPSISGNETAVGTFVAEFLESHNFTVIKQPVPSSSNGDPNRFNIFAYPSTSPSQGRPDILLTSHIDTVPPFIPYGLHDDANNNSNILISGRGTVDAKASVAAQIFAVLDTLESNPTASLGLLFVVDEEVGGLGMRTFSDNSTLNPSPSPYHTVIFGEPTEQALVAGHKGMLEFPIIATGQAAHSGYPWLGSSAISALLPALSRVDRLGKIPEAEGGLPASEKYGETTVNIGRVDAGVAANVVPSSAIAEVAIRLAAGTPDEAREIVARAVRNATGGDEHVYCDFAAYAGGYAPQDLDTDVPGFEVTTVNYGTDVPNLKVSEGVKRYLYGPGSIHVAHGDNEAITVGQLEEAVRGYKQLIEAAVQRARRT

SEQ ID NO: 638 - protein, 418 aa, Aspergillus oryzae
MKATDLFHVTALVAGALALEHQQPLIGDLSQDLNHIIDSSPLLSFHRALVQIPSISEHEKNVGEYVLDFLSSQNLTVEKQIVTPESDTEEERFNIYAYVGKNRQPDVLVTSHIDTVPPFIPYSLHAPTSGTSFIRTDLVIAGRGTVDAKASVAAIVFAALETLDENPNASIGLLFDVGEENSGVGMKHFSNSELNPTPPTYHTVIFGEPTELSLVAAHKGTLGFKLVAEGKAAHSGYPWLGESAISSLIPVLAHLDTLQDLPPEKGGLLRSETLGKSTLNIGRVHGGIAANVVPAHAEAAISVRLAAGTPEDTRTIIERAVAKVTSGDRSVYPDFGDRKAGAPPQYFDVDVDGFEVITVNYGTDAPALKIHDQRTQRVKRYLYGPGSILVAHADNEAITVGELEEAVRGYKRLIAASL

SEQ ID NO: 639 - protein, 433 aa, Aspergillus terreus
MKSAISLLLASAATYVGASPHPEPPQLVLSPSTSTGVHGDEATSAIASSAADDVISDSPFLSFHRDLVQISSISGHERKAGDFVAEFLQAHNFTVVKQPVPSKDGRQPDEDRFNVFAYPSGASAAPKILLTSHIDTVPPFIPYSAARVDNDIRISGRGSVDAKGSVAAQVFAALDILERDPSAPLGLLFVVDEEVGGTGMKVFSDSSLNPSPSPFRAVIFGEPTDLALVSGHKGMLGFELVATGQAAHSGYPWLGHSAVSALLPALLRVDRLGDIPAQEGGLPSSPKYGRTTVNIGRMEGGVAANVVPASAHANVAVRLAAGTPDEARDIVRRAVRDATGGDENVYPDFSEWSEGYPPQDLDTDVDGFEVTTVNYGTDVPNLRIHERADGAPVRRYLYGPGSIHVAHGDHEAITVAQLEEALQGYRKLIEAAM

SEQ ID NO: 640 - protein, 424 aa, Emericella nidulans
MNLSILAALALVSFSTASTEQQSPLFSHADRSPKSIIDASPFLSLHRDLVSIPSVSGNESAVGEFLASFLESHNFNVIKQPVEGRTSRFNVFAYPSSAPSKPSILLTSHIDTVPPFIPYSVQYSDNERDIVISGRGCDDAKGSVAAQVVAALETLAENPSAPLALLFVVDEEVGGAGMRAFSFNTTLNPSPDSPSSLVDGYKTIIFGEPTDLALVSGHKGMLSFHVHVTGKSSHSGYPWLGESALSTILPALSVIDKLGDIPVEKGGLPSSEKYGRTTVNIGRVEAGVAGNVVPAAADADVTVRLAAGTPEEAMDIVLAAVANATGDNPHVVVKFAEGPNGGVGGYAPQDLDTDVPGFEITTVNYGTDVPNLKVYEENDVKRYLYGPGSIHVAHGDHESITVAQLEEAVKGYKKLITAALERIY

SEQ ID NO: 641 - protein, 441 aa, Neosartorya fischeri
MKPLSSLLLSAALSAAAPPHPASPQAPLADIPRIGVETRTEFSQNSLDDVVNASPLLSFHRDLVSIESISGNEGAAGAFVADFLESHNFTVIKQPVTTESDARFNIFAFPKSQSHSLDESHPSHGPQILLTSHIDTVPPFIPYSLHRDANDTDDRNILIAGRGTVDAKGSVAAQIFAALDTLAVQPPAPLGLLFVVGEETGGDGMKAFSQSTHLNPSPSRFHTVIFGEPTELALVAGHKGMLGFEVAAHGHAAHSGYPWLGESAISAILPALARVDHLGNIPVEEGGLPASDKYGRTTVNIGQMEGGVAANVVPSEARAGVAVRLAAGTHDEAREIVLKAVRDATGGDDRVVVNFSLEGYGPQDLDTDVAGFNVTTVNYGTDVPNLQLHPRPDGKVKRYLYGPGTIHVAHGDNEALTVAQLEEAVRGYKKLIQAALDRSTS

SEQ ID NO: 642 - protein, 415 aa, Aspergillus clavatus
MKFPWLLLVKGAASVAAQKPLATSGSGQVLGTFNLEDIINASPLLSFHRDIVKIPSTTDNEYEVGQFIGDFLEQKHFTVEKQSISDSRFNVYAYQGNNSLPDILVTSHIDTVPPFLPYNLDYPILGGGHEFDRQSVLIAGRGTVDAKGSVAAQIFAVLEILEEKPDASIGLLFVVGEEKGGIGMETFSKNPSPSSFHTVIFGEPTGLNLVSGHKGVIGFNIKATGRAAHSGYPWLGKNAISALLPVASFTERLGEIPFQDGGLPSSLKYGNSTVNLGVIQGGVAVNVVPDSAEAIFSVRVAAGTPDESKSIITREVNKFTKNDPNIEVAFYPGGLSPTDLDTDVEGFDIITVNYGTDVPKLAIHGGGDRVVKRYLYGPGSILVAHGEDEALTVGDLEGAVQGYRVLIEKALSRDV

SEQ ID NO: 643 - protein, 430 aa, Aspergillus flavus
MKSIYSLVLCTALTAASPHPAFPQSPLGVPTTSSPSTGTFNSAEEVINASPFLSFHRDIVQIESISSNEHNVGEFIADFLRARNFTVIEQAVTSSSQRENQERFNVFAYPSSNTPEILITSHIDTVPPFIPYSLDTDSTTDNDPSTIRISGRGSVDAKGSVAAQIFAALDVLEQNPSAPLGLLFVVGEETGGDGMRAFSESSLNPAPSAFHTVIFGEPTELALVSGHKGMLGFEIVAKGHAAHSGYPWLGRSAISAVLPALSRVDQLGNIPADKGGLPSSPKYGNTTVNIGRVDAGVAANVVPATARADVAVRLAAGTPDEARDIVRRAVRDATDGNPDVYAEFNTRSEGYPPQDLDTDVDGFDITTVNYGTDVPNLQIHEREDGPVRRYLYGPGSIHVAHGDNEAITVGDLQEAVRGYRKLIEAALQRR

SEQ ID NO: 644 - protein, 430 aa, Aspergillus oryzae
MKSIYSLVLCTALTAASPHPAFPQSPLGVPTTSSPSTGTFNSAEEVINASPFLSFHRDIVQIESISSNEHNVGEFIADFLRARNFTVIEQAVTSSSQTENQERFNVFAYPSSNTPEILITSHIDTVPPFIPYSLDTDSTTDNDPSTIRISGRGSVDAKGSVAAQIFAALDVLEQNPSAPLGLLFVVGEETGGDGMRAFSESSLNPAPSAFHTVIFGEPTELALVSGHKGMLGFEIVAKGHAAHSGYPWLGRSAISAVLPALSRVDQLGNIPADKGGLPSSPKYGNTTVNIGRVDAGVAANVVPATARADVAVRLAAGTPDEARDIVRRAVRDATDGNPDVYAEFNTRSEGYPPQDLDTDVDGFDITTVNYGTDVPNLQIHEREDGPVRRYLYGPGSIHVAHGDNEAITVGDLQEAVRGYRKLIEAALQRR

SEQ ID NO: 645 - protein, 378 aa, Aspergillus clavatus
MKYASFLALVGFITSTSAIGVSGAAEGFAKGVTGGGSATPVYPSTTAELVSYLTDSQPRVIVLTKTFDFTNTEGSTTATGCAPWGTAPGCQLAINQNDWCKNYQSSAPSVSVTYDNAGVLGMTVASDKTLLGSGSSGVIKGKGLRVVSGAKNIIIQNVAITDINPKYVWGGDAITIDNADMVWIDHVTTARIGRQHLVLGTSASNRVTISNSYFNGVSSYSATCDGYHYWGIYLTGSNDLVTMKGNYIHHFSGRSPKIQGNTLLHAVNNYWYDSTGHAFEIGSGGYVLAEGNVFQNIKTIVEPPVGGQLFTSPNSNTNQACSAYLGHVCQVNGFGSSGPFSQADTGLLSKFSGKNVASASAYTVAQSRVPSSAGQGKL

SEQ ID NO: 646 - protein, 378 aa, Neosartorya fumigata
MKYQDLLAIAGCIANAGAVSVSGAAEGFAKGVTGGGSATAVYPSTTAELVSYLGDSEARVIVLTKTFDFTGTEGTTTATGCAPWGTASACQLAINQNNWCTNYEPNAPSVSVTYDNAGILGITVKSNKSLIGSGSSGVIKGKGLRIVSGASNIIIQNIAITDINPKYVWGGDAITIDNADMVWIDHVTTARIGRQHLVLGTSASNRVTISNNYFNGVSSYSATCDGYHYWGIYLDGSNDLVTMKGNYIYHFSGRSPKVQGNTLLHAVNNYWYDSSGHAFEIGSGGYVLAEGNVFQNIDTIVQSPVDGQLFTSPDSNTNKVCSTYLGHVCQVNGFGSSGTFSQADTGFLSNFAGKNIASASAYTAVQSTVPSSAGQGKI

SEQ ID NO: 647 - protein, 375 aa, Aspergillus flavus
MKITSTIPAVLLGLAPLSAAVSVSGSAEGFASGVTGGGDAEAQIPSDIDELKEWLTDDTPRVIVLDKEYDFTESEGTTSGTVCASWGTGSGCQKIIQDDCGDSPSSQATWYTAGTTGIDVASDKTILGDGDKGVIKGKGLRFRDGVSNIIVQNIEISDLNPEYVWGGDALYFDGSDLIWIDHVTTARTGRQHYTFGYETNTRITLSNNFINGETTYSTGCDGYTYWTFEMVGEADQITLQNNYIYMTAGRSPALSGGTLLHAVNNVWEKNNGHALEGGDAGARGIFEGNAWIGVSTIVGDYAGRLFNAPDSSSAGDCESALGRACEVNAVSDSGDLTAYTDTSFFSDFSGLTIAPATSATDAQSSVPNNAGMGKL

SEQ ID NO: 648 - protein, 380 aa, Neosartorya fumigata
MRYTSLFTAVTAALASTAAAVGVSGAAEGFAKGVTGGGNASPVYPKTNDELVSYLGDSQARVIVLTKTFDFRGTEGTTSGTGCAPWGTNAKCQLAINQNSWCDNYQPNAPKVSVSYDNAGVLGITVNSNKSLIGQGSAGVIKGKGLRIVSGAKNVIIQNIAITDINPKYVWGGDAITINNADLVWIDHVTTARIGRQHIVLGTQADNRITISNCYIDGVTDYSATCNGYHYWGIYLDGSNDMVTMKGNYIYHTSGRSPKVQGNTLLHAVNNYWYDNAGHAFEIGSGAYVVAEGNVFQNVKAVAESPISGKLFSSPDASTNKVCSSYLGHTCQINGFGSSGAFSQADTDILSKFKGKNIASAAAYNTVVSSVTANAGNGKL

SEQ ID NO: 649 - protein, 379 aa, Aspergillus niger
MKYSTIFSAAAAVFAGSAAAVGVSGSAEGFAEGVTGGGDATPVYPDTIDELVSYLGDDEARVIVLTKTFDFTDSEGTTTGTGCAPWGTASACQVAIDQDDWCENYEPDAPSISVEYYNAGVLGITVTSNKSLIGEGSSGAIKGKGLRIVSGAENIIIQNIAVTDINPKYVWGGDAITLDDCDLVWIDHVTTARIGRQHYVLGTSADNRVSLTNNYIDGVSDYSATCDGYHYWGIYLDGDADLVTMKGNYIYHTSGRSPKVQDNTLLHCVNNYFYDISGHAFEIGEGGYVLAEGNVFQNVDTVLETYEGAAFTVPSTTAGEVCSTYLGRDCVINGFGSSGTFSEDSTSFLSDFEGKNIASASAYTSVASSVVANAGQGNL

SEQ ID NO: 650 - protein, 379 aa, Aspergillus niger
MKYSTIFSAAAAVFAGSAAAVGVSGSAEGFAEGVTGGGDATPVYPDTIDELVSYLGDDEARVIVLTKTFDFTDSEGTTTGTGCAPWGTASACQVAIDQDDWCENYEPDAPSVSVEYYNAGVLGITVTSNKSLIGEGSSGAIKGKGLRIVSGAENIIIQNIAVTDINPKYVWGGDAITLDDCDLVWIDHVTTARIGRQHYVLGTSADNRVSLTNNYIDGVSDYSATCDGYHYWGIYLDGDADLVTMKGNYIYHTSGRSPKVQDNTLLHCVNNYFYDISGHAFEIGEGGYVLAEGNVFQNVDTVLETYEGAAFTVPSTTAGEVCSTYLGRDCVINGFGCSGTFSEDSTSFLSDFEGKNIASASAYTSVASRVVANAGQGNL

SEQ ID NO: 651 - protein, 379 aa, Aspergillus oryzae
MKFALLSGVAAGLLPVVSAVSVSGAAEGFAKGVTGGGSAAAVYPTTTDELVSYLGDSSPRVIVLDRTFDFTGTEGTTTATGCAPWGTAAACQLAINQNDWCTNYQPDAPSVSVTYDNAGILGITVASDKTILGSGSSGVIKGKGLRIVSGASNIIIQNIAITDLNPKYVWGGDAITLNDADMVWIDHVTTARIGRQHLVLGNDADNRVTVSNSYFNGVSDYSATCDGYAYWGIYFAGSSDLITFKGNYIHHFSGRSPKVQENTLLHAVNNYWYDSTGHAFEIGAGGYVLAEGNVFQNIDTPVQSPIEGQLFTSPDTNTNTVCATYLGRNCEVNGFGSSGTFSQADTAFLVNFEGKNIASASPYADAQSSVPSSAGQGNL

SEQ ID NO: 652 - protein, 378 aa, Aspergillus terreus
MKFPAFITAIISIASLSSAISVSGAAEGFAKGVTGGGSATPVYPSTISELVSYLKDSQPRVVVLTKTFDFRGSEGTTTGTGCAPWGTASNCQLAINKDNWCTNYQPNAPSASVSYDNAGVLGITITSDKTLIGQGSSGVIKGKGIRIVSGAKNVIIQNIAITDINPKYVWGGDAITLNNCDMVWIDHVTTARIGRQHLVLGTSASNRVTVSNSYFNGVSDYSATCNGYHYWGIYFAGSNDMVTLKGNYIYHMSGRSPKVQSNTLLHAVNNYWYDISGHAFEIGAGGYVLAEGNVFQNVPTILEEDDGQLFTSPNSNTNQVCSTYLGHVCQVNGFGSSGTFSSADTGFLVNFQGKNVASASAYTVAQSSVPSNAGQGKL

SEQ ID NO: 653 - protein, 379 aa, Emericella nidulans
MKTTFLVSLATAALSSTAAAVSVSGSAEGFAKGVTGGGSATAVYPDTIDELVSYLGDDEARVIVLSKTFDFTDSEGTTTETGCAPWGTDAACQVAINQNDWCTNYQPDAPSVSVTYDNAGTLGITVNSDKTLIGEGSAGVIKGKGLRLVSGTSNVIIQNIAITDINPKYVWGGDAITLNDVDMVWIDHVTTARIARQHIVLGTEADNRVTISNSFINGESDYSATCDGYHYWGIYLDGSSDMVTMKGNYIYHTSGRSPKVQGNTLLHAVNNYWHDNSDHAFEIGEGAYVLAEGNVFQNIPTVAEDPIEGELFASPSESANEVCSTYLGRVCELNGFGSSGTFNQADTDFLSKFEGKNIASADSYSSVASSVASSAGNTL

SEQ ID NO: 654 - protein, 378 aa, Neosartorya fischeri
MKYQGLLAIAGCIASASAVSVSGAAEGFAKGVTGGGSATAVYPSTTAELVSYLGDSEARVIVLTKTFDFTGTEGTTTATGCAPWGTASACQLAINQNDWCTNYEPDAPSVSVTYDNAGTLGITVKSNKSLLGSGSSGVIKGKGLRIVSGASNIIIQNIAITDINPKYVWGGDAITINNADMVWIDHVTTARIGRQHLVLGTSASNRVTISNNYFNGVSSYSATCDGYHYWGIYLDGSNDLVTMKGNYIYHFSGRSPKVQGNTLLHAVNNYWYDSSGHAFEIGSGGYVLAEGNVFQNIDTIVESPVDGQLFTSPDSTTNKVCSTYLGHVCQVNGFGSSGTFSQADTGFLSNFAGKNIASASAYTVVQSSVPSSAGQGKI

SEQ ID NO: 655 - protein, 375 aa, Neosartorya fumigata
MKYAAFLPTIGALVSQAIAIGVQGTAEGFASSVTGGGSATPVYPSTTDELVSYLGDSEARVIVLTKTFDFTGTEGTTTATGCAPWGTASGCQVAINKDNWCTNYQSSAPSVSVTYDNAGSLGITVNSNKSLIGEGTSGVIKGKGLRIVSGAKNIIIQNIAITDINPKYVWGGDAITINQADLVWVDHVTTARIGRQHYVLGTEASNRITLSNNYIDGESDYSATCDNHHYWNIYLDGSSDKVTLKGNYLYKTSGRAPKVQGNTYLHAVNNYWNDNSNHAFEIGDGAYVLAEGNLFSDVTAAVESSSFTGELFGSASASSTCQSYIGRDCVANSFSSSGTLSGSNVDVLSKFKGETVASASAAGTSPASSAGQGHL

SEQ ID NO: 656 - protein, 378 aa, Neosartorya fumigata; identical to SEQ ID NO: 646

SEQ ID NO: 657 - protein, 379 aa, Aspergillus niger
MHYKLLFAAAAASLASAVSAAGVVGAAEGFAHGVTGGGSASPVYPTTTDELVSYLGDNEPRVIILDRTFDFTGTEGTETTTGCAPWGTASQCQVAINLHSWCDNYQASAPKVSVTYDKAGILPITVNSNKSIVGQGTKGVIKGKGLRVVSGAKNVIIQNIAVTDINPKYVWGGDAITVDDSDLVWIDHVTTARIGRQHIVLGTSADNRVTISYSLIDGRSDYSATCNGHHYWGVYLDGSNDMVTLKGNYFYNLSGRMPKVQGNTLLHAVNNLFHNFDGHAFEIGTGGYVLAEGNVFQDVNTVVETPISGQLFSSPDANTNQQCASVFGRSCQLNAFGNSGSMSGSDTSIISKFAGKTIAAAHPPGNIAQWTMKNAGQGK

SEQ ID NO: 658 - protein, 378 aa, Aspergillus niger
MHYKLLFAAAAASLASAVSAAGVVGAAEGFAHGVTGGGSASPVYPTTTDELVSYLGDNEPRVIILDRTFDFTGTEGTETTTGCAPWGTASQCQVAINLHSWCDNYQASAPKVSVTDKAGILPITVNSNKSIVGQGTKGVIKGKGLRVVSGAKNVIIQNIAVTDINPKYVWGGDAITVDDSDLVWIDHVTTARIGRQHIVLGTSADNRVTISYSLIDGRSDYSATCNGHHYWGVYLDGSNDMVTLKGNYFYNLSGRMPKVQGNTLLHAVNNLFHNFDGHAFEIGTGGYVLAEGNVFQDVNIVVETPISGQLFSSPDANTNQQCASVFGRSCQLNAFGNSGSMSGSDTSIISKFAGKTIAAAHPPGNIAQWTMKNAGQGK

SEQ ID NO: 659 - protein, 381 aa, Aspergillus oryzae
MKYASFIAAAAAALASAVSAAGVSGSAEGFAKGVTGGGSATPVYPSTTDELVSYLGDSEARVIILTKTFDFTNTEGTETSSGCAPWGTASGCQLAINKDNWCTNYEPNAPTVSSITYNKAGVLGITVNSNKSIVGQGSAGVIKGRGLRIVSGAKNVIIQNIAITDINPKYVWGGDAITLNEADLVWIDHVTTARIARQHIVLGTQADNRVTISNSLIDGRTDYSATCNGHHYWGVYLDGSNDMVTMMGNYFYYTSGRMPKVQGNTLLHAVNNYFHNIEGHAFEIGSGGYVLAEGNAFQNVDAPVESPISGQLFSAPDATTNEQCKSVFGRACQINAFGSSGSFSQADTAVISKFSGKNIATAHLAQNIPKWVMANAGQGKL

SEQ ID NO: 660 - protein, 379 aa, Emericella nidulans
MRLHAPILSLLAAAASTSAAGVTGSAEGFAKGVTGGGSATPVYPSTTAELVSYLGDSSARVIVLTKTFDFTGTEGTTTETGCAPWGTASACQVAINKNDWCTNYQPNAPSVSVTYDNAGVLGITVKSNKSLVGEGSSGVIKGKGLRIVSGASNVIIQNIAITDLNPKYVWGGDAITLDNADMVWIDHVTTARIGRQHLVLGTSASNRVTVSNSYFNGVTSYSATCDGYHYWGIYLTGSNDMVTLKGNYIYHMSGRSPKVGGNTLLHAVNNYWYDSSGHAFEIDSGGYVLAEGNVFQNIPTVIEGTVGGQLFTSPDSSTNAICSTYLGHTCQVNGFGSSGTFKQADTAFLVNFQGKNIASASAYTVAQSSVPSNAGQGKL

SEQ ID NO: 661 - protein, 373 aa, Aspergillus niger
MKVPFLQLLCLNAALASANVVKGAAQGFAAGVTGGGDITPSYPKTNEELVSLLESDEPQVVVLTKTFEFIGTEGTTTENGCAPWGTGKSCQLAINSNGWCGKNPVVTITYDNAAKNGIHIKSNKTLVGEGDKGVLSGKGLYFEGGVSNIIVQNIKITNLNPGFVWGGDAFTFFGADLIWIDHCETSLTGRQHYVTGFHPNTRMTWSNNFLNGVTTHSAGCDDHHYWTMELVGPGDQITFQNNYVYHTTGRGPALSGTTLFHAVNSVWSSIPGHAIEGGDKGRGLFEGCFFEDVVEIAPAKPENQLFSASEANAASCKSALGRACQANSYSKSGAFGSSETGFFKDFAGLTIAPAGSATDALAYVPKNCGIGRL

SEQ ID NO: 662 - protein, 378 aa, Aspergillus niger
MKVPFLQLLCLNAALASANVVQGAAQGFAAGVTGGGDITPSYPKTNEELVSLLESDEPQVVVLTKTFDFIGTEGTTTEDGCAPWGTGKSCQLAINSNGWCGKNPVVTITYDNAAKNGIHIKSNKTLVGEGDKGVLSGKGLYFEGGVSNIIVQNIKITNLNPGFVWGGDAFTFFGADLIWIDHCETSLTGRQHYVTGFHPNTRMTWSNNFLNGVTTHSAGCDDHHYWTMELVGPGDEITFQNNYVYHTTGRGPALSGTTLFHAVNSVWSSIPGHAIEGGDKGRGLFEGCFFEDVVEIAPAKPENQLFSASEANAASCKSALGRACQANGYSKSGAFGSSETGFFKDFAGLTIAPAGSATDALAYVPKNCGIGRLESCDA

SEQ ID NO: 663 - protein, 375 aa, Aspergillus oryzae; identical to SEQ ID NO: 647

SEQ ID NO: 664 - protein, 373 aa, Emericella nidulans
MKKYLLSLLAAVTYTTAQSVSGSAEGFASGVTGGGGATPVYPADTAELESLLSSEGEQVIVLTKTYDFTGTSATGTACYSWGTGEGCQLILQDDCGDTPSTTVTYDAAGKTPIPVASDKTLLGVGSEGVIKGKGLSFTDNVSNIIVQNIKITELNPEYVWGGDALTFDGSSNICIDHVETSLIGRVHYVFGYNPNSGITLSNNFINGETTYSTSCDGYQYWGLELVGKNDSITFKGNYLYKTSGRSPALSGSTKFHACNNVWSDNNGHAIEGNEKGQGLFEGNVFQEVATVVSSTFWEAGDLFLSSADGTGNDACASYIGRNCASSIYMNDGGDYTSYTDVSWLGDWSGLTIAECAEAREIEGTVPTSAGNTL

SEQ ID NO: 665 - protein, 375 aa, Aspergillus flavus
MKYAAVLTTVAALASRALGAGVSGTAEGFASSATGGGSATAVYPTTTDELVSYLGDDEARVIVLSQTFDFTNTEGTTTETGCAPWGTGSACQVAINKDDWCTNYESSAPSTSVTYDNAGSLGITVNSNKSLIGEGTKGVIKGKGLRIVNGVENVIIQNIAVTDINPKYVWGGDAITINQADLVWIDHVTTARIGRQHYVLGTEADNRVTLSNNYIDGESDYSATCDGHHYWNVYLDGSSDKVTMKGNYFYKTSGRAPKVQGNTYLHAVNNYWNDNSNHAFEIGSGGYVLAEGNTFADVTAAVEDSSFEGELFSSSSDADTCSSYIGRACKANSFTNSGDLSGTTVDVLSKFKGETVATADTASTAPASNAGQGNL

SEQ ID NO: 666 - protein, 373 aa, Aspergillus niger
MKYAAALTAVAALAARAAAVGVSGTPVGFASSATGGGDATPVYPTTTDELVSYLGDDEARVIVLSKTFDFTDTEGTTTTTGCAPWGTASGCQLAINKDDWCTNYEPDAPTTTVTYNTAGELGITVNSNKSLIGEGTSGVIKGRGLRMVSGVSNIIIQNIAVTDINPEYVWGGDAITLDEADLVWIDHVTTARIGRQHYVLGTDADSRVSITNNYINGESDYSATCDGHHYWNVYLDGSSDKVTFSGNYLYKTSGRAPKVQDNTYLHIYNNYWENNSGHAFEIGSGGYVLAEGNYFSNVDTVLETDTFEGALFSSDSASSTCESYIGRSCVANVNGGDLTGTSTTVLSNLSGDTLPSADAASTSPASNAGQGNL

SEQ ID NO: 667 - protein, 373 aa, Aspergillus niger
MKYAAALTAIAALAARAAAVGVSGTPVGFASSATGGGDATPVYPTTTDELVSYLGDDEARVIVLSKTFDFTDTEGTTTTTGCAPWGTASGCQLAINKDDWCTNYEPDAPTTTVTYNTAGELGITVNSNKSLIGEGTSGVIKGRGLRMVSGVSNIIIQNIAVTDINPEYVWGGDAITLDEADLVWIDHVTTARIGRQHYVLGTDADSRVSITNNYINGESDYSATCDGHHYWNVYLDGSSDKVTFSGNYLYKTSGRAPKVQDNTYLHIYNNYWENNSGHAFEIGSGGYVLAEGNYFSNVDTVLETDTFEGALFSSDSASSTCESYIGRSCVANVNGGDLTGTSTTVLSNLSGDTLPSADAASTSPASNAGQGNL

SEQ ID NO: 668 - protein, 375 aa, Aspergillus oryzae; identical to SEQ ID NO: 665

SEQ ID NO: 669 - protein, 377 aa, Emericella nidulans
MRVSAFALLAAAATAAATSVQGAAEGFAKGVTGGGSATPVYPTTTDELVSYLGDDEARVIVLTKTFDFRGTEGTTTAKGCSPWGTASGCQLAINKDGWCDNYQPDAPQTTITYDTAGMLGITVKSNKSLIGQGTAGVIKGKGIRIVNGAKNVIVQNIAITDINPQYVWGGDAITLNDVDMVWIDHVTTARIARQHIVLGTNACNRVTISNNYFNGVSDYSATCDGYHYWGLYLDGSNDMVTLQGNYIHHFSGRSPKVGGNTLLHAVNNYWYDSTGHAFEIAAGSSVLAEGNVFQNINAPVESSSLAGNLFTSPDSNTNKVCSSYLGHTCQLNAFGSSGSFNQADEGFLVNFKGKNVASADAYSAAQSVPNNAGQGKL

SEQ ID NO: 670 - protein, 370 aa, Aspergillus niger
MAFAHHAEAAQSSIVSGSAPGFAAGVTGGGDATPVYPTTIDELKEYLTSSSPQNIVIEGTFDFVGSEGTKTYQACNIYDCTPDNGGQAILNTLGGCGDTSTYDVTIDVAGYQGINVASDKTLVGKGTGAVLNGKGLRFVGVSNIIIQNIEITNLNPKYVWGGDALTFSDTNQIWIDHVTTSSLGRQHYSFGQESDNAITISNSFINGKTDYSATCDGHTYWGLELVGSSDQITFYKNYVYYTSGRSPALSGNTLFHAVNSVWADNSGHAIEGTDNGMGLFEGNVFNNVPTIVQSGFVGQLFSSESANLSQCETSLGRDCVTNAYTSSGSFSYDDDGFFVDFENLPIVSAASASSIASTVPSDAGNTLSST

SEQ ID NO: 671 - protein, 388 aa, Aspergillus terreus
MKTATFSTLLALSASAVNAQVSGTAFGFAAGTTGGGSAAPETPSSIDELVEWLTDDTARTIMIDRTWDFTGTEGTTDGQCCSTRTTTCEGGTSAGQAWIQDTCDDGTWVSCTYDNAAKNPINVGSNKSIVGVGSDGVLKGKGLRITGGNSNVIIQNIHITDLNPQYVWGGDAITLDDADLVWIDHNKISLIGRQFIVSGWGKAGRVTISNNEFDGVTDWSAGCNGKHYWTLLLIGEQDFYTFSDNWVHDVSGRAPHMGTDMTESTIFFHGVNNYFQNIGGHAFDIDTNTWALLEGNYFESVDTPLTETSLTSGALIYNVPTVDSASACTSPLGYICEWNRLAGSGTWTERTDADVLTMASQYIDSLIDHIPVADVPTTVVANAGVGKL

SEQ ID NO: 672 - protein, 480 aa, Aspergillus terreus
MTLIRTVLMAAALLGASAHAQGVVGKPFGFAAGTTGGGNAAPAAPSDIKELAQWLSDDTPRVILIDKEFDFTGSEGTCADCACCVPSSNTCGSSGQNAIETSFGWCGSSPNVTCTYDKAGTKGMDVGSDKSIVGVGSAGVIRGKGLRLTGGASNVIIQNIHITDINPEYIWGGDAISLDGTDKIWIDHVKISLVGRQMFVTGYESSGSVTISNSEFDGRTSWSASCDGHHYWTLLGLGKNEQITFARNYIHHTSGRSPKLGESSYWHSYNNYWSDNSGHAFDVESAGKSLIEGNVFSNVKTPLTKENLDGVFAVSADDESTCSGSLGRSCIPNVLTSSGELSSAGDGVFSGWLSDEGDLTLMPASQVASYVKAHAGVGKLGAGDYSSSAIPSSTPAPSSSALAKRHGGHDRHGLGHIPHLTEGGPGAWHTPGPAPSWSWRTIGVRSTALPTPSPSSSSCAIGKPTAGPPRFPIFGDLGIF

SEQ ID NO: 673 - protein, 386 aa, Neosartorya fumigata
MKTAVLSLFLALQTYARVTGSPSGFAAGTTGGGSATPAAPSSLDELVQWITDDKPRVILIDRTWDFIGTEGTTTGKCCSMPSTTVCSGGTSKGQAWIQDHCDGGSWVSCKYDNAALTPLDVGSNKSIVGVGNKGVIKGKGLRVRNGNKNVIIQNIHITNLNPQYVWGGDAITLDNADKVWIDHNKISLIGRQFIVSGWGKAGHVTISNNEFDGRTSWSAGCNGKHYWTLLLLGEQDYYTFQGNWLHDVSGRAPHMGTDHTKSQIFFHGVNNYFQNVGGHAFDVDTNTWVLLEGNYFENVNTPLTDTSLRAGGKLYTTSTVAAAGACQDKLGYICEWNRLAGSGAWKDRTDADVKTKAAAFKSSLVGHYPVADVPAKVVANAGVGKL

SEQ ID NO: 674 - protein, 428 aa, Aspergillus flavus
MVLLHPLLTAAALLGASARAQSVVGTPFGFASGTTGGGNAAPAAPKDTNELKEWLADPNPRVIVIDKEFNFIGTEDTCTDCECCIPDSNTCGDAGQNAIKTEGSDWCGSYPATTCTYDNAGLEGMEVASDKTIIGVGDAGVIRGKGLRLVNGVSNIIIQNVHITELNPQYIWGGDAISLDGTDKIWVDHVKVSLVGRQMFVTGYESSGGVTVSNSEFDGQTKWSASCDGHHYWSVLGYGKGDQITFANNYIHHTSGRSPKIEFDSHWHAYNNFWENNSGHAFDVGEGANVLIEGNVFSNVKTPMNPEDTPGSTFAVNAQDASSCTSALGRPCIANELTSSGELSGNDEAVLSGWPKGEGDTKAMTTDKVPSYVKANAGVGKLGSGGSGAASSSASITPSPTSSAIPSSSATPSSSAYARRHYARHHHY

SEQ ID NO: 675 - protein, 476 aa, Aspergillus niger
MTLLRHLLTATALLGASVQAAQGVTGSPFGFASGTTGGGDATPAAPSDISQLKTWLSDSTPRVILIDKEFNFLGSEGKCTNCECCKPASNTCGSSGQNAVKQNGSDWCGSYPTLTCTYDNAGIEGLEVASNKSIVGVGSSGVLRGKGLRLVNGVSNIIIQNIHITELNPEFIWGGDAITLDGTNNVWIDHVKINLIGRQMFVAGYEASHSVTISNSEFDGETSWSATCDGHHYWTVLGYGHNDKITFANNYIHHTSGRSPKLEFNSFWHAYNNYWYNNTGHAFDVGKNTRALIEGNVMVQVDTPLLADSNPGAVFAVNTSDVSTCTSTLGRTCVPNTLISSGTLSGSDSSVISSWPSGESDVTVMAASKVASYVKANAGIGKLGNGSGSSSTVGAAATSAVAKRADSDDAPFVPAYSEAGPGASAVPTQPSWSWRTVTNGPAPTGAPSDSPSAPQGLGAPVQASNKHHHQGHGRGY

SEQ ID NO: 676 - protein, 476 aa, Aspergillus niger; identical to SEQ ID NO: 675

SEQ ID NO: 677 - protein, 428 aa, Aspergillus oryzae
MVLLHPLLTAAALLGASARAQSVVGTPFGFASGTTGGGNAAPAAPKDTNELKEWLADPNPRVIVIDKEFNFIGTEDTCTDCECCIPDSNTCGDAGQNAIKTEGSDWCGSYPATTCTYDNAGLEGMEVASDKTIIGVGDAGVIRGKGLRLVNGVSNIIIQNVHITELNPQYIWGGDAISLDGTDKIWVDHVKVSLVGRQMFVTGYESSGGVTVSNSEFDGQTKWSASCDGHHYWSVLGYGKGDQITFANNYIHHTSGRSPKIEFDSHWHAYNNFWENNSGHAFDVGEGANVLIEGNVFSNVKTPMNPEDTPGSTFAVNAQDASSCTSALGRPCIANELTSSGELSGNDEAVLSGWPKGEGDTKAMTTDKVPSYVKANAGVGKLGSGGSGAASSSVSITPSPTSSAIPSSSATPSSSAYARRHYARHHHY

SEQ ID NO: 678 - protein, 464 aa, Emericella nidulans
MAIIRSVIAATALLGAAVNAQVVGTPFGFGAGTTGGGDATPAAPADTAELTEWLADDEPRVILIDKEFNFLGDECTDCECCIPDSNTCGDAGQNAIEVGIGWCGDYPTTTCTYDNAGLDGLDVGPNKSIVGVGDAGVIRGKGLRIHGTENVIVQNIHITELNPQYIWGGDAISLDGADKVWIDHVKISLVGRQMFVTGYESSGSVTFSNNELDGTTDWSASCDGHHYWTILALGENDKVTFANNYIHTTSGRAPKVGAPSFWHVYNNYWSDNTGHAFDVEESGTNVFIEGNVFEDINSAYNDDGTGAIFAVDSGSEATCSSVLGRTCVANSLTNSEYTAVADESVLSAFPADEEGDITILPVDQVAAYVLANAGVGKLSASGSTSGSSSSIAPSSSVPVIPTSTPLVYPTFTPPAVETNAIQKEHEVSTPAVPTPTPVPSSVGSHGSTAGSSHPPAFSRTSFES

SEQ ID NO: 679 - protein, 386 aa, Neosartorya fischeri
MKTAVLSLLLALQAYARVTGSPSGFAAGTTGGGSATPAAPSSLDELVQWITDDTPRVILIDRTWDFIGTEGTTTGKCCSMPSTTVCNGGTSKGQAWIQDHCDGGSWVSCKYDNAALTPMDVGSNKSIVGVGNKGVIKGKGLRVRNGNKNVIIQNIHITNLNPQYVWGGDAITLDNADQVWIDHNKISLIGRQFIVSGWGKAGHVTISNNEFDGRTSWSAGCNGKHYWTLLLLGEQDYYTFEGNWLHDVSGRAPHMGTDHTKSQIFFHGVNNYFQNLGGHAFDVDTNTWVLLEGNYFENVKTPLTDTSLKAGGKLYTTSTVNAAGACLDKLGYICEWNRLAGSGAWQDRTDADVKTKAATYKNSLVGHYPVADVPAKVVANAGVGKV

SEQ ID NO: 680 - protein, 24 aa, Aspergillus niger
LTNKTARFLVNGTSIPEVDFDVGE

SEQ ID NO: 681 - protein, 394 aa, Aspergillus awamori
MVVFSKTAALVLGLSSAVSAAPAPTRKGFTINQIARPANKTRTINLPGMYARSLAKFGGTVPQSVKEAASKGSAVTTPQNNDEEYLTPVTVGKSTLHLDFDTGSADLWVFSDELPSSEQTGHDLYTPSSSATKLSGYTWDISYGDGSSASGDVYRDTVTVGGVTTNKQAVEAASKISSEFVQNTANDGLLGLAFSSINTVQPKAQTTFFDTVKSQLDSPLFAVQLKHDAPGVYDFGYIDDSKYTGSITYTDADSSQGYWGFSTDGYSIGDGSSSSSGFSAIADTGTTLILLDDEIVSAYYEQVSGASGETEAGGYVFSCSTNPPDFTVVIGDYKAVVPGKYINYAPISTGSSTCFGGIQSNSGLGLSILGDVFLKSQYVVFNSEGPKLGFAAQA

SEQ ID NO: 682 - protein, 394 aa, Aspergillus clavatus
MVVFSKVTAAVFGLATIASAAPAPPTRKGFTVQQQARPAQKKQVNLPAMYAHALTKFGGSVPESVKVAASKGSAVTTPEAGDVEYLTPVNVGGTVMNLDFDTGSADLWVFSGELPASETSGHSVYKPGRTASKLPGGSWQISYGDGSSASGDVYKDTVVVGGVTAHGQAVEAAAQISSQFLQDKNNDGLLGLAFSSLNTVQPQPQTTFFDTVKSSLDRPLFAVTLKHNAPGSFDFGYIDHSKYTGEIAYTDVDNSQGFWSFTADGYSIGGGQSSGSSISGIADTGTTLLLLDDNVVSDFYQHVEGAQNSDEYGGYVFPCSAKVPSFTTIIGGYKAVTPGKLINYGPVTDGSSTCYGGIQSSGGVGQNIFGDIFLKSQFVVFDSEGPRLGFAAQA

SEQ ID NO: 683 - protein, 395 aa, Neosartorya fumigata
MVVFSKVTAVVVGLSTIVSAVPVVQPRKGFTINQVARPVTNKKTVNLPAVYANALTKYGGTVPDSVKAAASSGSAVTTPEQYDSEYLTPVKVGGTTLNLDFDTGSADLWVFSSELSASQSSGHAIYKPSANAQKLNGYTWKIQYGDGSSASGDVYKDTVTVGGVTAQSQAVEAASHISSQFVQDKDNDGLLGLAFSSINTVSPRPQTTFFDTVKSQLDSPLFAVTLKYHAPGTYDFGYIDNSKFQGELTYTDVDSSQGFWMFTADGYGVGNGAPNSNSISGIADTGTTLLLLDDSVVADYYRQVSGAKNSNQYGGYVFPCSTKLPSFTTVIGGYNAVVPGEYINYAPVTDGSSTCYGGIQSNSGLGFSIFGDIFLKSQYVVFDSQGPRLGFAPQA

SEQ ID NO: 684 - protein, 404 aa, Aspergillus flavus
MVILSKVAAVAVGLSTVASALPTGPSHSPHARRGFTINQITRQTARVGPKTASFPAIYSRALAKYGGTVPAHLKSAVASGHGTVVTSPEPNDIEYLTPVNIGGTTLNLDFDTGSADLWVFSEELPKSEQTGHDVYKPSGNASKIAGASWDISYGDGSSASGDVYQDTVTVGGVTAQGQAVEAASKISDQFVQDKNNDGLLGLAFSSINTVKPKPQTTFFDTVKDQLDAPLFAVTLKYHAPGSYDFGFIDKSKFTGELAYADVDDSQGFWQFTADGYSVGKGDAQKAPITGIADTGTTLVMLDDEIVDAYYKQVQGAKNDASAGGYVFPCETELPEFTVVIGSYNAVIPGKHINYAPLQEGSSTCVGGIQSNSGLGLSILGDVFLKSQYVVFDSQGPRLGFAAQA

SEQ ID NO: 685 - protein, 395 aa, Neosartorya fumigata; identical to SEQ ID NO: 683

SEQ ID NO: 686 - protein, 394 aa, Aspergillus niger
MVVFSKTAALVLGLSSAVSAAPAPTRKGFTINQIARPANKTRTINLPGMYARSLAKFGGTVPQSVKEAASKGSAVTTPQNNDEEYLTPVTVGKSTLHLDFDTGSADLWVFSDELPSSEQTGHDLYTPSSSATKLSGYTWDISYGDGSSASGDVYRDTVTVGGVTTNKQAVEAASKISSEFVQNTANDGLLGLAFSSINTVQPKAQTTFFDTVKSQLDSPLFAVQLKHDAPGVYDFGYIDDSKYTGSITYTDADSSQGYWGFSTDGYSIGDGSSSSSGFSAIADTGTTLILLDDEIVSAYYEQVSGAQESEEAGGYVFSCSTNPPDFTVVIGDYKAVVPGKYINYAPISTGSSTCFGGIQSNSGLGLSILGDVFLKSQYVVFNSEGPKLGFAAQA

SEQ ID NO: 687 - protein, 394 aa, Aspergillus niger
MVVFSKTAALVLGLSTAVSAAPAPTRKGFTINQIARPANKTRTVNLPGLYARSLAKFGGTVPQSVKEAASKGSAVTTPQNNDEEYLTPVTVGKSTLHLDFDTGSADLWGFSDELPSSEQTGHDLYTPSSSATKLSGYSWDISYGDGSSASGDVYRDTVTVGGVTTNKQAVEAASKISSEFVQDTANDGLLGLAFSSINTVQPKAQTTFFDTVKSQLDSPLFAVQLKHDAPGVYDFGYIDDSKYTGSITYTDADSSQGYWGFSTDGYSIGDGSSSSSGFSAIADTGTTLILLDDEIVSAHYEQVSGAQESYEAGGYVFSCSTDLPDFTVVIGDYKAVVPGKYINYAPVSTGSSTCYGGIQSNSGLGLSILGDVFLKSQYVVFNSEGPKLGFAAQA

SEQ ID NO: 688 - protein, 404 aa, Aspergillus oryzae; identical to SEQ ID NO: 684

SEQ ID NO: 689 - protein, 394 aa, Aspergillus saitoi
MVVFSKTAALVLGLSTAVSAAPAPTRKGFTINQIARPANKTRTVNLPGLYARSLAKFGGTVPQSVKEAASKGSAVTTPQNNDEEYLTPVTVGKSTLHLDFDTGSADLWVFSDELPSSEQTGHDLYTPSSSATKLSGYSWDISYGDGSSASGDVYRDTVTVGGVTTNKQAVEAASKISSEFVQDTANDGLLGLAFSSINTVQPKAQTTFFDTVKSQLDSPLFAVQLKHDAPGVYDFGYIDDSKYTGSITYTDADSSQGYWGFSTDGYSIGDGSSSSSGFSAIADTGTTLILLDDEIVSAYYEQVSGAQESYEAGGYVFSCSTDLPDFTVVIGDYKAVVPGKYINYAPVSTGSSTCYGGIQSNSGLGLSILGDVFLKSQYVVFNSEGPKLGFAAQA

SEQ ID NO: 690 - protein, 386 aa, Emericella nidulans
MVVFSKVAAAAFGLSAVASAMPAAPPRQGFTINQLTRAIPKRTINLPAIYANALSKYGGNVPPHIQDAMAHGSAVTTPEQYDVEYLTPVAVGGTTMNLDFDTGSADLWVFSNELPSSQTTGHSVYKPSDNGTRMSGYSWEISYGDGSSAGGDVYRDTVTVGGVTAPGQAVEAASHISEQFTRDQNNDGLLGLAFSSINTVQPKSQTTFFDSVKSQLESPLFAVTLKHQAPGSYDFGYIDQSKYTGELTYTDVDNSQGFWMFSATAGETDFDAIADTGTTLIMIDQSIAEDYYSQVPLAFNNFFYGGWTFPCSAELPSFTVTINGYDAVVPGEHIKYAPVTDGSSTCFGGIQDNQGLPFSILGDVFLKSQYVVFDSEGPQLGFAPQA

SEQ ID NO: 691 - protein, 395 aa, Neosartorya fischeri
MVVFSKVTAVVVGLSTIVSAVPVVQPRKGFTINQVARPVTNKKTVNLPAVYANALTKYGGTVPDSVKAAASSGSAVTTPEQYDSEYLTPVKVGGTTLNLDFDTGSADLWVFSSELSASESSGHAIYKPSANAQKLNGYTWKIQYGDGSGASGDVYKDTVTVGGVTAQSQAVEAASQISSQFVQDKDNDGLLGLAFSSLNTVSPRPQTTFFDTVKSQLDSPLFAVTLKYHAPGTYDFGYIDNSKFQGKLTYADVDNSQGFWMFTADGYGVGDGAPNSNHISGIADTGTTLLLLDDSVVADYYHQVSGAKNSNEYGGYVFPCSTKLPSFTTVIGGYNAVVPGEYINYAPVTDGSSTCFGGIQSNSGLGFSIFGDVFLKSQYVVFDSQGPRLGFAPQA

SEQ ID NO: 692 - protein, 378 aa, Aspergillus aculeatus
MHLNTTLLVSLALGAASVLASPAPPAITAPPTAEEIAKRATTCTFSGSNGASSASKSKTSCSTIVLSNVAVPSGTTLDLTKLNDGTHVIFSGETTFGYKEWSGPLISVSGSDLTITGASGHSINGDGSRWWDGEGGNGGKTKPKFFAAHSLTNSVISGLKIVNSPVQVFSVAGSDYLTLKDITIDNSDGDDNGGHNTDAFDIGTSTYVTISGATVYNQDDCVAVNSGENIYFSGGYCSGGHGLSIGSVGGRSDNTVKNVTFVDSTIINSDNGVRIKTNIDTTGSVSDVTYKDITLTSIAKYGIVVQQNYGDTSSTPTTGVPITDFVLDNVHGSVVSSGTNILISCGSGSCSDWTWTDVSVSGGKTSSKCTNVPSGASC

SEQ ID NO: 693 - protein, 368 aa, Aspergillus clavatus
MRSVEILGLAALGSLVAAAPSPSRVSNSAKKASSCTFTSAAQASKSASGCSEITLDNIAVPAGETLDLSHVDDGTTIIFEGTTSFGYKEWKGPLIQFAGTGITVKQNTGAVIDGDGSRWWDGKGTNGGKTKPKFMYAHKLRDSTITGLSIKNTPVQAISVQATNLQLTDITIDNSDGDENGGHNTDAFDIGESNGVYIRGAVVKNQDDCIAINSGENIEFSGGSCSGGHGLSIGSVGGRDNNIVKNVTITDSTISDSDNGVRIKTIYDATGSVGDVTYSNIKLSNIAKYGIVIEQDYENGSPTGTPTTGVPITGLTIDGITGSVASNAVQVYILCGDGSCSDWTWKGVDLTGGKKSSKCENVPSGASC

SEQ ID NO: 694 - protein, 367 aa, Aspergillus flavus
MHFQLLGLAALGSLAAAAPAPSRTSELVERGSSCTFTSAAQASASAKSCSNIVLKNIAVPAGETLDLSKAKDGATITFEGTTTFGYKEWKGPLIRFGGNKITVTQAAGAVIDGQGSRWWDGKGTNGGKTKPKFIYAHKLQSSTIKGLHVKNSPVQVFSVQGNDVHLTDITIDNSDGDNNGGHNTDAFDVSESNGVYITGANVKNQDDCLAINSGENIEFTGATCSGGHGISIGSIGNRDSNTVKNVKVADSTVVDSDNGIRIKTISGATGSVSGVTYENITLKNIKKNGIVIEQDYKNGGPTGKPTTGVPITDLTVNGVTGSVASKATPVYILCGKGSCSDWTWKGVSISGGKKSDKCQNIPSGASC

SEQ ID NO: 695 - protein, 368 aa, Aspergillus niger
MHSYQLLGLAAVGSLVSAAPAPSRVSEFAKKASTCTFTSASEASESISSCSDVVLSSIEVPAGETLDLSDAADGSTITFEGTTSFGYKEWKGPLIRFGGKDLTVTMADGAVIDGDGSRWWDSKGTNGGKTKPKFMYIHDVEDSTFKGINIKNTPVQAISVQATNVHLNDFTIDNSDGDDNGGHNTDGFDISESTGVYISGATVKNQDDCIAINSGESISFTGGTCSGGHGLSIGSVGGRDDNTVKNVTISDSTVSNSANGVRIKTIYKETGDVSEITYSNIQLSGITDYGIVIEQDYENGSPTGTPSTGIPITDVTVDGVTGTLEDDATQVYILCGDGSCSDWTWSGVDLSGGKTSDKCENVPSGASC

SEQ ID NO: 696 - protein, 368 aa, Aspergillus niger; identical to SEQ ID NO: 695

SEQ ID NO: 697 - protein, 367 aa, Aspergillus oryzae; identical to SEQ ID NO: 694

SEQ ID NO: 698 - protein, 368 aa, Aspergillus terreus
MHSFQLLGLAALGSLVAAAPSPSRVSDLTERSSSCTFTDAAKASSSASSCSSIVLKDIAVPAGKTLDLSHVKDGTTITFEGTTTFGYKEWKGPLIRLAGKDITVTMAKGAVIDGEGSRWWDGKGTNGGKTKPKFLYAHKLEDSTIKGLNIKNTPVQAISVQANNLHLTDITIDNSDGDSKGGHNTDGFDISESNGVYISGANVKNQDDCIAINSGKNIEFTGGTCSGGHGLSIGSIGGRDDNTVQGVKITDSTVTNSDNGIRIKTIVDETGSVSDVTYSNIKLSGIHKKGIVIQQDYKNGGPTGKPSNGIPIKDVTVDGITGSVDSKATPVYILCGSGSCSDWTWKNVKLSGGKSSSECKNLPSGVSC

SEQ ID NO: 699 - protein, 369 aa, Aspergillus aculeatus
MHSFQLLGLAAVGSVVSAAPTASRVSDLVKKSSSTCTFTSASEASETSSSCSNVVLSNIEVPAGETLDLSDAADGATITFEGTTSFGYEEWDGPLIRFGGKQLTITQSDGAVIDGDGSRWWDSEGTNGGKTKPKFMYVHDVEDSTIKGLQIKNTPVQAISVQATNVYLTDITIDNSDGDDNGGHNTDGFDISESTGVYISGATVKNQDDCIAINSGENILFTGGTCSGGHGLSIGSVGGRDDNTVKNVTISDSTVTDSANGVRIKTIYGDTGDVSEITYSNIQLSGITDYGIVIEQDYENGSPTGTPSTGVPITDVTVDGVTGSIEDDAVQVYILCGDGSCSDWTWSGVDITGGETSSDCENVPSGASC

SEQ ID NO: 700 - protein, 362 aa, Aspergillus awamori
MHSFASLLRYGLAAGATLASASPIEARDSCTFTTAAAAKAGKAKCSTITLDSIKVPAGTTLDLTGLTSGTKVIFEGTTTFDYEDWAGPLISMSGKDITVTGASGHLINCDGSRWWDGKGTSGKKKPKFFYAHGLDSSSITGLNIKNTPLMAFSVESDDITLTDITINNADGDSLGGHNTDAFDVGNSVGVNIIKPWVHNQDDCLAINSGENIWFTGGTCIGGHGLSIGSVGDRSNNVVKNVTIEHSTVSNSENAVRIKTISGATGSVSEITYSNIVMSGISDYGVVIQQDYEDGKPTGKPTNGVTITDVKLESVTGTVDSKATDIYLLCGSGSCSDWTWDDVKVTGGKKSSACKNLPSVASC

SEQ ID NO: 701 - protein, 362 aa, Aspergillus kawachii
MHSFASLLAYGLAAGATLASASPIEARDSCTFTTAAAAKAGKAKCSTITLDSIKVPAGTTLDLTGLTSGTKVIFEGTTTFDYEEWAGPLISMSGKDITVTGASGHLINCDGSRWWDGKGTSGKKKPKFFYAHGLDSSSITGLNIKNTPLMAFSVESDDITLTDITINNADGDSLGGHNTDAFDVGNSVGVNIIKPWVHNQDDCLAINSGENIWFTGGTCIGGHGLSIGSVGDRSNNVVKNVTIEHSTVSNSENAVRIKTISGATGSVSEITYSNIVMSGISDYGVVIQQDYEDGKPTGKPTNGVTITDVKLESVTGTVDSKATDIYLLCGSGSCSDWTWDDVKVTGGKKSSACKNYPSVASC

SEQ ID NO: 702 - protein, 362 aa, Aspergillus niger
MHSFASLLAYGLVAGATFASASPIEARDSCTFTTAAAAKAGKAKCSTITLNNIEVPAGTTLDLTGLTSGTKVIFEGTTTFQYEEWAGPLISMSGEHITVTGASGHLINCDGARWWDGKGTSGKKKPKFFYAHGLDSSSITGLNIKNTPLMAFSVQANDITFTDVTINNADGDTQGGHNTDAFDVGNSVGVNIIKPWVHNQDDCLAVNSGENIWFTGGTCIGGHGLSIGSVGDRSNNVVKNVTIEHSTVSNSENAVRIKTISGATGSVSEITYSNIVMSGISDYGVVIQQDYEDGKPTGKPTNGVTIQDVKLESVTGSVDSGATEIYLLCGSGSCSDWTWDDVKVTGGKKSTACKNFPSVASC

SEQ ID NO: 703 - protein, 362 aa, Aspergillus niger; identical to SEQ ID NO: 702

SEQ ID NO: 704 - protein, 362 aa, Aspergillus tubingensis
MHSFASLLAYGLAASATLASASPIEARGSCTFKTAAAAKAGKAGCSTITLDNIEVPAGTTLDLTGLTSGTKVIFEGTTTFDYEEWAGPLISMSGKDITVTGASGHLINCDGARWWDGKGTSGKKKPKFFYAHGLDSSSITGLNIKNTPLMAFSVQADDITLTDITINNADGDTLGGHNTDAFDVGNSVGVNIIKPWVHNQDDCLAINSGENIWFTSGTCIGGHGLSIGSVGGRSNNVVKNVTIEHSTVSNSENAVRIKTVSGATGSVSEITYSNIVMSGISDYGVVIQQDYEDGKPTGKPTNGVTITDVKLESVTGTVDSKATDIYLLCGSGSCSDWTWDDVKVTGGKKSTACKNYPSVASC

SEQ ID NO: 705 - protein, 370 aa, Aspergillus awamori
MPSAKPLFCLATLAGAALAAPAPSRATDFNKRSTCTFTDAATASESKTSCSDIVLKDITVPAGETLNLKDLNDGTTVTFEGTTTWEYEEWDGPLLRISGKDITVTQSSDAVLNGNGAKWWDGEGTNGGKTKPKFFYAHDLDDSKISGLYIKNTPVQAISVESDNLVIEDVTIDNSDGDSEGGHNTDGFDISESTYITITGATVKNQGDCVAINSGENIYFSGGTCSGGHGLSIGSVGGRDDNTVKNVTFIDSTVSDSENGVRIKTVYDATGTVEDITYSNIQLSGISDYGIVIEQDYENGDPTGTPSNGVTISDVTLEDITGSVDSDAVEIYILCGDGSCTDWTMSGIDITGGETSSDCENVPSGASCSQ

SEQ ID NO: 706 - protein, 368 aa, Neosartorya fumigata
MRSVKLFGLAALGSLGAAAPAPSRVSDLTKRSSTCTFTAASQATESASGCSEIVLDNIEVPAGETLDLSDVDDGTTIVFEGTTTFGYKEWSGPLIRFGGKDITIKQNSGAVIDGEGSRWWDGEGTNGGKTKPKFMYAHSLEDSTITGLSIKNTPVQAISVQATNLYLIDITIDNSDGDDNGGHNTDGFDISESTGVYIRGATVKNQDDCIAINSGENIEFSGGTCSGGHGLSIGSVGGRDDNTVKNVTITDSTVTDSANGVRIKTVYDATGSVSQVTYSNIKLSGITDYGIVIEQDYENGSPTGTPTTGVPITDLTIDGVTGTVESDAVEVYILCGDGSCSDWTWEGVDITGGEKSSKCENVPSGASC

SEQ ID NO: 707 - protein, 363 aa, Aspergillus flavus
MQLLQSSVIAATVGAALVAAVPVELEARDSCTFTSAADAKSGKTSCSTITLSNIEVPAGETLDLTGLNDGTTVIFSGETTFGYKEWEGPLISVSGTNIKVQQASGAKIDGDGSRWWDGKGGNGGKTKPKFCYVHKLDSSSITGLQIYNTPVQGFSIQSDNLNITDVTIDNSAGTAEGHNTDAFDVGSSTYINIDGATVYNQDDCLAINSGSHITFTNGYCDGGHGLSIGSVGGRSDNTVEDVTISNSKVVNSQNGVRIKTVYDATGTVSNVKFEDITLSGITKYGLIVEQDYENGSPTGTPTNGIKVSDITFDKVTGTVESDATDIYILCGSGSCTDWTWSGVSITGGKTSSKCENVPTGASC

SEQ ID NO: 708 - protein, 368 aa, Neosartorya fumigata; identical to SEQ ID NO: 706

SEQ ID NO: 709 - protein, 370 aa, Aspergillus kawachii
MPSAKPLFCLATLAGAALAAPAPSRATDFNKRSTCTFTDAATASESKTSCSDIVLKDITVPAGETLNLKDLNDGTTVTFEGTTTWEYEEWDGPLLRISGKDITVTQSSDAVLNGNGAKWWDGEGTNGGKTKPKFFYAHDLDDSKISGLYIKNTPVQAISVESDNLVIEDVTIDNSDGDSEGGHNTDGFDISESTYITITGATVKNQDDCVAINSGENIYFSGGTCSGGHGLSIGSVGGRDDNTVKNVTFIDSTVSDSENGVRIKTVYDATGTVEDITYSNIQLSGISDYGIVIEQDYENGDPTGTPSNGVTISDVTLEDITGSVDSDAVEIYILCGDGSCTDWTMSGIDITGGETSSDCENVPSGASCSQ

SEQ ID NO: 710 - protein, 370 aa, Aspergillus niger
MPSAKPLFCLATLAGAALAAPAPSRVSDFTKRSTCTFTDAATASESKTSCSDIVLKDITVPAGETLNLKDLNDGTTVTFEGTTTWEYEEWDGPLLRISGKDITVTQSSDAVLDGNGAKWWDGEGTNGGKTKPKFFYAHDLDDSKISGLYIKNTPVQAISVESDNLVIEDVTIDNSDGDSEGGHNTDGFDISESTYITITGATVKNQDDCVAINSGENIYFSGGTCSGGHGLSIGSVGGRDDNTVKNVTFIDSTVSDSENGVRIKTVYDATGTVEDITYSNIQLSGISDYGIVIEQDYENGDPTGTPSNGVTISDVTLEDITGSVDSDAVEIYILCGDGSCSDWTMSGIDITGGETSSDCENVPSGASCDQ

SEQ ID NO: 711 - protein, 370 aa, Aspergillus niger; identical to SEQ ID NO: 710

SEQ ID NO: 712 - protein, 363 aa, Aspergillus parasiticus
MQLLQSSVIAATVGAALVAAAPVELEARDSCTFTSAADAKSGKTSCSTITLSNIEVPAGETLDLTGLNDGTTVIFSGETTFGYKEWEGPLISVSGTNIKVQQASGAKIDGDGSRWWDGEGGNGGKTKPKFFYAHKLDSSSITGLQIYNTPVQGFSIQSDNLNITDVTIDNSAGTAEGHNTDAFDIGSSTYINIDGATVYNQDDCLAINSGSHITFTNGYCDGGHGLSIGSVGGRSDNTVEDVTISNSKVVNSQNGVRIKTVYGATGTVSNVKFEDITLSGITKYGLVVEQDYENGSPTGTPTNGITVSGITFEKVTGTVESDATDIYILCGSGSCTDWTWSGVSITGGKTSSKCENVPTGASC

SEQ ID NO: 713 - protein, 368 aa, Neosartorya fischeri
MRSVELLSLAALGSLVAAAPAPSRVSDLTKRSSTCTFTAASQATESASGCSEIVLDNIEVPAGETLDLSDVDDGTTIVFEGTTTFGYKEWSGPLIRFGGKDITVKQNSGAVIDGEGSRWWDGEGTNGGKTKPKFMYAHSLEDSTITGLSIKNTPVQAISVQATNLYLIDITIDNSDGDDNGGHNTDGFDISESTGVYIRGATVKNQDDCIAINSGENIEFSGGTCSGGHGLSIGSVGGRDDNTVKNVTITDSTVTDSANGVRIKTVYDATGSVSEVTYSNIKLSGITDYGIVIEQDYENGSPTGTPTTGVPITDLTIDGVTGTVESDAVEVYILCGDGSCSDWTWEGVDITGGETSSKCENVPSGASC

SEQ ID NO: 714 - protein, 364 aa, Neosartorya fumigata
MHFFQSSLVAATMGAALVAAAPAADLETRGSCTFTSTSALKSGKASCSTITLQNIAVPAGETLDLTGLKAGTTVVFDGTTTFGYKEWEGPLISASGTSITIKQNPGAKIDCDGARWWDGKGGNGGKKKPKFFSAHKLNKSNITGLKVYNTPVHGFSIQSDHLTIKDVLLDNSAGTKLGHNTDAFDVGSSTYITIDGATVYNQDDCLAVNSGEHITFTNGYCNGGHGLSIGSVGGRSNNVVNDVTISNSQVINSQNGARIKTVYGATGSVTGVKFQDISLKGITKYGIVVQQDYENGKPTGKPTNGVKVSDITFEKVTGTVTSSATDIYILCGSGSCTNWTWSGNSVTGGKKSSSCKNVPAGASC

SEQ ID NO: 715 - protein, 366 aa, Aspergillus flavus
MHFQLLVLAPLALSSAAAPAPSRTSELVERGSSCTFTSAAQASASAKSCSNIVLKNIAVPAGETLDLSKAKDGATITFEGTTTFGYKEWKGPLIRFGGNKITVTQAAAVIDVQGSRWWDGKGPNGGKTKPKFIQYPQLESPTITGLHVKNSPVQVFSVQGNDVHLTDITIDNSDGDNNGGHNTDAFDVSESNGVYITGANVKNQDDCLAINSGENIEFTGATCSGGHGISIGSIGNRDTNTVKNVKVADSTVVDSDNGIRIKTISGATGSVSGVTYENITLKNIKKNGIVIELDYKNGGPTGKPTTGVPITDLTVNGVTGSVASKATPVYILCGKGSCSDWTWKGVSISGGKKSDKCQNIPSGASC

SEQ ID NO: 716 - protein, 363 aa, Aspergillus flavus
MQLLQSSVIAATVGAALVAAVPVELEARDSCTFTSAADAKSGKTSCSTITLSNIEVPAGETLDLTGLNDGTTVIFSGETTFGYKEWEGPLISVSGTNIKVQQASGAKIDGDGSRWWDGKGGNGGKTKPKFFYAHKLDSSSITGLQIYNTPVQGFSIQSDNLNITDVTIDNSAGTAEGHNTDAFDVGSSTYINIDGATVYNQDDCLAINSGSHITFTNGYCDGGHGLSIGSVGGRSDNTVEDVTISNSKVVNSQNGVRIKTVYDATGTVSNVKFEDITLSGITKYGLIVEQDYENGSPTGTPTNGIKVSDITFDKVTGTVESDATDIYILCGSGSCTDWTWSGVSITGGKTSSKCENVPTGASC

SEQ ID NO: 717 - protein, 364 aa, Neosartorya fumigata
MHFFQSSLVAATMGAALVAAAPAADLETRGSCTFTSTSALKSGKASCSTITLQNIAVPAGETLDLTGLKTGTTVVFDGTTTFGYKEWEGPLISASGTSITIKQNPGAKIDCDGARWWDGKGGNGGKKKPKFFSAHKLNKSNITGLKVYNTPVHGFSIQSDHLTIKDVLLDNSAGTKLGHNTDAFDVGSSTYITIDGATVYNQDDCLAVNSGEHITFTNGYCNGGHGLSIGSVGGRSNNVVNDVTISNSQVINSQNGARIKTVYGATGSVTGVKFQDISLKGITKYGIVVQQDYENGKPTGKPTNGVKVSDITFEKVTGTVTSSATDIYILCGSGSCTNWTWSGNSVTGGKKSSSCKNVPAGASC

SEQ ID NO: 718 - protein, 362 aa, Aspergillus kawachii
MHFLQNAFVAATMGAAPAAATPLEKRSCTFTSASAAKSGKSSCSTITFDNIAVPAGETLDLTGLKKGTTVIFEGETTFGYKEWKGPLISMSGTDITVKQASGAKINCDGARWWDGKGSNGGKTKPKFFQAHKLDESSITGLKIYNTPVQGFSILADHLTITDVTIDDSAGTSKGHNTDAFDIGQSTYITIDGATVYNQDDCLAINSGEHITFTNGYCDGGHGLSIGSIGGRSDNTVNDVTISNSKVVNSQNGVRIKTIYGKTGTVENVKFEDITLSDISKYGIVVEQDYENGSPTGTPTNGVKVEDITFKKVTGSVKSSGTDIYILCGSGRCSNWTWSGVDVTGGKKSSKCKNVPSGASCSD

SEQ ID NO: 719 - protein, 362 aa, Aspergillus niger
MHFLQNAVVAATMGAALAAAAPLEKRSCTFTSASAAKSGKSSCSTITLDNIAVPAGETLDLTGLKKGTTVIFEGETTFGYKEWKGPLISMSGTDITVKQASGAKINCDGARWWDGKGSNGGKTKPKFFQAHKLDQSSITGLKVYNTPVQGFSILADHLTITDVTIDNSAGTSKGHNTDAFDIGQSTYITIDGATVYNQDDCLAINSGEHITFTNGYCDGGHGLSIGSIGGRSDNTVNDVTISNSKVLNSQNGVRIKTIYGKTGTVENVKFEDITLSDISKYGIVVEQDYENGSPTGTPTNGVKVEDITFKKVTGSVKSSGTDIYILCGSGSCSNWTWSGVDVTGGKKSSKCKNVPSGASCSD

SEQ ID NO: 720 - protein, 362 aa, Aspergillus niger; identical to SEQ ID NO: 719

SEQ ID NO: 721 - protein, 363 aa, Aspergillus oryzae
MQLLQSSVIAATVGAALVAAVPVELKARDSCTFTSAADAKSGKTSCSTITLSNIEVPAGETLDLTGLNDGTTVIFSGETTFGYKEWEGPLISVSGTNIKVQQASGAKIDGDGSRWWDGKGGNGGKTKPKFFYAHKLDSSSITGLQIYNTPVQGFSIQSDNLNITDVTIDNSAGTAEGHNTDAFDVGSSTYINIDGATVYNQDDCLAINSGSHITFTNGYCDGGHGLSIGSVGGRSDNTVEDVTISNSKVVNSQNGVRIKTVYDATGTVSNVKFEDITLSGITKYGLIVEQDYENGSPTGTPTNGIKVSDITFDKVTGTVESDATDIYILCGSGSCTDWTWSGVSITGGKTSSKCENVSTGASC

SEQ ID NO: 722 - protein, 364 aa, Emericella nidulans
MHFLQNSLIAAAMGAALVAAAPAADLDARSSCTFTSASAAKSGASKCSTVTLKSIQVPAGETLDLTGLKSGATVIFEGETTFGYKEWKGPLISMSGDKITVKQASGAKINCDGARWWDTKGSNGGKTKPKFFSAHKLNNSKIQGLKIYNTPVQGFSIQSDHLTISDVTIDNSAGTSKGHNTDAFDIGSSTYITIDGATVYNQDDCIAINSGEHITFTNGYCSGGHGLSIGSVGGRSDNTVKSVTISNSKVVDSQNGVRIKTVYKATGSVTDVTFQDIELSGITKYGLIVEQDYENGSPTGTPTNGVEVEDITFKKITGSVDSSATRVNILCGSGSCKDWTWSGVDITGGKKSSKCKNVPSGASC

SEQ ID NO: 723 - protein, 364 aa, Neosartorya fischeri
MHFFQSSLVAATMGAALVAAAPAADLETRSSCTFTSTSALKSGKASCSTITLHNIAVPAGETLDLTGLKTGTTVVFDGTTTFGYKEWEGPLISASGTSITIKQNPGGKIDCDGARWWDGKGGNGGKKKPKFFSAHKLNKSNINGLKVYNIPVHGFSIQSDHLTIKDVLIDNSAGTKLGHNTDAFDVGSSTYITIDGATVYNQDDCLAVNSGEHITFTNGYCNGGHGLSIGSVGGRKNNVVNDVTISNSQIINSQNGARIKTVYGATGSVTGVKFQDVSLKGITKYGIVVQQDYENGKPTGNPTNGVKVSDITFEKVTGSVTSSATDIYILCGSGSCTNWTWSGNSVTGGKKSSKCKNVPAGASC

SEQ ID NO: 724 - protein, 384 aa, Aspergillus aculeatus
MVRQLALACGLLAAVAVQAAPAEPAHPMVTEAPDASLLHKRATTCTFSGSEGASKVSKSKTACSTIYLSALAVPSGTTLDLKDLNDGTHVIFEGETTFGYEEWEGPLVSVSGTDITVEGASGAVLNGDGSRWWDGEGGNGGKTKPKFFAAHDLTSSTIKSIYIENSPVQVFSIDGATDLTLTDITIDNTDGDTDDLAANTDGFDIGESTDITITGAKVYNQDDCVAINSGENIYFSASVCSGGHGLSIGSVGGRDDNTVKNVTFYDVNVLKSQQAIRIKAIYGDTGSISDITYHEIAFSDATDYGIVIEQNYDDTSKTPTTGVPITDFTLENVIGTCADDDCTEVYIACGSGACSDWSWSSVSVTGGKVSSKCLNVPSGISCDL

SEQ ID NO: 725 - protein, 384 aa, Aspergillus niger
MVRQLILISSLLAAVAVRAAPADPAHPMVTEAPDVNLVEKRATTCTFSGSEGASKASKSKTSCSTIYLSDVAVPSGTTLDLSDLNDGTHVIFQGETTFGYEEWEGPLVRVSGTDITVEGESDAVLNGDGSRWWDGEGGNGGKTKPKFFYAHDLTSSTIKSIYIENSPVQVFSIDGSTDLTMTDITVDNTDGDTDDLAANTDGFDIGESTYITITGAEIYNQDDCVAINSGENIYFSASVCSGGHGLSIGSVGGRDDNTVKNVTFYDVNVLKSQQAIRIKTIYGDTGSVSEVTYHEIAFSDATDYGIVIEQNYDDTSKTPTTGVPITDFVLENIVGTCEDDDCTEVYIACGDGSCSDWTWTGVSVTGGSVSDDCLNVPSGISCDL

SEQ ID NO: 726 - protein, 383 aa, Aspergillus niger
MVRQLILISSLLAAVAVRAPADPAHPMVTEAPDVNLVEKRATTCTFSGSEGASKASKSKTSCSTIYLSDVAVPSGTTLDLSDLNDGTHVIFQGETTFGYEEWEGPLVRVSGTDITVEGESDAVLNGDGSRWWDGEGGNGGKTKPKFFYAHDLTSSTIKSIYIENSPVQVFSIDGSTDLTMTDITVDNTDGDTDDLAANTDGFDIGESTYITITGAEIYNQDDCVAINSGENIYFSASVCSGGHGLSIGSVGGRDDNTVKNVTFYDVNVLKSQQAIRIKTIYGDTGSVSEVTYHEIAFSDATDYGIVIEQNYDDTSKTPTTGVPITDFVLENIVGTCEDDDCTEVYIACGDGSCSDWTWTGVSVTGGSVSDDCLNVPSGISCDL

SEQ ID NO: 727 - protein, 492 aa, Aspergillus flavus
MKRSALILSFLPLVFGCDNPKSPGHSCASVYSVSSAAASSFCATFTASTVTATTGVPEALLSNCDYKTKHLSSACSCLGTAAVPTVATPSSVSSVYITSATATPTSFTFKTSTAHIVKVAKAATSSTAVVTTPVSVPTASSSFTGNGGTTCTVTEYAAISSAVASCSNILLSDIYAPPSSTIDLQGLQTGAAVIFAGKTTFGDTADSDFDPIVVSGTSVTITGVEGHVIDGNGAAYWDGQGSNGGSDKPDHFFVVKDMYNSRIENLYIQNWPVHCFEIESTEHLTVSGLTLNNSAGDAANSKSDGDPAAHNSDGFDIKESSYFTLENTWVHNQDDCVAVTSGTDIVVDGMYCYGGHGLSIGSIGGKSDNTVNGVTFSNSQVISSQNGCRIKTNSGETGEVYNIRYENITLSDISDYGIDVQQDYLNGGPTGEPTNGVTIANVTFVDVTGTMSDGKDYYILCGDDSCSNFVFDGVSITGGSGDNCNYPSTGCP

SEQ ID NO: 728 - protein, 495 aa, Aspergillus niger
MKRSALLASFLPLALGCDSAETHSCASAFSVSSAAAASFCATFTASTVTATTGVPDVFLSNCDYKTKHLSSACSCLGTADGSAPASTPAAPAVSSSSKVGKAPAVAATRTSAIPTTFHTTAVRVPLSTSAAAAVTSQAVLPAQSSVAGNGGTTCTVTEYASISSAVASCSNILLSNINAPASSTIDLTGLQTGAAVIFAGETTFGDTYDSDFDPIVISGTDVTITGEEGHVINGNGEAYWDGEGSNGGQDKPDHFIVVKDMYNSKIENLNILNWPVHCFEIENTEYLTISGLILNNTAGDAANSKSDGDPAAHNTDGFDIKQSDFLTLSNSWVHNQDDCVAVTSGSSIVVDNLYCYGGHGLSIGSIGGKSNNTVDGVTFSNSQVINSENGCRIKSNADTTGEVYNVKYENITLSGISDYGIDIQQDYENGGATGDPTNGVKIENISFVNVKGTMSDGKDYYILCGDGSCSNFVFTDVDITGGSDDSCNYPSSGCP

SEQ ID NO: 729 - protein, 495 aa, Aspergillus niger; identical to SEQ ID NO: 728

SEQ ID NO: 730 - protein, 492 aa, Aspergillus oryzae
MKRSALILSFLPLVFGCDNPKSPGHSCASVYSVSSAAASSFCATFTASTVTATTGVPEALLSNCDYKTKHLSSACSCLGTAAVPTVATPSSVSSVYITSATATPTSFTFKTSTAHIVKVAKAATSSTAVVTTPVSVPTASSSFTGNGGTTCTVTEYAAISSAVASCSNILLSDIYAPPSSTIDLQGLQTGAAVIFAGKTTFGDTADSDFDPIVVSGTSVTITGVEGHVIDGNGAAYWDGQGSNGGSDKPDHFFVVKDMYNSRIENLYIQNWPVHCFEIESTEHLTVSGLTLNNSAGDAANSKSDGDPAAHNSDGFDIKESSYFTLENTWVHNQDDCVAVTSGTDIVVDGMYCYGGHGLSIGSIGGKSDNTVNGVTFSNSQVISSQNGCRIKTNSGETGEVYNIRYENITLSDISDYGIDVQQDYLNGGPTGEPTNGVTIANVTFVDVTGTMSDGKDYYILCGDDSCSNFVFDGVSITGGSGDSCNYPSTGCP

SEQ ID NO: 731 - protein, 514 aa, Emericella nidulans
MKRCALLTPLLPLALACNNPNDPAHSCASIYSVSSDEAASFCATFTASVVSEPTGVPDAFLSACDSKIKHLSSACSCLGPVDSATATPVPATSTVPASVPVITTSTATATPSRIPVFVPSSSSSSAVVTFKTQIKSSSPGPSSSFAAAATTEAPTSTRASPYTPYTGNGGTTCTVTDYAGISSAVASCSNIMLSDVYAPPSSTIDLQDLQTGAAVIFAGKTTFGDTSDSDFDPIVISGTNLTITGTEDHVIDGNGQAYWDGQGSNGGSDKPDHFIVLKHVYNSVVANLNIQNWPVHCFDIENTESLTLTGITLDNSAGDEPNDSSDGDPAAHNSDGFDIKSSTDLILKDSNVYNQDDCVAITSGTNITVDNMYCSGGHGLSIGSIGGKSDNTVDGVVFSNSQVVNSQNGCRIKTNEGETGEVSNIKYENISLSGISKYGIVVQQDYLNGGPTGEPSNGVSITNVEFTDVTGTMSGGKDYYILCGDGSCENFTFSGVSITGGSDDSCNYPDSGCP

SEQ ID NO: 732 - protein, 472 aa, Neosartorya fischeri
MKRGALLVPFVPLALACVDPGDSNHSCASVFSVSSAAAASFCATFTVSAVTETTGVPAALLSNCDYKTKHLSSACSCLGPATAAAPTQTSAVTPTVAPTTLKANAVAPTTEAPAPTKSSTFAGNGGTTCTVTEYAAISSAVASCSNILLSDVYAPPSSTIDLQNLQTGAAVIFAGTTTFGDTPDDDFDPIVISGTDVTITGADGHVIDGNGAAYWDGKGSNGGSSKPDHFIVAKHMYYSRIENLNIQNWPVHCFDIEHTENLIISGITLDNSAGDAPNSASGSKPAAHNSDGFDIKSSTNLTLQNSWVHNQDDCVAVSSGTDIVVDNMYCYGGHGLSIGSIGGKSDNTVDGVTFSNSQVINSSNGCRIKSNSGTTGEVSNIRYENITVSGITDYGIDIQQDYLNGGPTGKPTNGVKIENITFVDVTGTMSDGKDYYILCGDGSCSNFVFENVGITGGSGDSCNYPTDTCLEA

SEQ ID NO: 733 - protein, 378 aa, Aspergillus niger
MVTSSSVIVLTLWAALVSASPVADPLVTPAPKLEDLEKRATSCTFSGSEGASSASKSKTSCSTIVLSDVAVPSGTTLDLTDLNDGTHVIFEGETTFGYEEWSGPLVSVSGTDITVTGADGAYLNGDGSRWWDGEGSNGGKTKPKFFYAHDLTSSTISGIYIQNSPVQVFSIDGSTYLTMEDITIDNTDGDDGEAANTDGFDIGDSTYITITGANVYNQDDCVAVNSGENIYFSGGVCSGGHGLSIGSVGGRSDNTVKNVTFYDSEIKSSQNGVRIKTIYGDTGSVSEVTYKEITLSDITDYGIVVEQNYDDTSKSPTDGITIEDFVLDNVQGSVESSGTNIYIVCGSDSCTDWTWTDVDVSGGKTSSDCENVPDDISC

SEQ ID NO: 734 - protein, 378 aa, Aspergillus niger
MVTSSSVIGLTLWAALVSASPVADPLVTPAPKLEDLEKRATSCTFSGSEGASSASKSKTSCSTIVLSDVAVPSGTTLDLTDLNDGTHVIFEGETHFGYEEWSGPLVSVSGTDITVTGADGAYLNGDGSRWWDGEGSNGGKTKPKFFYAHDLTSSTISGIYIQNSPVQVFSIDGSTYLTMEDITIDNTDGDDGEAANTDGFDIGDSTYITITGANVYNQDDCVAVNSGENIYFSGGVCSGGHGLSIGSVGGRSDNTVKNVTFYDSDIKSSQNGVRIKTIYGDTGSVSEVTYKEITLSDITDYGIVVEQNYDDTSESPTDGITIEDFVLDNVQGSVESSGTNIYIVCGSDSCTDWTWTDVDVTGGKTSSDCENVPDDISC

SEQ ID NO: 735 - protein, 432 aa, Neosartorya fumigata
MKFSYSFVQVVTLLLSLSPSVEGFTRSRNDACKPNHPFRPLPPSQPRTKTCHVVSNGHGKDDSKNIMKALHKCNNGGKVVFDANKVYTVGTALDMTFLKHIDLEVLGKIQFTNDTDYWQANSFKHGFQNATTFFQLGGEDVNVYGGGTLDGNGQVWYDLYAEDALILRPILFGVIGLKGGTIGPLKLRYSPQWYQLVANSSDVIFDGIDISGYSSSKNEAKNTDGWDTYRSDNIVIQNSVINNGDDCVSFKPNSTNILVQNLHCNGSHGISVGSLGQYKGEVDIVQNVLVYNISMYNASDGARIKVWPGVSSAMSEDLQGGGGLGSVKNVTYNQMYIENVDWAIEVTQCYGQKNLTLCNEYPSNLTISDIHFKNFRGTTSGKRDPNVGTIVCSSPNVCSDIYAENIDVKSPKGTDNFVCTNVDKSLLDVNCA

SEQ ID NO: 736 - protein, 433 aa, Aspergillus flavus
MKLTQATTLLLSLGLSLPVEGFSLSRTNAVGPKPPFRPLPASTPRNKTCQVQSNGDGTDDAPYILAALKQCNNGGKVVFAEDKEYTIGTALDMTFLKHVDLEILGKITFTPDTDYWQENSFKHTFQNATTFFNLGGTDVNVYGGGELNGNGQVWYDLYAEDALILRPILVGIIGLHGGTIGPLKLRYSPQWYQLVANSSDVLFDGIDISGYSSSENEAKNTDGWDTYRSSNIVIQNSVINNGDDCVSFKPNSTEILVQNLHCNGSHGISVGSLGQYQGEVDIVQNVLVYNISMYNASDMARIKVWPGISSAMSEDLQGGGGLGSVQNITYDKMYIENVDWAIEVTQCYGQKNQTLCNENPSNLTISDVYFNDLTGVTSGKNDPNVGTIICSSPDVCSGIHATNIDVKSPDGDSGFVCTNVDEEFLDVECASSS

SEQ ID NO: 737 - protein, 432 aa, Neosartorya fumigata; identical to SEQ ID NO: 735

SEQ ID NO: 738 - protein, 435 aa, Aspergillus niger
MRLTHVLSHTLGLLALGATAEAFSRSREAACSPKKPFRPLPTSSSRDKTCHVRSHGDGSDDSDYILSALHQCNHGGKVVFDEDKEYIIGTALNMTFLKNIDLEVLGTILFTNDTDYWQANSFKQGFQNATTFFQLGGEDVNMYGGGTINGNGQVWYDLYAEDDLILRPILMGIIGLNGGTIGPLKLRYSPQYYHFVANSSNVLFDGIDISGYSKSDNEAKNTDGWDTYRSNNIVIQNSVINNGDDCVSFKPNSTNILVQNLHCNGSHGISVGSLGQYKDEVDIVENVYVYNISMFNASDMARIKVWPGTPSALSADLQGGGGSGSVKNITYDTALIDNVDWAIEITQCYGQKNTTLCNEYPSSLTISDVHIKNFRGTTSGSEDPYVGTIVCSSPDTCSDIYTSNINVTSPDGTNDFVCDNVDESLLSVNCTATSD

SEQ ID NO: 739 - protein, 435 aa, Aspergillus niger; identical to SEQ ID NO: 738

SEQ ID NO: 740 - protein, 434 aa, Aspergillus terreus
MKFLHTVAQTATLLLSLGASVEGFNRARNDACKPHHPFRPLPASTPRTKTCHVRSHGDGTDDAAFVLSALRKCNNGGKVVFDADKEYTIGTALDMTFLRHVDLEILGRIQFTNDTDYWQAHAFRHGFQNATTFFQLGGTDVNVYGSGTLDGNGQVWYDLYAAEPLTLRPILLGVIGLHGGTIGPLKLRYSPQWYQLVANSTDVLFDGIDISGYSSSKNTAKNTDGWDTYRSSNIVIQNSVVNNGDDCVSFKPNSTDILVQNMHCNGSHGISVGSLGQYKGEIDIVKNILVYNISMYNASDMARIKVWPGVDSALSEDLQGGGGSGAVSNITYDRMYIENVDWAIEVTQCYGQKNQTLCNQYPSNLTISDVHIKNMWGTTSGKRDPNVGTIVCSSPDVCSDIYVTNVNVTSPSGTDDYICTNVDESLLDVNCSSG

SEQ ID NO: 741 - protein, 435 aa, Aspergillus tubingensis
MRLTHVLSHTLGLLALGATAEAFSRSREAACGPKKPFRPLPTSQSRDKTCHVRSHGDGTDDSDYILSALNQCNHGGKVVFDEDKEYIIGTALNMTFLKNIDLEVLGTILFTNDTDYWQANSFKQGFQNATTFFQLGGEDVNMYGGGTINGNGQVWYDLYAEDDLILRPILMGIIGLNGGTIGPLKLRYSPQYYHFVANSSNVLFDGIDISGYSKSDNEAKNTDGWDTYRSNNIVIQNSVINNGDDCVSFKPNSTNILVQNLHCNGSHGISVGSLGQYKDEVDIVENVYVYNISMFNASDMARIKVWPGTPSALSADLQGGGGSGSVKNITYDTALIDNVDWAIEITQCYGQKNTTLCNEYPSSLTISDVHIKNFRGTTSGSEDPYVGTIVCSSPDTCSDIYTSNINVTSPDGTNDFVCDNVDESLLSVNCTATSD

SEQ ID NO: 742 - protein, 432 aa, Neosartorya fischeri
MKFSYSFVQVVSLLLSLSPSVEGFTRSRNDACKPNHPFRPLPPSQPRTKTCHVVSNGHGKDDSKNIMQALHKCNNGGKVVFDANKVYTVGTALDMTFLKHIDLEVLGKIQFTNDTDYWQAHSFKHGFQNATTFFQLGGQDVNVYGGGTFDGNGQVWYDLYAEDALILRPILFGIIGLKGGTIGPLKLRYSPQWYQLVANSSDVIFDGIDISGYSSSKNEAKNTDGWDTYRSDNIVIQNSVINNGDDCVSFKPNSTNIIVQNLHCNGSHGISVGSLGQYKGEVDIVQNVLVYNISMYNASDGARIKVWPGVSSAMSEDLQGGGGLGSVKNITYNQMYIENVDWAIEVTQCYGQKNLTLCNEHPSNLTISDIHFKNFRGTTSGKRDPDVGTIVCSSPNVCSDIHAENINVKSPKGTDEFVCTNVDKSLLDVNCA

SEQ ID NO: 743 - protein, 378 aa, Neosartorya fumigata
MLKLMGSLVLLASAAEVIASPAAEPVAPSTTLEKRAPCTFSGSNGAAAAMASQKACSTIVLSNVAVPAGTTLDLSDLADGTTVTFEGETTWGYQEWSGPLLKISGKNIKVKGASGATLNPDGARWWDGQGGNGGKTKPKFFAAHDLTSSSSITDLHILNTPVQAVSINGCDGLTITDITIDNSAGDTQGGHNTDAFDIGSSSNIIISGAKVYNQDDCVAVNSGTDITFTGGLCSGGHGLSIGSVGGRSDNTVENVSFTNSQVTNSDNGLRIKATKGKTGTIKGVTYSGITLSSIRKYGILIEQNYDGGDLKGDPTSGIPITDLTMQNISGKGAVASSGYNIAIVCGSGACSNWTWKSVEVTGGKTYGSCKNVPSVAQC

SEQ ID NO: 744 - protein, 378 aa, Neosartorya fumigata; identical to SEQ ID NO: 743

SEQ ID NO: 745 - protein, 380 aa, Emericella nidulans
MFYALGPLALFAFATEVMATPVAYPMTTASPTLAKRDSCTFSGSDGAASASRSQTDCATITLSDITVPSGTTLDLSDLEDDTTVIFEGTTSWEYEEWDGPLLQIKGNGITIKGADGAKLNPDGSRWWDGEGSNGGVTKPKFFYAHDLTDSTIQNLYIENTPVQAVSINGCDGLTITDMTIDNSAGDDAGGHNTDGFDIGESSNVVITGAKVYNQDDCVAVNSGTSITFSGGTCSGGHGLSIGSVGGRDDNTVDTVTFKDSTVSNSVNGIRIKAKSGETGEIKGVTYSGISLESISDYGILIEQNYDGGDLDGEVTSGIPITDLTIENISGSGAVDSDGYNIVIVCGDDACSNWTWSDVEVTGGEDYGSCENVPSVASCST

SEQ ID NO: 746 - protein, 378 aa, Neosartorya fischeri
MLKLIGSLVLLASAAEVIASPLAESVAPSITLEKRASCTFSGSNGAAAAMASQKACSTIVLSNVAVPAGTTLDLSDLADGTTVIFEGETTWGYKEWSGPLLQISGKNIKVEGASGATLNPDGARWWDGQGGNGGKTKPKFFAAHGLTSSSSITNLHILNTPVQAVSINGCDGLTVTDMTIDDSAGDTQGGHNTDAFDIGSSSNIIISGAKVYNQDDCVAVNSGTGITFTGGLCSGGHGLSIGSVGGRSDNTVENVSFTNSQVTKSDNGLRIKASKGKTGTIKGITYSGITLSSIRKYGILIEQNYDGGDLKGDPTSGIPITDLTMENISGKGAVASSGHNIAIVCGSGACSNWTWKNVEVTGGQTYGSCENVPSVAQC

SEQ ID NO: 747 - protein, 434 aa, Emericella nidulans
MKLSHLLTSAVSVLSLGLTVEGHFSRSRNDAVGPKRPFKPLPYSHPRKKVCHVRSHGDGRDDSAFILSALKSCNNGGKVVFAEEKEYTIGTALDLTFLKHVDLEILGRIQFTNDTDYWQANSFKHTFQNATTFFQLGGEDVNVYGGGTLDGNGQIWYDLYAEDPLILRPILFGVIGLHGGTIGPLKLRYSPQWYQLVANSSDVLFDGIDISGYSKSENEAKNTDGWDTYRSKNIVIQNSVINNGDDCVSFKPNSTEILVQNLYCNGSHGISVGSLGQYIGEVDIVKNVLVYNISMYNASDMARIKVWPGVASAMSEDLQGGGGLGSVSNITYEDMYIENVDWAIEITQCYGQKNMTLCNEYPSNLTISDVYISNMYGTTSSARDPNIGTIVCSSPDVCSNIYVENIDVVSPSGTNDFICTNVNESLLQVNCTSG

SEQ ID NO: 748 - protein, 449 aa, Emericella nidulans
MGFKRTIGLLLGILLALDQVSVLAQPGRPTFAKRPDIQPNPIQPYKAIPLHSRRNSHKVCYVKPSLNGGDDAGRVEAALRRCNNGGTIVLDKEYSICTPLDLRFLKHVDVALTGKVEFCPELEFWQQNVFQFHFQNASSWWVWGGEDIHLYGAGTGVIHGNGQPWWDAAAGNSSVRRPLLFITDGWHGGSITGLKLRQSPNWHNFIANSSDLLISDMDIFSRSSSEAWASNLDGWDTFRSDNVVIQNSVINHDDDCVSFKPNSTNIIVQGLHCNGSHGISVGSLGNYPYQYDIVSDLYIYNNTMANTTTAARLKVWPGAEAVKKGNPPWVGGGGKGYVRNVTYDLMINDNNDLAIQIDQCYGAINASECLDHPSGVILTNVLFKNMWGTSNGANDPVAGQLICGSADSCDNIRAENVTLTNSSGQPSEWQCRYMDEELLDLGGVGCIPA

SEQ ID NO: 749 - protein, 434 aa, Aspergillus niger
MKLPILVTLFITLPALCVSSKTPSAPTISAYPKSPGNFKPASGRQNSTSNVCEVKPNQTDAAPGILAAAHTCNNGGTVFLPPGDFVVATALDLTFLNNIDFAIWGNITFKKDIDLWTTQAFQYTFQTASLFWRFGGNNVNIYGDGKGVIDGAGQYWWSAMAEDSSVMRPCLLGTDGLHHATISGLTMLNSPNWFNLIANSTDILISNMTMLVESEISDAPAKNTDGWDIYRSSNIVIQDSRIVNTDDCVSFKPNSTQIVIQNLDCTGSHGISVGSLGQYQGETDIVEDLYIYNISMTDASDVARIKVWPGVPADTSGSTSGGGLGRVRNVTYEHMQSENNDHIISVSQCYESKNQTMCDSYPSKLVIEDVLFKDFKGTTSKKYDPEIGELTCSSPDVCHNITVQDINVTPPSGDSPTFTCNNMGNSNLEDITCA

SEQ ID NO: 750 - protein, 434 aa, Aspergillus niger; identical to SEQ ID NO: 749

SEQ ID NO: 751 - protein, 453 aa, Neosartorya fumigata
MKFFALAALFASTVNSIAVDGLIPGARVIPANDVVALKKAGAYHQKHHHRRTVIIRSSSSDEDDVSADFLWGIKRANHGGRLLLQNGKKYVIGKKLDLTFLKDIEVQLDGELKFTNDVPYWQANNFYYDFQKSISFWRWGGEDIKIFGSGVLNGNGQRWYNEFAGQEILDPNNKYYRPILFVTENATRVSVEGITQLNSPCWTNFFVRTKDISFDNVFIHAYSTNASALPKNTDGFDTLNVDGLTVTNTRVDIGDDCLSPKPNTTNVFVKNLWCNGTHGASMGSIGQYPGVLDIIENVWIENVTLLNGENGARLKAWAGPDVGYGRINNVTYKNIHVENTDNPIVLDQCYFNINATQCAAYPSRVNFTNIVFEDIYGTSSGKRGKVVADLTCSPNAVCSGIRLKNIHLTSPAGSPPVIVCDGIQGDIGVECQSSSNSTTKRSVDLARSLKYRA

SEQ ID NO: 752 - protein, 435 aa, Aspergillus flavus
MKFFLATLFASAVSSIAVDRLIPGAQIIPESDTRALLRVGGHHDKYHDRRTITIRPSRNDTDDVSRDFLWGIKHANHGGRLLLKKGEKYVIGRKLDLTFLDDIEVQLDGELKFTDDVSYWQENNFYYDFQKSITFWRWGGKDIKIFGTGLLNGNGQRWYNEFAGQEILDPDNEYYRPILFLTENATRISVEGITQLNSPCWTNFFIQSKDVSFDDVYIHAFSTNKSALPKNSDGFDSLNVDGLTVTNTRVDVGDDCFSPKPNTTNIFVQNLLCNNTHGVSMGSIGQYPGVMDIIEHAYIENVTLLNGQNGARLKAWAGQDVGYGRINNITYKNIRIENTDAPVVLDQCYFDIEAAECAQYPSQVNVTNILFENISGTSSGKNGKVVADLVCSPNAVCSDIQLKNINLTSPAGSPPEIVCEGVQGDIGVECQASAD

SEQ ID NO: 753 - protein, 453 aa, Neosartorya fumigata
MKFFALAALFASTVNSIAVDGLIPGARVIPANDVVALKKAGAYHQKHHHRRTVIIRSSSSDEDDVSADFLWGIKRANHGGRLLLQNGKKYVIGKKLDLTFLKDIEVQLDGELKFTNDVPYWQANNFYYDFQKSISFWRWGGEDIKIFGSGVLNGNGQRWYNEFAGQEILDPNNKYYRPILFVTENATRVSVEGITQLNSPCWTNFFVRTKDISFDNVFIHAYSTNASALPKNTDGFDTLNVDGLTVTNTRVDIGDDCLSPKPNTTNVFVKNLWCNGTHGASMGSIGQYPGVLDIIENVWIENVTLLNGENGARLKAWAGPDVGYGRINNVTYKNIHVENTDNPIVLDQCYFNINATQCAAYPSRVNFTNIVFEDIYGTSSGKRGKVVADLTCSPNAVCSGIRLKNIHLTSPAGSPPVIVCDGIQGDIGVECQSSSNSTTRRSVDLARSLKYRA

SEQ ID NO: 754 - protein, 438 aa, Aspergillus niger
MYLLPLTLFLTAAFGVSIPRSPLIPGAQIVPASSTADLRAIGAQHHKYPDRETVTIRASRNALDDVSSDFLWGLKQANHGGRLLLKQGETYVIGKKLDLTFLDNIEVQLEGEIQFTNNITYWQANNFYYDFQKSITFWRWGGQDIKIFGSGVLNGNGQKWYDEFAGKQILVYNTFYRPILFLTDNATRISVEGITQLNSPCWTNFFVRTNDVSFDNVYIHAFSTNASSDPANTDGMDSLDVDGVSFTNMRIDVGDDCFSPKPNTTNIFVQNMWCNNTHGVSMGSIGQYAGEMDIIENVYIENVTLLNGQNGARLKAWAGQDVGYGRINNVTYKNIQIQNTDAPIVLDQCYFDINATECAKYPSAVNITNILFENIWGSSSGKDGKIVADLVCSPDAVCTNITLSNVNLTSPKGTAEIVCDDIQGGIGVDCVSDESVTR

SEQ ID NO: 755 - protein, 438 aa, Aspergillus niger; identical to SEQ ID NO: 754

SEQ ID NO: 756 - protein, 435 aa, Aspergillus oryzae
MKFFLATLFASAVSSIAVDRLIPGAQIIPESDTRALLRVGGHHDKYHDRRTITIRPSRNDTDDVSRDFLWGIKHANHGGRLLLKKGEKYVIGRKLDLTFLDDIEVQLDGELKFTDDVSYWQENNFYYDFQKSITFWRWGGKDIKIFGTGLLNGNGQRWYNEFAGQEILDPDNEYYRPILFLTENATRISVEGITQLNSPCWTNFFIQSKDVSFDDVYIHAFSTNKSALPKNSDGFDSLNVDGLTVTNTRVDVGDDCFSPKPNTTNIFVQNLLCNNTHGVSMGSIGQYPGVMDIIEHAYIENVTLLNGQNGARLKAWAGQDVGYGRINNITYKNIRIENTDAPVVLDQCYFDIEAAECAQYPSQVNVTNILFENISGTSSGKNGKVVADLVCSPNAVCSDIQLKNINLTSPAGSPPEIICEGVQGDIGVECQASAD

SEQ ID NO: 757 - protein, 435 aa, Aspergillus terreus
MKFFTAALFASAVSAFAVDSIIPGARVIPATDTLELQHVGAHHHKHPNRRTVTIRSSRNDTDDVSKDFLWGISRANHGGRLLLQKGKKYVIGKKLDLSFLNNIEVQLDGELKFTDDVPYWQKNNFYYSFQKSISFWRWGGQDIKIFGSGVLNGNGQRWYNEFAGQEILDPDNTFYRPILFVTENATRVSVEGITQLNSPCWTNFFVGSNDVSFDNVYIEAFSTNASALPKNTDGFDSYNVKGLSVTNTRVNVGDDCFSPKPNTTDIFVQNLWCNGTHGVSMGSIGQYPGVMDIIEHAYIENVTLLNGQNGARLKAWAGENVGYGRINNITYKNIRIENTDKPVVLDQCYFNVDTATCAEYPSSVNITNITFENVYGTSSGKEGKVVADLVCSPNAVCSDIHLADIDLTSPAGSPPVIICEGIQGDIGVECQSSTS

SEQ ID NO: 758 - protein, 440 aa, Emericella nidulans
MRLHFLPLVALCATTASSLAFDSSTSQPPGAQVYSVNDAAGLKRIGAHHPKYHDRRTVTIRSSHNDTDDVSADFLWGIRRANHGGRLLLKKGQKYVIGRKLDLSFLDNVEVQLDGELKFTDDVPYWQENNFYYDFQKSISFWRWGGHDVRIFGRGTLNGNGQRWYNEFAGQEILDPDNTYYRPILFVAENATRLSVEGITELNSPCWTNFLVNSKDISFDNVFINAYSTNASAEPKNTDGFDSLNVNGLSVTNTRVDIGDDCFSPKPNTTNIFVQNLWCNNTHGVSMGSIGQYPGVLDIIEHAYIENVTLLNGENGARLKAWAGEDVGYGRINNITYKNIHVENTDYPIVLDQCYFNIPADECASYPSQVNVTNIVFENVYGTSSGAEGNVVAELICSPNAICEDIKLKGINLTTPEGEKGVVVCDGISGGVGVECQSSE

SEQ ID NO: 759 - protein, 453 aa, Neosartorya fischeri
MKFLALAALFASTVSSIAVDGLIPGARVIPANDVVALKKVGAHHQKHPHRRTVIIRPSFNDEDDVSADFLWGIKWANRGGRLLLQKGKKYVIGKKLDLTFLKDIEVQLDGELKFTNDVPYWQANNFYYDFQKSISFWRWGGEDIKIFGSGVLNGNGQRWYNEFAGQEILDPNNKYYRPILFVTENATRVSVEGITQLNSPCWTNFFVRTKDISFNNVFIHAYSTNASALPKNTDGFDTLNVDGLTVTNTRVDIGDDCLSPKPNTTNVFVQNLWCNGTHGTSMGSIGQYPGVLDIIENVWIENVTLLNGENGARLKAWAGPNVGYGRINNVTYKNIHVENTDNPIVLDQCYFNINATQCAAYPSRVNFTNIVFENIYGTSSGKHGKVVADLTCSPNAVCSGIRLKNIHLTSPAGSPPVIVCDGIQGDIGVECQSSTNLTTKRSIGLARNLKYKA

SEQ ID NO: 760 - protein, 440 aa, Neosartorya fumigata
MLITNPALLGILASLVPLALGAPNQPIQARSRKCVIPSSYASSHGTADDSPAVASAFAQCAENSVIVFQEGVDYNIFHPIKATNLSNVEIRVLGNLHLPQDITAVQNIVKSGQSTWFTFQGPRVDWTGADDIKNGWINSYGQAWWDANPANSSSFPNRPHLMSYKTSQASIKNFRSRKPIAWNVKLQGDDITVSHAIVDATSTGGFPFNTDGFDVEGTNISITDSVMFNGDDAIAVNTPSHNIVFARNTIGYQSHGMSIGSLGKDPTDFANITNLRFEDVTVIDALYAARFKSWSGGRGLVKNVVWKNIRTFNVTFPIFVTQSYSDQSASRPGTIDPFSSVMMEDFTWSDFSGTINTYHPGDGSCVTDPCWYNVGLPNLKHTEAIVLECNTESSCKNFRTEGIRLHPQSKDSPSVICMKATAELNPKLGFECKNGTFVPH

SEQ ID NO: 761 - protein, 437 aa, Aspergillus flavus
MLITKTAFLAFLLSSVPLAHGAGGNSSSPDARGRRCVVRSSNGTADDSPEVSRVFAQCATNSVIVFQEGVDYNIFQPIKATNLSNVEIQMHGNLHLPQNISAVRDIVNAGTSTWFTLEGPRVDWTGPEDVNNGWIKSYGQAWWDANPPNGTGISGRPHLMSYKTSQATIKYFRSGKPIAWNMKLHGEDIAVSHAIVDASSTGSFPFNTDAFDVQGTNIRISDSIMYNGDDAIAVGSDSHNIVFERNTIGYQSHGMSIGSLGKDASAFANITNLRFEDVTVIDALYAARFKSWTGGQGLVKNVTWKNIRVYNVTFPIFVTQSYYDQSVSRDGVDTESSVMMEDFTWEDFSGSINSYQPGDGSCATDPCWYNAGLPNLKHTEALVIECNTDKSCKNFVTKNIQLYPQVLEPASVICMKATAELNPNLGFNCSNGTFTSA

SEQ ID NO: 762 - protein, 440 aa, Neosartorya fumigata
MLITNPALLGILASLVPLALGAPNQPIQARSRKCVIPSSYASSHGTADDSPAVASAFAQCAENSVIVFQEGVDYNIFHPIKATNLSNVEIRVLGNLHLPQDITAVQNIVKSGQSTWFTFQGPRVDWTGADDIKNGWINSYGQAWWDANPANSSSFPNRPHLMSYKTSQASIKNFRSRKPIAWNVKLQGDDITVSHAIVDATSTGGFPFNTDGFDVEGTNISITDSVMFNGDDAIAVNTPSHNIVFARNTIGYQSHGMSIGSLGKDPTDFANITNLRFEDVTVIDALYAARFKSWSGGRGLVKNVVWKNIRTFNVTFPIFVTQSYSDQSASRSGTIDPFSSVMMEDFTWSDFSGTINTYHPGDGSCVTDPCWYNVGLPNLKHTEAIVLECNTESSCKNFRTEGIRLHPQSKDSPSVICMKATAELNPKLGFECKNGTFVPH

SEQ ID NO: 763 - protein, 440 aa, Aspergillus niger
MSVFKASFLFLLSSSLVHGVPHSSRASRSQQCVVPSKYQASNGMADDSVAVSQAFAQCATDSVIIFEEGVNYNIFQPITATNLSNVEIRMHGNLHLPQNITAVQNIVSDGTSTWFTLEGPKVDWIGPEDVNNGWIDSYGQPWWDANPAGSSGIDNRPHLMSFKSSQATMKYFRSRKPIAWNVKLHGQDITVSHAIIDATSTGSFPFNTDGFDVEGTNIQITDSIMYNGDDAIAVGADSHDTLFTRNTIGYQTHGMSIGSLGKDPTDFANISNIRFDDVTVVDGLYAARFKSWSGGTGLVKNVTWNNIRVFNVTFPIFVTQSYSDQGASRSGTVNASSAVMMEDFTWSDFAGSINTYQPGDGSCVSDPCWYNVGLPNLKHTEALIIECHTAQSCKNFVTDNIQLYPQVLEPASVICMNATAALNPDLGFTCKNGTYSPLSN

SEQ ID NO: 764 - protein, 440 aa, Aspergillus niger; identical to SEQ ID NO: 763

SEQ ID NO: 765 - protein, 437 aa, Aspergillus oryzae; identical to SEQ ID NO: 761

SEQ ID NO: 766 - protein, 432 aa, Aspergillus terreus
MPISKGIFLSLLSTLPLALAGHRSHRCVVPSSNGTRDDSPAIAKVFAQCATDSIIVFQEGVDYNVFQPIKAENLSNVEIRMHGNLHLPQNISAVQEIVKAGNSYWFTLEGPRVDWTGSEDINHGWINSYGQAWWDANPPNGTGIENRPHLLSYTTSDATIKYMRSRKPIAHNCRLHGDDITVTHAIVDAYSTGGFPFNTDGFDVAGTNIRISDSVMYNGDDAIAVGSGSHDIVFERNTIGYQSHGMSIGSLGKDPTDFANITNLRFEDVTVIDALYAARFKSWTGGQGLVKNVTWKNIRVFNVTFPIFVTQSYWDQGANRGDVDESSSVMMEDFTWSDFTGSINTYQPGDGSCASDPCWYNAGLPNLQHTEAIILECNTATSCKNFVTENIQLYPQSMDAPHLICMNATAELNPRLGFDCRNGMYTALSERH

SEQ ID NO: 767 - protein, 440 aa, Neosartorya fischeri
MLITNPALLGILASLAPLALGAPNQSTQARSRKCVIPSSYTSSQGTADDSPAVAGAFAQCAENSVIIFQEGVDYNIFHPIKATNLSNVEIRVLGNLHLPQDITAVQNIVKSGQNTWFTFQGPRVDWTGADDINNGWINSYGQAWWDANPANSSSFPNRPHLMSYKTSQASIKNFRSRKPIAWNVKLHGDDITVTHAIVDAKSTGGFPFNTDGFDVEGTNISITDSVMYNGDDAIAVNTPSHNIVFARNTIGYQSHGMSIGSLGKDPTDFANITNLRFEDVTVIDALYAARFKSWSGGKGLVKNVVWKNIRVFNVTFPIFVTQSYSDQSASRSGTIDPSSSVMMEDFTWSNFSGSINTYHPGDGSCVTNPCWYNAGLPNLKHTEAIVLECNTESSCKNFRTEGIRLYPQSKDSPSVICMKATAELNPKLGFECKNGTFVPQ

SEQ ID NO: 768 - protein, 417 aa, Aspergillus niger
MFTKQSLVTLLGGLSLAVAQTTTEGYPSLAEIRAAQATVQPYSPVSNVKGLTFNRFVNIWLENTDFDAAAATEHLPVLAKKGLLLNNFWAVTHPSEPNYCRHLPLGDTFGMDNDDFHQIPSNVSTIADLFDTKNIAWGEYQEGLPYPGYQGYRYPESGANDYVRNRNPLILFDSVTEDALRLRQIKNFSSFYDDLENHRLPQYMFITPNMTNDGHDTNITFSGDWTWGFLSELLENDYFTKDTLIMLTFDETGTYEIGNNIYTFLLGGAVPDDLLGTKDDTFYTHYSVIASLSTNWGLPSLGRWDCGANLFSWLAKKTGYVNYEVDTSNLYMNETHWGPLSDDDYSEYYAGWPVPTTDASCSAGNGILSTVKKTYEGLTATFNYTTPFPYDSRSGNNVGVKYSRTLKNGKVESGTSE

SEQ ID NO: 769 - protein, 466 aa, Aspergillus terreus
MGFLAIVLSVALLFRSTSGTPLGPRGKHSDCNSVDHGYQCFPELSHKWGLYAPYFSLQDESPFPLDVPEDCHITFVQVLARHGARSPTHSKTKAYAATIAAIQKSATAFPGKYAFLQSYNYSLDSEELTPFGRNQLRDLGAQFYERYNALTRHINPFVRATDASRVHESAEKFVEGFQTARQDDHHANPHQPSPRVDVAIPEGSAYNNTLEHSLCTAFESSTVGDDAVANFTAVFAPAIAQRLEADLPGVQLSTDDVVNLMAMCPFETVSLTDDAHTLSPFCDLFTATEWTQYNYLLSLDKYYGYGGGNPLGPVQGVGWANELMARLTRAPVHDHTCVNNTLDASPATFPLNATLYADFSHDSNLVSIFWALGLYNGTAPLSQTSVESVSQTDGYAAAWTVPFAARAYVEMMQCRAEKEPLVRVLVNDRVMPLHGCPTDKLGRCKRDAFVAGLSFAQAGGNWADCF

SEQ ID NO: 770 - protein, 466 aa, Aspergillus terreus
MGVFVVLLSIATLFGSTSGTALGPRGNHSDCTSVDRGYQCFPELSHKWGLYAPYFSLQDESPFPLDVPDDCHITFVQVLARHGARSPTDSKTKAYAATIAAIQKNATALPGKYAFLKSYNYSMGSENLNPFGRNQLQDLGAQFYRRYDTLTRHINPFVRAADSSRVHESAEKFVEGFQNARQGDPHANPHQPSPRVDVVIPEGTAYNNTLEHSICTAFEASTVGDAAADNFTAVFAPAIAKRLEADLPGVQLSADDVVNLMAMCPFETVSLTDDAHTLSPFCDLFTAAEWTQYNYLLSLDKYYGYGGGNPLGPVQGVGWANELIARLTRSPVHDHTCVNNTLDANPATFPLNATLYADFSHDSNLVSIFWALGLYNGTKPLSQTTVEDITRTDGYAAAWTVPFAARAYIEMMQCRAEKQPLVRVLVNDRVMPLHGCAVDNLGRCKRDDFVEGLSFARAGGNWAECF

SEQ ID NO: 771 - protein, 467 aa, Aspergillus awamori
MGVSAVLLPLYLLAGVTSGLAVPASRNQSTCDTVDQGYQCFSETSHLWGQYAPFFSLANESAISPDVPAGCRVTFAQVLSRHGARYPTESKGKKYSALIEEIQQNVTTFDGKYAFLKTYNYSLGADDLTPFGEQELVNSGIKFYQRYESLTRNIIPFIRSSGSSRVIASGEKFIEGFQSTKLKDPRAQPGQSSPKIDVVISEASSSNNTLDPGTCTVFEDSELADTVEANFTATFAPSIRQRLENDLSGVTLTDTEVTYLMDMCSFDTISTSTVDTKLSPFCDLFTHDEWIHYDYLQSLKKYYGHGAGNPLGPTQGVGYANELIARLTHSPVHDDTSSNHTLDSNPATFPLNSTLYADFSHDNGIISILFALGLYNGTKPLSTTTVENITQTDGFSSAWTVPFASRLYVEMMQCQAEQEPLVRVLVNDRVVPLHGCPIDALGRCTRDSFVRGLSFARSGGDWAECSA

SEQ ID NO: 772 - protein, 465 aa, Neosartorya fumigata
MVTLTFLLSAAYLLSGRVSAAPSSAGSKSCDTVDLGYQCSPATSHLWGQYSPFFSLEDELSVSSKLPKDCRITLVQVLSRHGARYPTSSKSKKYKKLVTAIQANATDFKGKFAFLKTYNYTLGADDLTPFGEQQLVNSGIKFYQRYKALARSVVPFIRASGSDRVIASGEKFIEGFQQAKLADPGATNRAAPAISVIIPESETFNNTLDHGVCTKFEASQLGDEVAANFTALFAPDIRARAEKHLPGVTLTDEDVVSLMDMCSFDTVARTSDASQLSPFCQLFTHNEWKKYNYLQSLGKYYGYGAGNPLGPAQGIGFTNELIARLTRSPVQDHTSTNSTLVSNPATFPLNATMYVDFSHDNSMVSIFFALGLYNGTEPLSRTSVESAKELDGYSASWVVPFGARAYFETMQCKSEKEPLVRALINDRVVPLHGCDVDKLGRCKLNDFVKGLSWARSGGNWGECFS

SEQ ID NO: 773 - protein, 467 aa, Aspergillus niger
MGVSAVLLPLYLLSGVTSGLAVPASRNQSSCDTVDQGYQCFSETSHLWGQYAPFFSLANESVISPEVPAGCRVTFAQVLSRHGARYPTDSKGKKYSALIEEIQQNATTFDGKYAFLKTYNYSLGADDLTPFGEQELVNSGIKFYQRYESLTRNIVPFIRSSGSSRVIASGKKFIEGFQSTKLKDPRAQPGQSSPKIDVVISEASSSNNTLDPGTCTVFEDSELADTVEANFTATFVPSIRQRLENDLSGVTLTDTEVTYLMDMCSFDTISTSTVDTKLSPFCDLFTHDEWINYDYLQSLKKYYGHGAGNPLGPTQGVGYANELIARLTHSPVHDDTSSNHTLDSSPATFPLNSTLYADFSHDNGIISILFALGLYNGTKPLSTTTVENITQTDGFSSAWTVPFASRLYVEMMQCQAEQEPLVRVLVNDRVVPLHGCPVDALGRCTRDSFVRGLSFARSGGDWAECFA

SEQ ID NO: 774 - protein, 466 aa, Aspergillus oryzae
MAVLSVLLPITFLLSSVTGTPVTSPRQQSCNTVDEGYQCFSGVSHLWGQYSPYFSVDDESSLSEDVPDHCQVTFAQVLSRHGARYPTKSKSEKYAKLIKAVQHNATSFSGKYAFLKSYNYSLGADDLTPFGENQLVDSGIKFYQRYEELAKNVVPFIRASGSDRVIASGEKFIEGFQKAKLGDSKSKRGQPAPIVNVVITETEGFNNTLDHSLCTAFENSTTGDDAEDKFTAVFTPSIVERLEKDLPGTTLSSKEVVYLMDMCSFDTIALTRDGSRLSPFCALFTQEEWAQYDYLQSVSKYYGYGGGNPLGPAQGIGFANELIARLTKSPVKDHTTTNTTLDSNPATFPLNATLYADFSHDNTMTSVFFALGLYNTTEPLSQTSVQSTEETNGYSSARTVPFGARAYVEMMQCTDEKEPLVRVLVNDRVIPLQGCDADEYGRCKRDDFVEGLSFVTSGGNWGECFA

SEQ ID NO: 775 - protein, 466 aa, Aspergillus terreus
MGVFVVLLSIATLFGSTSGTALGPRGNHSDCNSVDHGYQCFPELSHKWGLYAPYFSLQDESPFPLDVPDDCQITFVQALARHGARSPTDSKTKAYAATIAAIQKNATTFPGKYAFLKSYNYSMGSEDLTPFGRNQLQDMGAQFYRRYDTLTRHINPFIRAADSSRVHESAEKFVEGFQNARQGDPRANPHQPSPRVDVVIPEGTAYNNTLEHSICTAFEDSTVGDAAADNFTAVFAPAIAKRLEADLPGVQLSADDVINLMAMCPFETVSLTDDAHTLSPFCDLFTAAEWTQYNYLLSLDKYYGYGGGNPLGPVQGVGWANELIARLTHSPVHDHTCVNNTLDANPATFPLNATLYADFSHDSNLVSIFWALGLYNGTKALSQTTVEDTTQTDGYAAAWTVPFAARAYIEMMQCRAEKQPLVRVLVNDRVMPLHGCAVDNLGRCKRDDFVEGLSFARAGGNWAECF

SEQ ID NO: 776 - protein, 321 aa, Neosartorya fumigata
MKFVATLIACGLSGLALAAPTATVDSLGKRAADDAAFGYASLNGGTTGGAGGTTTTVSSYAAFTAAVSSDAKKVVYVSGPIKQSAKQVKVGSNTSIIGKDSTAVLEGFGLLVKEKSNVIIRNLGVKKVLAENGDAIGIQYSNNVWVDHVDVSSDRDHDKDYYDGLIDVTHAADYVTISNSYIHDHWKASLVGHSDNNGDEDKGHLRVTYANNYWSNINSRAPSLRFGTGHIYNSYFENVSDGINTRDGAQVLVESNQFVGSSKALYSTDDGYAVERDNDFGGAKNTALQGTLTTVPYSYSLLGSSKVKSAVVGVAGQTLKF

SEQ ID NO: 777 - protein, 321 aa, Aspergillus flavus
MANFKLFLALAACLSGQALAAPTKTIGKRAAITDVAHGYASQNGGTTGGAGGTTTTVSSYAQFTEAVSSDDAKIVIVDGTITETADQVKVGSNTSIIGKDANAILEGFGLLVKEKENVIIRNLGVKKVLADNGDAIGVQYSNNVWIDHCDVSSDRDHDKDYYDGLIDLTHAADYVTVSNTFVHDHWKAMLFGHSDSNGDEDTGHLRITVNNNYLNNLNSRGPSFRFGTGHLYNNYYLDVSDGINTRQGAQLLVEGNVWSGGKKPLYSTDDGYAVARDNDFGDGENTAPEGTLTSVPYEYDLLAASAVKDAVVGTAGQTLTF

SEQ ID NO: 778 - protein, 321 aa, Neosartorya fumigata
MKFVATLIACGLSGLALAAPTATVNSLGKRAADDAAFGYASLNGGTTGGAGGTTTTVSSYAAFTAAVSSDAKKVVYVSGPIKQSAKQVKVGSNTSIIGKDSTAVLEGFGLLVKEKSNVIIRNLGVKKVLAENGDAIGIQYSNNVWVDHVDVSSDRDHDKDYYDGLIDVTHAADYVTISNSYIHDHWKASLVGHSDNNGDEDKGHLRVTYANNYWSNINSRAPSLRFGTGHIYNSYFENVSDGINTRDGAQVLVESNQFVGSSKALYSTDDGYAVERDNDFGGAKNTALQGTLTTVPYSYSLLGSSKVKSAVVGVAGQTLKF

SEQ ID NO: 779 - protein, 323 aa, Aspergillus niger
MTNFKWIVAAAGLLSGQVLAAPTATSTHAKRATVSDAAFGYASLNGGTTGGAGGTTTTVSSYAAFTSAVSGDDAKVVYVDGTIKQTADQVKIGSNTSIIGKDANAILEGFGVLVKEKENVIIRNLGVSKVLADNGDAIGVQYSNNVWIDHCDVSSDRDHDKDYYDGLIDITHGSDYVTVSNTFIHDHWKASLVGHSDSNEDEDSGHLTVTYANNYWYNINSRAPSFRFGTGHVYNSYYLDVSDGINTRDGAQLLVESNQFVDSKKALYSTDDGYAVSNDNDFGDSENTAEEGTLTSMPYDYTLLGSANVKAAVVGTAGQTLTF

SEQ ID NO: 780 - protein, 323 aa, Aspergillus niger
MTNFKWIVAAAGLLFGQVLAAPTATSTHAKRATVSDAAFGYASLNGGTTGGAGGTTTTVSSYAAFTSAVSGDDAKVVYVDGTIKQTADQVKIGSNTSIIGKDANAILEGFGVLVKEKENVIIRNLGVSKVLADNGDAIGVQYSNNVWIDHCDVSSDRDHDKDYYDGLIDITHGSDYVTVSNTFIHDHWKASLVGHSDSNEDEDSGHLTVTYANNYWYNVNSRAPSFRFGTGHVYNSYYLDVSDGINTRDGAQLLVESNQFVDSKKALYSTDDGYAVSNDNDFGDSENTAEEGTLTSMPYDYTLLGSANVKAAVVGTAGQTLTF

SEQ ID NO: 781 - protein, 321 aa, Aspergillus oryzae; identical to SEQ ID NO: 777

SEQ ID NO: 782 - protein, 327 aa, Emericella nidulans
MQNLKFLIAAVSCLGPALAAPTPTSNFINSNFNKRASVEDSAFGYASLNGGTTGGAGGTTTTVSSYAEFTAAVQGDDPKIVIVSGPIEETAEQVDVGSNTSILGADSSAVLTGFGLRLKEVENVIIRNLGIAKVLADNGDAIGAEYSNNIWIDHVDVSSDRDHDKDYYDGLLDFKRGSDYITVSNSFIHDHWKASLVGHSNSNEDEDSGKLHVTYANNYWYNLNSRAPSIRFGTGHIYNNYYETVSDGINTRIGAQVLVEGNVFVDSKKALYSTDEGYAVERNNDFGDAKNEALEGTLTSVEYEYDLLDTSEVKSAVVGTAGQTLTF

SEQ ID NO: 783 - protein, 321 aa, Neosartorya fischeri
MKFVATLIACGLSGLALAAPTATVDSLEKRGPNDAAFGYASLNGGTTGGAGGTTTTVSSYAAFTAAVSSDAKKVVYVSGPIKQSAKQVKVGSNTSIIGKDSTAVLEGFGLLVKEKSNVIIRNLGVKKVLAENGDAIGIQYSNNVWVDHVDVSSDRDHDKDYYDGLIDLTHAADYVTISNCYIHDHWKASLVGHSDNNGDEDTGHLRVTYANNYWSNINSRAPSLRFGTGHVYNSYFENVSDGINTRDGAQVLVESNQFVGSSKALYSTDAGYAVEKDNDFGGAKNTALKGTLTTVPYSYSLVGSSKVKSAVVGQAGQTLKF

SEQ ID NO: 784 - protein, 326 aa, Aspergillus flavus
MRVTAILTLATIAIASPTKVLNSRNELARRQATEGCSIGYCTQNGGTTGGAAGDTVTVTDLASLTEAAESETPLTIIVSGNIEGSAKIRVASDKTIYGETGSSITGVGFYIRQVSNVIMRNLKIGQVLADNGDAIGIDESTNVWVDHCDLSGDLSAGKDDLDGLLDITHAAEWVTVSNTYLHDHWKASLVGHSDSNADEDTGHLHITYANNYWYNINSRAPSIRFGTVHIINNYWDSLLGTGVNCRMDAQVLIQSSAFSNCPDEAIFFADSDYTGYAVVDDVDLGGSTNSVPEGTLTASSLPYDAIEALGSAQIAATIPETAGQKL

SEQ ID NO: 785 - protein, 326 aa, Aspergillus oryzae; identical to SEQ ID NO: 784

SEQ ID NO: 786 - protein, 325 aa, Aspergillus terreus
MRLPTLFMLAAIATASPMSDLNRREMTRRQAAESCPIGYCTQNGGTTGGTAGDTVTVTDLAGLTEAAENETPLTIIVSGAISGSAKIRVASDKTIYGETGSSITGVGFYIRRVSNVIMRNLKIGQVDADNGDAIGIDESTNVWVDHCDLSGDLSAGKDDLDGLLDITHGAEWITVSNTYFHDHWKGSLIGHSDSNEGEDLGHLHITYANNYWYNVNSRTPSIRFGTVHIINNYWDNLLLTGVNCRMDAQVLVQSSAFSNCPDEAIFFADSDYTGYAVVDDVDLGGSTNSVPEGTLTPSSLPYDAIEAIGSAQIATTIPGTAGQKL

SEQ ID NO: 787 - protein, 326 aa, Emericella nidulans
MRFTPLFLLAAVAIASPAPDLNARHELTRRQASESCPIGYCTQNGGTTGGAAGDTVTVTNLADLTEAAESDGPLTIIVSGSISGSAKIRVASDKTIFGESGSSITGIGFYIRRVSNVIMRNLKISKVDADNGDAIGIDASSNVWVDHCDLSGDLSGGKDDLDGLVDISHGAEWITVSNTYFHDHWKGSLIGHSDNNEDEDLGHLHVTYANNYWYNVYSRTPLIRFATVHIINNYWDSLIDTGVNCRMDAQVLIQSSAFHNCPDRAIFFADSDYTGYAVVDDVDLGGSSNSVPEGTLTPSSLPYAAITALGSGQVASVIPGTAGQKL

SEQ ID NO: 788 - protein, 420 aa, Neosartorya fumigata
MKLSAPLLVSLAAFSQAVTALVAFPGAEGFGANAIGGRNGQVYVVTNLNDSGTGSLRDAVSATDRIVVFAVGGVIKISDRIVVSKRVTILGQTAPGDGITVYGNGWSFSNADDAIVRYIRIRMGKGGSSGKDALGIAEGNRMIFDHVSVSWGRDETFSINGDASNITVQNSIIAQGLETHSCGGLMQTDGGVSLFRNLYIDNKTRNPKVKGVNEFTNNVVYNWGGGGGYIAGDSAGQSYANIIGNYFISGPSTSVTAFTRGNANFHGYVQNNYYDPDKDGQLDGFELGVSSSNYGGVAIMSSKYNYPAVAYTMSPAEAVTYVTKYAGASKVRDSVDTQLIAQVQSWGTEGGLISDEATMGGPGTLNGGTPAKDTDGDGIPDEAEKQLGTDPNTNDSMKLHSSGYTYLEVWANSLVPSTYH

SEQ ID NO: 789 - protein, 419 aa, Aspergillus flavus
MRLTPSLISCLSLLHFTSALVAFPGAEGFGANAVGGRQGEVYVVSNLNDSGEGSLRDAVSQPGRIVVFSVGGVIEITDRIVVSKQVTILGQTAPGDGITVYGNGWSFSNADDAIVRYIRIRMGKGGSSGKDAMGIADGKNMIFDHVSVSWGRDETFSINGDVSNVTIQNSIIAQGLETHSCGGLMQTDGGVSLFRNLYIDNKTRNPKVKGVNEFTNNVIYNWGGGGGYIAGGSDGESNVNVIGNYFISGPDTSVTAFTRGNENFHAYVETNYYDSDKDGTLNGSELGVDSTNYGGMDLVTEKYDYPAVASVLSPDDALTYVTKYAGASKVRDSVDTQLVAQVESYGKDGALISDEADMGGAGDLDQGTTPTDTDGDGIPDDAEAELGTDPNTADSMDLDTSGYTFLEVWANSLVPSSYA

SEQ ID NO: 790 - protein, 420 aa, Neosartorya fumigata
MKLSEPLLVSLAAFSQAVTALVAFPGAEGFGANAIGGRNGQVYVVTNLNDSGTGSLRDAVSATDRIVVFAVGGVIKISDRIVVSKRVTILGQTAPGDGITVYGNGWSFSNADDAIVRYIRIRMGKGGSSGKDALGIAEGNRMIFDHVSVSWGRDETFSINGDASNITVQNSIIAQGLETHSCGGLMQTDGGVSLFRNLYIDNKTRNPKVKGVNEFTNNVVYNWGGGGGYIAGDSAGQSYANIIGNYFISGPSTSVTAFTRGNANFHGYVQNNYYDPDKDGQLDGFELGVSSSNYGGMAIMSSKYNYPAVAYTMSPAEAVTYVTKYAGASKVRDSVDTQLIAQVQSWGTEGGLISDEATMGGPGTLNGGTPAKDTDGDGIPDEAEKQLGTDPNTNDSMKLHSSGYTYLEVWANSLVPSTYH

SEQ ID NO: 791 - protein, 419 aa, Aspergillus oryzae
MRLTPSLISCLSLLHFTSALVAFPGAEGFGANAVGGRQGVVYVVSNLNDSGEGSLRDAVSQPGRIVVFSVGGVIEITDRIVVSKQVTILGQTAPGDGITVYGNGWSFSNADDAIVRYIRIRMGKGGSSGKDAMGIADGKNMIFDHVSVSWGRDETFSINGDVSNVTIQNSIIAQGLETHSCGGLMQTDGGVSLFRNLYIDNKTRNPKVKGVNEFTNNVIYNWGGGGGYIAGGSDGESNVNVIGNYFISGLDTSVTAFTRGNENFHAYVETNYYDSDKDGTLNGSELGVDSTNYGGMDLVTEKYDYPAVASVLSPDDALTYVTKYAGASKVRDSVDTQLVAQVESYGKDGALISDEADMGGAGDLDQGTTPTDTDGDGIPDDAEAELGTDPNTADSMDLDTSGYTFLEVWANSLVPSSYA

SEQ ID NO: 792 - protein, 419 aa, Aspergillus terreus
MRLGIALFSLIGLCHSVSALIAFPGAEGFGANAVGGRQGEIYVVTNLNDSGEGSLRDAVSATDRIVVFAVGGVIEISDRIVVSKRVTILGQTAPGDGITVYGNGWSFSNADDAIVRYIRIRMGKVGDSGKDAITIAEGSTMIFDHVSVSWGRDETFSISGTASNITIQNTIIAQGLETHSCGGLIQTGGGVSLFRNLYIDNKTRNPKVKGVNDFTNNVVYNWGGGGGYIAGDSSGDSYANIIGNYFISGPSTSVTAFTRGNEYFHGYVETNYYDPDRDGTLNGNELGVSASNYGGMALVDTKYDYPAVEYQMTPGEAVNYVTGYVGASKVRDSVDTQLIAQVKSWGTKGELISDEASMGGPGDLDGGSPPTDSDGDGIPDDAETEIGSDPNTADSMELHSSGYTYVEMWANSLVPSSYH

SEQ ID NO: 793 - protein, 421 aa, Emericella nidulans
MQPLHTLLALLPLCRSTTALLAFPGAEGFGANAVGGRGGDVYVVTNLEDSGEGSLRDAVSETDRIVVFAVGGVINIEDRLVVSKRVTILGQTAPGDGITVYGNGWSFSNADDAIVRYIRVRMGRGGDSGKDGITIAEGSNMIFDHVSVSWGRDETFSISGTAENITVQDSIIAQGLETHSCGGLMQTDGGVSLFRNLYIDNKTRNPKVKGVNEFTNNVVYNWGGGGGYIAGDSSGQSFGNYFISGPSTSVTAFTRGNENFHGYVENNYYDPDQDGTLNGNELGVSSSNYGGMDIVDTKYDYPAAQYIMTPDEAVSYVTENVGASLVRDGVDSNLIDQVLSYGTDGALISDEDDFGGVGDLDGGETPTDTDGDGIPDDVETQLGTDPNIADSTEIDSSTGYSWLEVWANSLVPEGYASTRKC

SEQ ID NO: 794 - protein, 420 aa, Neosartorya fischeri
MKLSAPLLVSLAAFSQAVTALVAFPGAEGFGADAIGGRKGQVYVVTNLNDSGTGSLRDAVSATDRIVVFAVGGVIKISERIVVSKRVTILGQTAPGDGITVYGNGWSFSNADDAIVRYIRIRMGKGGSSGKDAMGIAEGNRMIFDHVSVSWGRDETFSINGDASNITVQNSIIAQGLETHSCGGLIQTDGGVSLFRNLYIDNKTRNPKVKGVNEFTNNVVYNWGGGGGYIAGDSDGQSYANIIGNYFISGPSTSVTAFTRGNANFHGYVDNNYYDPDKDGQLDGSELGVSSSNYGGMAIVSSKYNYPAVAYTMSPAEAVTYVTKYAGASKVRDSVDTQLIAQVQSWGTKGALISDEATMGGPGTLNGGTPAKDTDGDGIPDEAEKQLGTDPNTNDSMKLHSSGYTYLEVWANSLVPSTYH

SEQ ID NO: 795 - protein, 242 aa, Neosartorya fumigata
MYQKSLLFSLLASSALAAQFPIPDSKGSVTFDEPYEIAAGETYDGGYKTYGRGVSCTGQSEGGQDDTVFIVQEGGTLKNAIIGSDQIEGVYCLGACTIENVWWEAVCEDALSLKGGSGPYNIIGGGAQGADDKVIQHNSGGQVNIDGFTVYDFGKLYRSCGNCDEQYARTVTIKNVVANSGKTLVGINSNLGDTASIDSSTCATDVKKICVEYKGNDTGAEPEEISEGPSDACQYSEPLSSC

SEQ ID NO: 796 - protein, 242 aa, Neosartorya fumigata; identical to SEQ ID NO: 795

SEQ ID NO: 797 - protein, 253 aa, Aspergillus terreus
MHHKALLISLASTALALHGSSSHSHLGKRFTFPLPSSKGSVTFDAPKIISGNTTFDGGMKTYGRGVECTEGEGGDSDAVFWVENGGTLKNAIIGADQIEGVHCMGACTIENVWWEAVCEDALSLKEGSGPFTVIGGGAQGAEDKVIQHNSGGTVSIDGFTVYNFGKLYRSCGNCDEMFERHVTVSGVTAVQGSTLVGINSNYGDTATIKGDVCATDVDTICQEYEGNSSGEEPPETGSGPSSACKYSEPLPAC

SEQ ID NO: 798 - protein, 264 aa, Emericella nidulans
MFFKQLAVLSFATSALAAHGVRNPGTNSLNFNRIDKRFTFPIPESQGSQTFEATYTISGNETFDGGMKTYGRGVDCSGQAEGGDSDAVFIVKDGGTLKNAIIGADQIEGVHCEGSCTIENVWWEAVCEDALSLKTGDGPFTVIGGGAQNADDKVIQHNGGGTVSISGFTAYNFGKLYRSCGNCDEMYERHVTLESVTAVSGSASLVGINSNYGDTATIKSDTCVTDVDTVCTEYEGTDNNDEEPQEISTGPSNACQYTDPLPSC

SEQ ID NO: 799 - protein, 241 aa, Neosartorya fischeri
MYQKSLLFSLLATSALAQFPIPDSKGSVTFDAPYEVAAGKTYDGGYKTYGRGVSCSGQGEGGQDDAVFLIQEGGTLKNAIIGSDQIEGVYCLGACTIENVWWEAVCEDALSLKGGSGPYNIIGGGAQGADDKVIQHNSGGQVNIDGFTVYDFGKLYRSCGNCDEQHARTVTIRNVVANSGKTLVGINSNLGDTASIDSSTCATDVKKICVEYKGNNSGDEPEEVSEGPSDACQYSEPLSSC

SEQ ID NO: 800 - protein, 254 aa, Aspergillus clavatus
MLQSLLLLPLFLTSAFATPHDPTAHQALEKRATFPIPSSKGSVTLRSTQYVKGTFDGGMKTYGRGVECTGQKEGGEKDAVFVVEEGGILKNVIIGADQIKGVYCKGSCTIQNVWWKDVCEDALSLKGSGSGTYKIIGGGAQNADDKVIQHNSGGTVMIQGFTVSNFGKLYRSCGNCSKQYKRSVQISGVKAYNGKTLVGINSNYGDTASIDACASSVKDICVEYEGTNNNGKEPKKKSSGPSKACEYNQPLKKC

SEQ ID NO: 801 - protein, 254 aa, Neosartorya fumigata
MYQPLLLLPLLLTSAFATPHDPTTHQALEKRASFPIPSSKGSVTYSSPKTISGTFDGGLKTYGRGVKCTGQKEGGEKDAVFVLEDGATLKNAIIGADQIEGVYCKGSCTIQNVWWTDVCEDALSLKGTGSGTHRIIGGGARNADDKVIQHNSGGKVIIQDFTVQNFGKLYRACGNCSKQFKRTVEISGVKASSGKALVGINSNYGDTATISGCASSVKEICVEYEGTDNNKKEPAKKSSGPSNACKYKEPLASC

SEQ ID NO: 802 - protein, 257 aa, Aspergillus flavus
MYQKLLLVPLLLTSALASPHDASSHQKFHQLNERAAFPIPASKGSQTFKEPYYVKGTYDGGMKTFGRGVKCTGQKEGGDKDAVFIVADGGILRNAIIGADQIEGVHCEGSCTIENVWWQEVCEDALTFKGTGTGVHKVIGGGAQGADDKVIQHNSGGSAIIQDFTVQNFGKLYRSCGNCKKQFKRTVQISGVKASNGKTLVGINPNLGDSATIDGCASSVKEICVEYEGTDNNGKEPKKAHSGPSNTCKFKEPLASC

SEQ ID NO: 803 - protein, 254 aa, Neosartorya fumigata; identical to SEQ ID NO: 801

SEQ ID NO: 804 - protein, 257 aa, Aspergillus oryzae; identical to SEQ ID NO: 802

SEQ ID NO: 805 - protein, 254 aa, Emericella nidulans
MYQPLLLLPLLLTSAFANPHDPHIHHSLEKRASFPIPSSKGSVTFSSPKTISGTFDGGMKTYGRGVKCTGQDEGGDEDAVFILKDGATLKNAIIGADQIEGVHCEGSCTIENVWWTDVCEDALSLKGSGSGTHKIIGGGARNADDKVIQHNSGGKVIIQDFTVQNFGKLYRACGNCKKQFKRTVKISGVKASSGKALVGINSNYGDTASIKGCATSVKEICVEYEGTNNNSKEPKKKSSGPSSYCKYSEPLSKC

SEQ ID NO: 806 - protein, 254 aa, Neosartorya fischeri
MYQPLLLLPLLLTSAFATPHDPTTHQALDKRASFPIPSSKGSVTYSSPKSVSGTFDGGLKTYGRGVKCSGQKEGGDKDAVFILEDGATLKNAIIGADQIEGVHCKGSCTIQNVWWTDVCEDALSLKGSGSGTHRIIGGGARNADDKVIQHNSGGKVTIQDFTVQNFGKLYRACGNCSKQFKRTVEISGVKASSGKSLVGINSNYGDTATISGCASSVKEICVEYEGTDNNDKEPKKKGSGPSNACKYKEPLSKC

SEQ ID NO: 807 - protein, 234 aa, Neosartorya fumigata
MWSSIAAFPVLVPVALACLGYEGGVPTPTAHHSNSAVIEVAAGQVFDAGWAKYDRGSGACKGQSEGDWKDAVFYLHSGATLKNVIIGANQAEGVHCDGPCTLQFVWFEDVCEDAITIKNDKAGQETWIIGGGAYHASDKIVQHNGCGTVNIINFYAEDYGKVYRSCGNCDKQCKRNVYVEGTTARNGGEVVGINLNYGDTATLKNVCADSAHPCVFYDGCAGDCEPKKVGYCSG

SEQ ID NO: 808 - protein, 234 aa, Aspergillus flavus
MFSRIALLPAFLPVALACLGYEGGVPTPTAHYSNSAVIEIAAGEVFDAGWAKYDRGSGACGGQTEGDWKDAVFYLHSGATLKNVIIGADQSEGVHCDGACTLEFVWFEDVCEDAISIKNDKEGEETWIIGGGAYHADDKVVQHNGCGTVNIINFYAEDYGKVYRSCGNCSSQCKRNVYVEGTTARDGGEVVGINQSFGDTATLVNVCTDADHPCVLYDGCEGDCEPSKVGYCSG

SEQ ID NO: 809 - protein, 234 aa, Neosartorya fumigata
MWSSIAAFPVLVPVALACLGYEGGVPTPTAHHSNSAVIEVAAGQVFDAGWAKYDRGSGACKGQSEGDWKDAVFYLHSGATLKNVIIGANQAEGVHCDGPCTLQFVWFEDVCEDAITIKNDKAGQETWIIGGGAYHASDKIVQHNGCGTVNIINFYAEDYGKVPRSCGNCDKQCKRNVYVEGTTARNGGEVVGINLNYGDTATLKNVCADSAHPCVFYDGCAGDCEPKKVGYCSG

SEQ ID NO: 810 - protein, 234 aa, Aspergillus terreus
MRSTAAVLSILLPGALACLGYEGGVPKPTAHYSNSKVIEIAAGQVFDAGWAKYDRGSGACSGDSEGSWQDAVFYLHSGATLKNVIIGKDQAEGVHCDGPCNLEFVWFEDVCEDAITIKNDKAGQETWIVGGGAYHASDKIVQHNGCGTVNIINFYAEDYGKVYRSCGNCSSQCKRNVYVEGVTARDGGEVVGINSNYGDTATLKNVCTDASHPCVLYKGCAGGCEPSKVGYCSG

SEQ ID NO: 811 - protein, 233 aa, Emericella nidulans
MLSKLALASTLIPAALACLGYEGGVPTPTASYSNSAPIEIAAGQTFDAGWARYDRGSGACTDGEGGNDDAVFILRSGATLKNVIIGKNQKEGVHCEGPCTLEFVWFEDVCEDAITVRGDSAGDHTWIIGGGAYHASDKIVQHNGCGTVNIINFYAEDYGKVYRSCGNCSSQCKRNVYIEGVTAYDGGDICGINSNYGDTCTLNNVCTDADHPCVLYEGCAGGCEPEKVGYCSG

SEQ ID NO: 812 - protein, 234 aa, Neosartorya fischeri
MWSSIAALPVLVPVALACLGYEGGVPTPTAHYSNSAVIEVAAGQVFDAGWAKYDRGSGACNDQSEGDWKDAVFYLHSGATLKNVIIGANQAEGVHCDGPCTLQFVWFEDVCEDAITIKNDKAGQETWIIGGGAYHASDKIVQHNGCGTVNIINFYAEDYGKVYRSCGNCDNQCKRNVYVEGTTARDGGEVVGINLNYGDTATLKNVCADADHPCVFYDGCAGDCEPKKVGYCSG

SEQ ID NO: 813 - protein, 247 aa, Aspergillus terreus
MVQKSLLFSLLASTALGALTKRYSFPLPESQGSETFSEPYEVAAGETFDGGMKTYGRGVECTGQVEGGEDDTVFIVQEGGTLKNAIIGTDQIEGVYCLGSCTIENVWWEKVCEDALSLKEGDGIYTISGGGAQGAEDKVIQHNTGGEVIIDGFEVYDFGKLYRSCGTCGDIQRKVSVSNVVAVSGSQLVGINENFGDTATIDSSVCATDVNDICATYNGTDGDEEPEEVSTGPSDYCIYTEPIAECA

SEQ ID NO: 814 - protein, 257 aa, Emericella nidulans
MPVLSKLLPTLTLTLPLLAGPCLAAANPKLSKRFTFPIPSSTGSVTFSEPYEIAAGEIYDGELQTFGRGVECTGQDEGGESDTVFIVQEGGTLKNAIIGADQIEGVYCLGACTIENVWWEKVCEDALSLKEGSGPYVVTGGGAQGAEDKVIQHNSEGEVIVDGFTVYDFGKLYRSCGTCGDIQRSATITNVVAVSGSTIAGANGNFGDVVTIDSSNCATDVSAICTTYEADADGGEPEEVSTDVTEACVFEELPACE

SEQ ID NO: 815 - protein, 260 aa, Emericella nidulans
MFIKNGLLLSLATSVLATHGARSHSQAATSKLSKRFTFPIPNSEGSVTLDEVYEIDGETFDGGMKTYGRGVSCTGQDEGGDSDAVFIVKNGGTLKNVIIGSDQIEGVHCEGSCTIENVWWEAVCEDALSLKTGDGPFNVVGGGAQGADDKVIQHNGGGTVSISDFTVYDFGKLYRSCGNCGDQYERHVVIEGVTAVDGKYLVGINSNYGDTATIDSATCATDVKTICAEYKGTDNNDEEPEEVSDGPSDYCIYTEPLSEC

SEQ ID NO: 816 - protein, 324 aa, Neosartorya fumigata
MYLPSLVLGLLGFGLTASTSPIEERSNRSKAPAGCLTVGSSGTYATIGAALSALGSSTSDACIFIGAGTYQEQITIDYKGKLTMYGETTDTSSYKQNLVTITHSISSPEAGSLDKSATVNVRSDGFKMYNINVINGYGKGAQAVTLVANADKLGFYGCSFVGYQDTLYAKAGRQYYSNCYIEGAVDYIFGDASAWFGECDLVSVGPGYITAMSRTTADETTWYAIDHCNIYGKPGVDLTSAVYLGRPWRVLARVIFQNSQLSNIINPKGWSPMATGATPLYYEYNNKGAGADTSKREYESPISGAVSIATVLGGGWNSWVDTTY

SEQ ID NO: 817 - protein, 324 aa, Aspergillus flavus
MHGSLLKLALLSFSLASSAAVLPRDTGRTSAPSGCSTVGTSGDYSTIGDALTALGSSTADACIYIAAGTYEEQLVINYAGHLTLYGETTDTQTYKQNTVTITHTISSPEAGSLDNSATVNIKSDLVSVYNINIANGYGSGAQAVALVANADQLGFYACQFTGYQDTLYAKAGHQYYINSRIEGAVDYIFGDASAWFENCDIVSNGAGYITAMSRETTSDTAWYAIDHCNIKAASGVDLTGDVYLGRPWRVLARVIYQYSVLPDIINAKGWHSMADGATPLYYEFNNTGAGSDTSDREYLSTIDAPVAKETVLGDDYKNWVDSSY

SEQ ID NO: 818 - protein, 324 aa, Neosartorya fumigata; identical to SEQ ID NO: 816

SEQ ID NO: 819 - protein, 327 aa, Aspergillus niger
MHTPYLLGALAALAATAVGAPAEHIKKRESRTSAPSGCLTVGSDGTYSTIGDALDALGSSTSSACIYVASGTYEEQLTIDYAGNLTLYGETTDTSTYKDNVVTITHTISSSDAGSLDKSATVNVVSDGFSMYNINVENGYGEGAQAVALVGNADQLGFYGCQFSGYQDTLYVKAGTQYYSNCMIEGAVDYIFGDASVWFGECDIVSNGAGAITASSRETSSDSGWYAIDNCNIKAASGVSLTEEVYLGRPWRVLARVIYQNSVLSDIINPKGWTTMADGATPLYYEYNNSGAGSDTSDREYETSISAAVDKTTVLGETWGDWIDRSY

SEQ ID NO: 820 - protein, 324 aa, Aspergillus oryzae
MHGSLLKLALLSFSLGSSAAVLPRDTGRTSAPSGCSTVGTSGDYSTIGDALTALGSSTADACIYIAAGTYEEQLVINYAGHLTLYGETTDTQTYKQNTVTITHTISSPEAGSLDNSATVNIKSDLVSVYNINIANGYGSGAQAVALVANADQLGFYACQFTGYQDTLYAKAGHQYYINSRIEGAVDYIFGDASAWFENCDIVSNGAGYITAMSRETTSDTAWYAIDHCNIKAASGVDLTGDVYLGRPWRVLARVIYQYSVLPDIINAKGWHSMADGATPLYYEFNNTGAGSDTSDREYLSTIDAPVTKETVLGDDYKNWVDLSY

SEQ ID NO: 821 - protein, 325 aa, Emericella nidulans
MRVQSYLSLFSLVGAALCAPREHFKRTARTSAPAGCLTVGGSGTYSTIGAAFAALGSSSSEACIYISAGTYKEQLTFQYAGPLTLYGETTDTSSYKKNTVTITHTISSPEAGSLVASATVNAAMDNFTMYNINVVNGYGKGAQAVALAASGERQGYYGCQFLGYQDTLYARVGVQYYSNCYIEGAVDYIFGDASAWFGECDIVSNGAGYITAMSRETASDPAWYCFDHCNIYGKSGLDLTGDVYLGRPWRVLARVIYQNSELSDIINAAGWTTMAEGATPLYYEIGNTGDGADTSKRLYLSEISAAVTKATVLGSDWTDWLDWSY

SEQ ID NO: 822 - protein, 324 aa, Neosartorya fischeri
MHLPSLVLGLLGLGLTASASPIEERSNRSKAPDGCLTVGSSGKYSTIGAALDALGDSKSDACIFIGAGTYKEQITIDYKGKLTMYGETTDTSSYKKNQVTITHTISSPQAGTLDKSATVNVRSDGFKMYNINVINGYGKGSQAVALVANADKLGFYGCSFVGYQDTLYAKAGRQYYSNCYIEGATDYIFGNASAWFGECDIMSVGPGYITAMSRTTADQTTWYAIDNCNIYGKPGVDLTAKVYLGRPWRVLARVIYQNSQLSNIINPKGWTTMAEGATPLYYEYNNKGAGADTSKREYESSISGAVSMNTVLGSGWNSWIDTTY

SEQ ID NO: 823 - protein, 331 aa, Aspergillus aculeatus
MVKSVLASALFAVSALAASRTTAPSGAIVVAKSGGDYTTIGDAIDALSTSTTDTQTIFIEEGTYDEQVYLPAMTGKVIIYGQTENTDSYADNLVTITHAISYEDAGESDDLTATFRNKAVGSQVYNLNIANTCGQACHQALALSAWADQQGYYGCNFTGYQDTLLAQTGNQLYINSYIEGAVDFIFGQHARAWFQNVDIRVVEGPTSASITANGRSSETDTSYYVINKSTVAAKEGDDVAEGTYYLGRPWSEYARVVFQQTSMTNVINSLGWTEWSTSTPNTEYVTFGEYANTGAGSEGTRASFAEKLDAKLTITDILGSDYTSWVDTSYF

SEQ ID NO: 824 - protein, 331 aa, Aspergillus tubingensis
MVKSILASVLFAATALAASRMTAPSGAIVVAKSGGDYDTISAAVDALSTTSTETQTIFIEEGSYDEQVYIPALSGKLIVYGQTEDTTTYTSNLVNITHAIALADVDNDDETATLRNYAEGSAIYNLNIANTCGQACHQALAVSAYASEQGYYACQFTGYQDTLLAETGYQVYAGTYIEGAVDFIFGQHARAWFHECDIRVLEGPSSASITANGRSSESDDSYYVIHKSTVAAADGNDVSSGTYYLGRPWSQYARVCFQKTSMTDVINHLGWTEWSTSTPNTENVTFVEYGNTGTGAEGPRANFSSELTEPITISWLLGSDWEDWVDTSYIN

SEQ ID NO: 825 - protein, 614 aa, Aspergillus ficuum
MKGTAASALLVALSATAAQARPVVDERFPYTGPAVPIGDWVDPTINGNGKGFPRLVEPPAVKPATANPRNNVNVISLSYIPKGMHIHYQTPFGLGQLPAVRWGKDPRNLNSTAQGYSHTYDRTPSCSQVKAVTQCSQFFHEVSIDGLEPDTTYYYQIPAANGTTQSEVLSFKTSRPAGHPGSFSVAVLNDMGYTNAHGTHKQLVKAATEGTAFAWHGGDLSYADDWYSGILACADDWPVCYNGTSSTLPGGGPLPEEYKKPLPAGEIPDQGGPQGGDMSVLYESNWDLWQQWLNNVTLKIPYMVLPGNHEASCAEFDGPHNILTAYLNDDIANGTAPTDNLTYYSCPPSQRNFTAYQHRFRMPGPETGGVGNFWYSFDYGLAHFVSIDGETDFANSPEWNFAEDVTGNETLPSESETFITDSGPFGNVNGSVHETKSYEQWHWLQQDLAKVDRSKTPWVIVMSHRPMYSSAYSSYQLHVREAFEGLLLKYGVDAYLSGHIHWYERLYPLGANGTIDTAAIVNNNTYYAHNGKSITHIINGMAGNIESHSEFSDGEGLTNITALLDKVHYGFSKLTIFNETALKWELIRGDDGTVGDSLTLLKPSHVAGGKKLHS

SEQ ID NO: 826 - protein, 527 aa, Aspergillus aculeatus
MLKASLLSFVAFTAQVAHAAFGITTSSSAYVIDTNAPNQLKFTVSRSSCDITSIIHYGTELQYSSQGSHIGSGLGSATVTATQSGDYIKVTCVTDTLTQYMVVHNGDPIIHMATYITAEPSIGELRFIARLNSDLLPNEEPFGDVSTTADGTAIEGSDVFLVGSETRSKFYSSERFIDDQRHCIAGDAHRVCMILNQYESSSGGPFHRDINSNNGGSYNALYWYMNSGHVQTESYRMGLHGPYSMYFSRSGTPSTSIDTSFFADLDIKGYVAASGRGKVAGTASGADSSMDWVVHWYNDAAQYWTYTSSSGSFTSPAMKPGTYTMVYYQGEYAVATSSVTVSAGSTTTKNISGSVKTGTTIFKIGEWDGQPTGFRNAANQLRMHPSDSRMSSWGPLTYTVGSSALTDFPMAVFKSVNNPVTIKFTATSAQTGAATLRIGTTLSFAGGRPQATINSYTGSAPAAPTNLDSRGVTRGAYRGLGEVYDVSIPSGTIVAGTNTITINVISGSSGDTYLSPNFIFDCVELFQ

SEQ ID NO: 827 - protein, 528 aa, Aspergillus clavatus
MFFQTGLLLSLSLWTKVAYAAFGITTSSSSYVIDAGSANPLKFTVSRSSCDITSINYSGTELQYASKGSHISSGLGRATVSATQDGDYIKVTCATSTLTHYMVVHHGDSTIHMATHITAEPSIGELRFIARLKSDVLPNEEPFGDVSTTAGGTAIEGSDVFLVNGKTRSKFYSSQRFIDDQRHCISGSAHRVCMILNQYESSSGGPFHRDIDANNGGGFNALYWYMNSGHVQTEPYRMGLHGPYSMVFSRSGMPGTNIDTSFFANLNIKGYVPASGRGTVTGKASGADSRMKWVVHWHNTAAQYWTYTASDGSFTSPAMKPGTYTMVYYQGEYKVAETSVTVRAGSKITKNISGSVKTGKTIFKIGEWDGQPTGFRNADKQLRMHPSDSRMAAWGPLTYTVGRSAPSDFPMAVFKSVNNPVTIKFTASAAQTAAATLRIGTTLSFAGGRPQAKINSYTAAAPPAPKNLDSRGVTRGAYRGLGEVYDVAIPAGTIVAGVNTITISVVSGNSGEKFLSPNFVFDCVELFQ

SEQ ID NO: 828 - protein, 528 aa, Neosartorya fumigata
MLSKATLLLFLPSWARVTYAAFGITTTSSSYVIDANSPNPLKFTVNRSNCDITSINFYGAELQYQGTGSHIGSGLGSASVSATQSGDYIKVTCSTSTLTHYFVVHNGDPIIHMATYITAEPSIGELRFIARLNNELLPNEEPFGEVSNTSGGTAIEGSDVFLVNGQTRSKFYSSERFIDDHRHCVSGSAHRVCMILNQYESSSGGPFHRDINTNNGGQYNALYWYMNSGHVQTEANRMGLHGPYSMYFSRSGTPGTNIDTSFFANLDIQGYVPDSARGKVSGKASGADSTFKWVVHWYNDEAQYWTYTASDGSFTSPAMKPGTYTMVYYQGEYKVASTSVSVSAGSTTTKNISGSVTTGKTIFKIGEWDGQPTGFRNAANQLRMHPSDSRMSSWGPLTYTVGSSSLSDFPMAIFKSVNSPVTIKFTASSSQTGAATLRIGTTLSFAGGRPQVTVNSWTGPIPSAPKDLNSRGVTRGAYRGLGEVYDVAIPAGTIVAGTNTITISVVSGSSGDAFLSPNFIFDCVELFQ

SEQ ID NO: 829 - protein, 528 aa, Aspergillus flavus
MLSRTILFSTSFLWVRVANAAFGITTSDDSYVIDAGSANSLKFTVSRSSCDITSINYYGSELQYSGTGSHIGSGLGSADVSAVEDGDYIKVTCDTDTLTQYFVVHNGDSVIHMATYTTEEPSVGELRFIARLNSELLPNEEPFGDVSTTSGGEAIEGSDVFLVDGETRSKFYSSQRFIDDQRHCVAGDAHRVCMILNQYETSSGGPFFRDINSNNGGSYNSLYWYMNSGHVQTEDRRQGLHGPYSMYFSRSGTPSTDIDTSFFANLDIKGYVAADGRGTVSGTASGADSSFKWVVHWYNADAQYWTYTSSDGSFTSPAMKPGDYTMVYYQGEYKVAETSVSVTAGSSTSKDISGFVETGDTIFKIGDWDGTPTGFRNAENQLRMHPSDSRMSSWGPLTYTVGSSELTDFPMAAFKGVNDPVTIKFTATSAQTGAATLRIGTTLSFAGGRPQATINDYEGSAPSAPTNLNSRGVTRGAYRGLGEVYDVNIPSGTIVEGENTITISVISGSSGDEFLAPNFIFDCVELFQ

SEQ ID NO: 830 - protein, 528 aa, Neosartorya fumigata; identical to SEQ ID NO: 828

SEQ ID NO: 831 - protein, 531 aa, Aspergillus niger
MLSKTSLLSLLSLAAGVVNADFGITTNDDSYVINANSPNSLVFTVDRGSCDITSIVHYGTELQYSGKGSHIGSGLGTATVSATKSGDYIKVTCETDTLTQYMVVHDGDPIIHMATYITEEPSIGELRFIARLNSDVLPNEEPFGDVSNTADGEAIEGSDVFLVDGETRSKFYSSQRFIDDQRHCIAGDEHRVCMILNQYETSSGGPFHRDINSNNGGDYNSLYWYMNSGHVQLESYRMGLHGPYSMYFSRSGTPSTDIDTSFFADLDIEGYVAESGRGTVSGTASGADSSFDWVVHWYNDDAQYWTYTSSSGSFTSPAMKPGTYTMVYYQGEYVVATSEVTVSAGSSTSKDISGSVETGTTIFKIGDWDGQPTGFRNAENQLRMHPSDSRMSDWGPLTYTVGSSSLTDFPMAIFKSVNSPVTIKFTATSDQTGAATLRIGTTLSFAGGRPQATINDYEGSAPSAPTNLDSRGVTRGAYRGYGDVYDVSVPEGTIVEGENTITISVISGSSGDDFLSPNFLDAVFIIALVDN

SEQ ID NO: 832 - protein, 499 aa, Aspergillus niger
MLSKTSLLSLLSLAAGVVNADFGITTSDSYVINANSPNSLVFTVDRGSCDITSIVHYGTELQYSGKGSHIGSGLGTATVSATKSGDYIKVTCETDTLTQYMGVHDGDRIIHMATYITEEPSIGELRFIARLNSDVLPNEEPFGDVSNTADGEPIEGSDVFLVDGETRSKFYSSQRFIDDQRHCIAGDEHRVCMILNQYETSSGGPFHRDINSNNGGDYNSLYWYMNSGHVQLESYRMGLHGPYSMYFSRSGTPSTDIDTSFFADLDIEGYVAESGRGTVSGTASGADSSFDWVVHWYNDDAQYWTYTSSSGSFTSPAMKPGTYTMVYYQGEYVVATSEVTVSAGSSTSKDISGSVETGTTIFKIGDWDGQPTGFRNAENQLRMHPSDSRMSDWGPLTYTVGSSSLTDFPMAIFKSVNSPVTIKFTATSDQTGAATLRIRTTLSFAGGRPQATINDYEGSAPSAPTNLDSRGVTRGAYRGYGDVYDVSVPEGTIVEGENT

SEQ ID NO: 833 - protein, 528 aa, Aspergillus oryzae
MLSRTILFSTSFLWVRVANAAFGITTSDDSYVIDAGSANPLKFTVSRSSCDITSINYYGSELQYSGTGSHIGSGLGSADVSAVEDGDYIKVTCDTDTLTQYFVVHNGDSVIHMATYTTEEPSVGELRFIARLNSELLPNEEPFGDVSTTSGGEAIEGSDVFLVDGETRSKFYSSQRFIDDQRHCVAGDAHRVCMILNQYETSSGGPFFRDINSNNGGSYNSLYWYMNSGHVQTEDRRQGLHGPYSMYFSRSGTPSTDIDTSFFANLDIKGYVATDGRGTVSGTASGADSSFKWVVHWYNADAQYWTYTSSDGSFTSPAMKPGDYTMVYYQGEYKVAETSVSVTVGSSTSKDISGSVETGDTIFKIGDWDGTPTGFRNAENQLRMHPSDSRMSSWGPLTYTVGSSELTDFPMAAFKGVNDPVTIKFTATSAQTGAATLRIGTTLSFAGGRPQATINDYEGSAPSAPTNLNSRGVTRGAYRGLGEVYDVNIPSGTIVEGENTITISVISGSSGDEFLAPNFIFDCVELFQ

SEQ ID NO: 834 - protein, 531 aa, Aspergillus terreus
MLSKALFFSSLPLWAKVASAAFGITTTDSSYTIDAGSPNPLKFTVSRSSCDITSINYYGSELQYQSKGSHIGSGLGSASVSAVQNGDYIKVTCDTDTLTHYFVVHSGDPIIHMATYITAEPSIGELRFIARLNSNLLPNEEPFGDVSTTAGGSAIEGSDVFLVNGQTRSKFYSSQRFIDDQRHCISGSAHRVCMILNQYESSSGGPFHRDINSNNGGDYNSLYWYMNSGHVQTESYRMGLHGPYSMYFSRSGTPGTNIDTSFFANLDIKGYVPASGRGTVTGKASGADSNFKWVVHWYNDAAQYWTYTASDGSFTSPAMKPGTYTMAYYQGEYRVAETSVTVSAGSSTTKNISGSVKTGTTIFKIGDWDGQPTGFLNADKQLRMHPSDSRMSSWGPVTYTVGSSSVGSFPMALFKSVNSPVTIKFTATSAQTGAATLRIGTTLSFAGGRPQATINSYTGPTPSAPTNLNSRGVTRGAYRGLGEVYDVSIPAGTIVAGTNTITINVISGSSGDDFLSPNFVSAYPFLTLMRC

SEQ ID NO: 835 - protein, 527 aa, Emericella nidulans
MLSKTFLLSSAVLWARVANAAFGITDNGSSYTIDANSPNPLKFTVNKSSCDITSIVYYGSEFQYSGKGSHIGSGLGSATVSATQSGDYIKVTCDTSSLTHYFVVHNGDPIIHMATYITAEPDIGELRFIARLNSNLLPNEEPFGDVSTTSGGSAIEGSDVFLVNGETRSKFYSSERFIDDHRHCISGSAHRVCMILNQYESSSGGPFFRDINSNNGGDYNALYWYMNSGHVQTESFRTGLHGPYSMYFSRSGTPSTNIDTSFFASLGIKGYVAANGRGTVTGKASGADSSMDWVVHWYNNDAQYWTYTASDGSFTSPAMKPGTYTMKYYQGEFPVAETTVTVSAGSSTTKNISGSVKTGTTIFKIGEWDGQPTGFRNADKQLRMHPSDSRMDSWSSTYTVGSSSLSDFPMAVFKSVNNPVTIKFTATSAQTGAATLRIGTTLSFAGGRPQATINSYTGPAPSAPTNLNSRGVTRGAYRGLGEVYDVSVPAGTIVTGENTITISVISGSSGDAFLSPNVVFDCIELFQ

SEQ ID NO: 836 - protein, 528 aa, Neosartorya fischeri
MLSKATLLLSLPFWARVANAAFGITTTSSSYVIDANSASPLKFTVNRSNCDITSINFYGAELQYQGTGSHIGSGLGSASVSATQSGDYIKVTCSTSTLTHYFVVHNGDPIIHMATHITAEPSIGELRFIARLNNELLPNEEPFGQVSNTAGGTAIEGSDVYLVNGQTRSKFYSSERFIDDHRHCVSGSAHRVCMILNQYESSSGGPFHRDINTNNGGQYNALYWYMNSGHAQTEANRMGLHGPYSMYFSRSGTPGTNIDTSFFANLDIKGYVPANARGKVSGKASGADSTFKWVVHWYNDEAQYWTYTASDGSFTSPAMKPGTYTMVYYQGEYKVASTSVSVSAGSTTTKNISGSVTTGKTIFKIGEWDGQPTGFRNAANQLRMHPSDSRMASWGPLTYTVGSSSLSDFPMAIFKSTNSPVTIKFTASSSQTGAATLRIGTTLSFAGGRPQAKVNSFTGPVPSAPKDLNSRGVTRGAYRGFGEVYDVAIPAGTIVAGTNTITISVVSGSSGDTFLSPNFIFDCVELFQ

SEQ ID NO: 837 - protein, 658 aa, Neosartorya fumigata
MRFAIPLGAACAWAGVALAALQIAEDFSSITLNNDRFKAVWSKSKGSVVDMFLDGQDLLGPQSGSTGIGPYLDCYCVPSGFYTAGATNPRMQYVEGTDSTGTKYAGVILNDTYTPTGQQFQQYWFLRDGETGLHMFSRLAYYNETTPFLRNLQEFRTLFRPNTQLWTHLTSSELQTAPLPSKNAVSKQVVVQDATWRFNNTPDDAYYTQFSEYFTKYTFSNQWRDNDVHGLYGDGTNSNGSTYGAWLVMNTKGPLHSDLTVDGIVYNYIVSNHHGEGTPNITNGFDRTFGPQFYLFNGGKGSTSSLQDLRSEAAKLADPSWNAEFYDSIAKHVVGYVPSSKRGSVDGRIKLPKGASNPIAILTVDGQYFQDNSVVPSSYQYWTDIDTSGRFRIDRVVEGKYRLTVYADGIFGDFVRDGVTVRAGKTTTVKEKWDAESAGKEIWRLGTPDKSSGEFRHGVARDPTHPLHPPEYLIYWGAYDWQSDFPKGIDYTIGSSDPATDFNTVHWSVFGPTPDNPNVEYNTTHDWKINFSLTKKQLRNSKKATLTIQLAGAKTASGNTDEYKASEPYINLIHESYINDQKEPLSFVIGFNQSSSCIVRSAVSCYQVRSRMEFPADWLKVGENTLTLHLPYNATDTETAILPATVYVQYDALRLELD

SEQ ID NO: 838 - protein, 663 aa, Aspergillus flavus
MRLRTSLGVASACASVASAALKVTEDNSTITLANDRLTSTFAKDKGRVSELFLDGQDLLGPISGNTGVGPYLDCYCIPSGFYTAGSTDPRLEVVQGTDSTGTKYAGVILNDTYTPTGQQFQQYWFLRDGETGLHTFSRLAYYNETTPFLRNLQEFRTLFRPNTELWTHLTSSEAQTAPLPSKEAIANEVVVQDATWRFNNTPNDAYYTQFSEYFTKYTFSNLWRDNSVHGLYADGTNSNGTTYGAWLVMNTKDTYYGGPLHSDLTVDGIVYNYLVSNHHGEGTPNITNGFDRTFGPQYYLFNGGKGSKSSLEDLRSEAETLADPGWNADFYDSIAKHVIGYAPSSKRGSVQGQVKLPKGSTRPIAILTVDGQYFQDNSVEASSHQYWAEMGQDGTFQLDHVKEGKYRLTVFADGIFGDFVHDGVEVQAGKVTKVQETWEQESAGVEVWRLGTPDKSSGEFLHGDAPDPTHPLHPPQHFIYWGAYDWQQDFPNGVNYTIGSSDPAVDFNTVHWSVYGPTPANPDVEYDTTHDWTINFSLDKKQLQQRKTATLTIQLAGAKTAAGNTDVYNATEPYANLALESYINEQKEPLTLLVGFNQSSSCIVRSAVSCYQVRSRMEFPADWLNVGNNVLTLHLPRNATDYETAVLPGTVYVQYDALRLELA

SEQ ID NO: 839 - protein, 658 aa, Neosartorya fumigata; identical to SEQ ID NO: 837

SEQ ID NO: 840 - protein, 706 aa, Aspergillus niger
MRLLHPLIPASLLLTLTSATLHTSQTNTTITLTNNRLTANFSKSQGRITDLYLDNQDLLGPQSGDTGVGPYLDCYCIPSGFYTPGSTSPTLQLFTGTDKSGTSYAGVLMDETYPPTGQHFQQYWFLRDGETGLHTFSRLAYYNETTPYLRNLQEFRTLFRPNTELWTHLSSSEVQTAPLPSKKAVEEEVVVQDATWTFNNTPTDEYYVQFADYFTKYTFSNAWRDNSVHGMYADGSTSNGSTFGAWLVMNTKDTYYGGPLHSDLTVDGIVYNYLVSNHHGEGTPNITYGFDRTFGPQYYHFNGGKGSTASLQELKSDAETLADPSWNVDFYDSIAKHVVGYTPSSQRGSVQGKIKLPKGATRPIAVLTVDGQYFQDNSVNSSSYQYWAEIDDSGHFSVDHVKEGPYRLTVYADGIFGDFVRDGVQVKAGKKTTIQETWEAESAGTEIWRLGTPDKSSGEFRHGVARDPTHPLHPPEYLIYWGAYDWQSDFPDGINYTIGTSDPATDLNTVHWSVFGPTPNDPRVEYDTTHDWTINFPLSEDDLAERSKATLTIQLAGAKAASGNTDVYNASEPYTNLALESYINDQAEPLTLLIGFNQSSSCIVRSAVSCYQVRSRMEFPADWLKVGNNVLTLHLPYNATDTETAILPATVTGRLILPPQPIYGQTPVILSVIGSEKLEPLPAASILIFEIIRHQSEPLWSVPRSA

SEQ ID NO: 841 - protein, 238 aa, Aspergillus oryzae
MRLRTSLGVASACASVASAALKVTEDNSTITLANDRLTSTFAKDKGRVSELFLDGQDLLGPISGNTGVGPYLDCYCIPSGFYTAGSTDPRLEVVQGTDSTGTKYAGVILNDTYTPTGQQFQQYWFLRDGETGLHTFSRLAYYNETTPFLRNLQEFRTLFRPNTELWTHLTSSEAQTAPLPSKEAIANEVVVQDATWRFNNTPNDAYYTQFSEYFTKYTFSNCMGLFKTYWYAASANLQ

SEQ ID NO: 842 - protein, 660 aa, Aspergillus terreus
MRLSVSLGLASLWTAIGATALNVSQTNSSITLANDRLTAIFSNAGKVVDLYLDGQDLLGPASGSTGVGPYLDCYCTPKGFYTAGSTTPRMEVVQGTDATGTQYAGVILNDTYTPTGQQFQQYWFLRDGETGLHMFSRLAYYNETTPFLRNLQEFRTLFRPNTDLWTHLTSSELQTAPLPSDEAVGKQVVVQDATWRFNNTPNDAYYTQFSEYFTKYTFSNAWRDNNVHGLYADGSTSNGTTFGAWLVMNTKDTYYGGPLHSDLTVDGIVYNYIVSNHHGEGTPNITNGFDRTFGPQFYLFNGGGSSSLNELRSEAESLADPSWNVEFYDSIAKHVVGYVPSSKRGSVQGQIKLPRGATRPIAILTVDGQYFQDNSVDPRSYQYWVEMDANGKFQLDHVVEGKYRLTVYADGIFGDYVRDGVQVRGRKTTRINDSWQPESAGVEVWRLGTPDKSSGEFLHGVARDPTHPLHPPEYLIYWGAYDWQQDFPNGVNYTIGSSDPATDFNTVHWSVFGPTPDNPDVEYDTTHDWAINFSLTKKQLQKRKTATLTIQLAGAKTASGNTDVYKPDEPYTNLALESYINQQEEPLTMLIGFNQSSSCIVRSAVSCYQVRSRMTFPADWLQVGSNTLTLHLPRNATDVEDAILPGTVYVQYDALRLELS

SEQ ID NO: 843 - protein, 660 aa, Emericella nidulans
MRLGVCFSLAAAASVARAALTATENDTSIVLENDRLRATFDKGRGSIIDLYLDGQDFLGPQSGSTGIGPYLDCYCTPSGFYTAGSTNPVTELVQGTDSTGTKYAGIILNDTYTPTGQEFQQYWFLRDGETGFHMFSRLAYYNETTPFLRNLQELRTLFRPNTDLWTHLTSSDLQTAPLPSDEAIAEQIVVQDATWRLNNTPDDAYYQQFSEYFTKYTFSNHWRDNDVHGLYADGSTSDGTTYGAWLVMNTKDTYYGGPLHSDLTVDGIIYNYIVSNHHGEGTPNITNGFDRTFGPQFYLFNGGGSSSLEELRDEARSLASPSWNADFYDSIAKHVIGYVPSSQRGSVKGTIKLPKNAKSPIAVLTVDGHYFQDNSAVPSSHQYWADIDKNGRFSIDRVVAGKYRLTVYADGIFGDFTRDGIVVKARKSTSIKETWKPESAGTEIWRLGTPDKSSGEFRHGAARDPTHPRHPPEYLIYWGAYDWQSDFPGGIDYMIGESDPATDFNTVHWAVFGPTPDNPVAESNTTHDWRIRFDLSAKQLHARKTATLTIQLAGAKAASGNTDVYNASEPYANLPLRSYINEQEEPLTMVIGYDQSSSCIVRSAVSCYQVREKWEFPASWLKEGSNLLRLSLPTNGTNYESAVLPTSVYVQYDALRLELK

SEQ ID NO: 844 - protein, 658 aa, Neosartorya fischeri
MRFAIPLGAACAWAGVALAALQIAEDDSTITLNNDRFKAVWSKSKGSVVDMFLDGQDLLGPQSGSTGIGPYLDCYCVPSGFYTAGATNPRMQYVEGTDSTGTNYAGVILNDTYTPTGQQFQQYWFLRDGETGLHMFSRLAYYNETTPFLRNLQEFRTLFRPNTQLWTHLTSSELQTAPLPSKNAVSKQVVVQDATWRFNNTPDDAYYTQFSEYFTKYTFSNQWRDNDVHGLYGDGTNSNGSTYGAWLVMNTKGPLHSDLTVDGIVYNYIVSNHHGEGTPNITNGFDRTFGPQFYLFNGGKGSTSSLQDLRSEAAKLADPSWNAEFYDSIAKHVVGYVPSSKRGSVDGRVKLPKGATNPIAILTVDGQYFQDNSVVPSSYQYWTDIDTSGKFRIDRVVEGKYRLTVYADGIFGDFVRDGVTVKAGKTTTVKEKWDAESAGKEVWRLGTPDKSSGEFRHGVARDPTHPLHPPEYLIYWGAYDWQSDLPKGIDYRIGSSDPATDFNTVHWSVFGPTPDNPDVEYNTTHDWKINFSLTKKQLRNSKKATLTIQLAGAKTASGNTDVYNASEPYINLSHESYINDQKEPLSFVIGFNQSSSCIVRSAVSCYQVRSRMEFPADWLKVGENTLTLHLPYNATDTETAILPATVYVQYDALRLELD

SEQ ID NO: 845 - protein, 695 aa, Aspergillus oryzae
MFLPSRKALAFLACLASHSVALLTTSENSTHFNLANDRFSIALAKSNGHIVDVQLDGQDLLGPVDGNAGKGPYLDCSCIPSGFWTPGSGAHLELINGTDSTGTAYGGLYMSATYAGTNQTLSQWFFLRGEETGLHAFSRVTYFNETTPSLRSLGELRTLFRPSTDLWTHFSTSDGNYGPKPLGSNSGLVVQDATTYIGNVTDDPYVSQYSDYFTKYTLAESWRNHDVHGLFSDGSSSSDGSTFGAWLVHNTVETYYGGPLHSDLVVDGIVYNYLVSGHHGAPTPNLTHGFDRTWGPQFYYFNRGDSETTLADLRADAAKYADPEWNAEFYDSIADHIPNFTPSTGRTTFKGKVSLPKGAKRPIIVLSEDGQDFQLNVFNTESLQYWAEIDKSGSFSIPRVVEGTYRITIYADEIFGWFIQDHVKVLKSQSKDYSFTWKEESAGKEIWRIGIPDKSSGEYLHGYAPDTSKPLQPEQHRIYWGKYDYPADFPEGINFHVGKSDPSQDLNYIHWAFFPSQGNHLRTEPYYDNVNNWTVTFDLTADQLHNTNTATFTVQIAGAKTANGNAKWTPVEGKYSNLPWTVNVNGRYESTWVIPYWRSGSCGVRSAVSCQNIEQKFAFPSKNLQEGKNEFVLSLPFNASSTETALLPDALYVQARVMGSRLDPARPAPNPLVNSNLGFGRDNPIMEFSNNRIIT

SEQ ID NO: 846 - protein, 1041 aa, Emericella nidulans
MFASTLRKTFVFLGLATYSAAALTTTSNSTHYTISNSRFSVAVAKSNGHVVDANLDGQDLLGPLSGNSGKGPYLDCSCTPEGFWTPGAEPALVNGTDSTGTPYVGVIMTDTYETTNQTLSQYLFLRGEETGLHAFSRVTYYNESDYFLRGLGELRTLFRPNTNLWTHFSGSEGNYGPMPLSSTEKITVQDATTYLGDTTDDPYVSQYSDYFTKYTLTESWRDHDVHGHFSNGSTSGDGNTYGAWLVHNTRETYYGGPLHADLVVDGIVYNYIVSGHYGAPNPNLTHGFDRTFGPQYYHFNSGGPGTTLEELRADAAQYASPEWNAEFYDSIAKHIPNYVPSTGRTTFRGKVNLPKGAKKPIIVLSENEQDFQLNVFKKDSLQYWAEIDGSGAFTIPRVVKGTYRVTIYADEIFGWFIKDNVKVIGSNAHTFTWKEETAGKEIWRIGVPDKSSGEFLHGYAPDTSKPLQPEQYRIYWGKYDYPSDFPEGVNYHVGKSDPAKDLNYIHWSFFPSQGNHLRNEPYYQNVNNWTITFDLTASQLRNTKTATFTVQLAGTRNANGNSKWNPDPAKYNNLPWTVNVNGIYEDTWEIPYWRSGSCGVRSGVQCQNTEHKFVFDAGKLRKGRNEFVLSLPFNATSVETALLPNSLYVQVVSMEAVSVSNDMRVLVQAFMPLVTWGTAVEKRVLLTGIVSVSAMAKEDYPMISRPCPRKGGTRRRKKERKKEGKKQGRTVLDALLQRSEQDSFWSRFCRSPIESVAQYVYGQGSTALRKKTTDNLVRVVCVSDTHNTKPNLPDGDILIHAGDLTESGTKEELEKQIYWLDSQPHRYKIVIAGNHETFLDRNYHSHHGNERVTMDWKSLIYLENTSAILDLGAGHQLKVFGSPYTPKHGNGAFQYPRTDTTTWEEIPKDTDLLVTHGPPKAHLDLGHLGCRVLRQALWEMESRPLLHVFGHIHGGYGKEVVCWDLCQRAYEAIMDGESRWWNLCVLFYCWILRLFFDWTADGRATVLVNAATVGGVRDLKRREAICVDIQAGSKRFLSGCT

SEQ ID NO: 847 - protein, 437 aa, Aspergillus flavus
MKLSGSSALLLLGFGLLGHASPLVHVQGKNCTVKPLGHGQDDVPNILHAVEKCGQTPGGRISLPAPYTYRINQRMTTHLESSTLEVGGMLLFSDDITYWVNNSYRIDFQNQSTAWRITGHDYVVDGGPERGGIDGNGQLWYTWAKGGSNVFGRPMPLHVLNSTRAVLRNIAIRQPQFWAVLVESSSHVELDNFYVNATNSDPNATEDTVWIQNTDGIDTYRSDHVTITNWVYEGGDDAVAFKPNSTNIHVENVTVYGGPGIAFGSLGQYPDRYDIVENITVKNANFQPSSQRAMNSGIYFKSWIGVNFGVPPNGGGNGHGYVRNVTVEDITFKDVQLPIYIDTCLSYLFDQNVTQYCDTSTFRFDDLHFRNISGNGLATPTNYTGRNITFAVSMICSKEAPCTDITFEDVDIKLPESYSGKSVLCENAGVQGLECNS

SEQ ID NO: 848 - protein, 438 aa, Aspergillus niger
MRMPSAISIGVIAGLSVAASAVPSLQKNGTTCTVIPLGNGQDDVPNILSAVDECGQTSGGRVVLPAPYTYRINQRMTTHLTDSRLEIGGTLLFSDDIDYWVNNSYRVDFQNQSSAWRITGHDYVVDGGPRQGGVDGNGQLWYTWAKGGSNVFGRPMPVHVFESTRATLRNLAIRQPQFWAVLVDSSSHINLDNFYVNATNHDSSVSPEGEWVQNTDGIDTYRSDHITVTNWVYQGGDDAVAFKGNSTNIHVENVTVYGGPGIAFGSLGQYPDRTDIVENVTVRNVRVQPSFQRAMNSGVYFKSWIGVNYGVPPNGGGGGHGYVRNVSVENLRLKDVQLPVYIDTCLSYLFSENITQYCDTSTYEFEDLHFRNISGNGLATVTDYPGKNISFAVALLCSEKAPCTDLTFQDISITLPGNYTGKHVLCENAEAEGLPCNS

SEQ ID NO: 849 - protein, 438 aa, Aspergillus niger
MRMPSAISIGVFAGLSLAASAVPSLRKNGTTCTVIPLGNGQDDVPNILSAVDECGQTSGGRVVLPAPYTYRINQRMTTHLTDSRLEIGGTLLFSDDIDYWVNNSYRVDFQNQSSAWRITGHDYVVDGGPHRGGVDGNGQLWYTWAKGGSNVFGRPMPVHVFESTRATLRNLAIRQPQFWAVLVDSSSHINLDNFYVNATNHDSSVSPEGEWVQNTDGIDTYRSDHITITNWVYQGGDDAVAFKGNSTNIHVENVTVYGGPGIAFGSLGQYPDRTDIVENVTVRNVRVQPSFQRAMNSGVYFKSWIGVNYGVPPNGGGGGHGYVRNVSVENLRLKDVQLPVYIDTCLSYLFSENITQYCDTSTYEFEDLHFRNISGNGLATVTDYPGKNISFAVALLCSEKAPCTDLTFQDISITLPGNYTGKHVLCENAEVEGLPCNS

SEQ ID NO: 850 - protein, 437 aa, Aspergillus oryzae; identical to SEQ ID NO: 847

SEQ ID NO: 851 - protein, 429 aa, Aspergillus niger
MAPIALKILLFTSLIVPSISLSDQARNGHARTICEVKPGGSSEIDDVPAIVDALTTCGSGGRVIFSNNTYHINSVMNTTWLDDVEIDLQGTLLWSTNISYWLNHSLPVGYQNQSTAWILGGKDIVFEGHGYGTFNGSGQTWYRYVGSTSNYPRRPNQLTVSGAMGAVFKGLRFVQSQMWTMSIIHTSNSWFDSIYVNNLYDDGGSAQNTDGANTIYSKNITLTNWEVVNGDDSISTKANSTDITIANCTFTSGLGIAIGSIGQYNGAFETVERLKISNITYEKTTHAVYFKTWTGDQVGYPPNGGGGGLGYASDIVATNLKTNNLKGAPFTISQCTTFSGASGNCTNSKFQIRDLVFTDISGTTDSSDVASFQCSAVAPCEDITIENVSLRIAGNTTHAEEYLCGNVDGTVGFNCTGDVCVGSSATGGC

SEQ ID NO: 852 - protein, 423 aa, Aspergillus niger
MQLRASVLLSFLGLASVGHAGNVENNHNVCTVRANGGHQDDVPNIMAAFKECGNGGTIIFPEDQSYWIATRLHPTLKDVAIEWRGKWTFSDNLTYWRNNSYPIAFQNHHAGFIISGDNITINGYGTGGIDGNGNTWYTAEKGDTQPGRPMPFVFWNVSEVIVDSFYVKDPPLWSVNIMNGTNMRFNNIYCNATAVDAPWGDNWVQNTDGFDTMDATNIQLTNFVYQGGDDCIAIKPRSYNIDIQNVTCRGGNGIAIGSLGQYLEDSSVANIRVDKVNIIRYNEDMHNSAYLKTWVGALVPQSSYESAGVPRGDGWGSIRNVLFSNFNVQGASAGPSISQDSGDNGSYAGTSKMSISNVAFVNFTGWVDTEKSVVSTVSCSEVHPCYNIDYDNVVLYPGKNATTAGTGSCKYTADGGVHGLSGC

SEQ ID NO: 853 - protein, 423 aa, Neosartorya fischeri
MRFSIISLVSLPLFLGLTYAGGVEKDERNNVCTVKANGKQKDDMPNLFKAFKECGNGGTIIFPEDQSYWIGTRLNPLLNDVTVQWRGKWTFSDNLDYRRNNSFPVAFQNHRVGFIISGHNVTIDGNGNTWYTAEKGVTQSGRPMPFVFWNVSEVNVENFYVKDPPLWSLNIMNGTNMRFNNIYCNATSVDAPYGYNWVQNTDGFGSFSAVNTMDAVNIQLTNFVYQGGDDCITIKPRSYNIDIQNVTCVGGNGIAVGSLGQYLEDSSVENVRVDKVKIIRYNEDMHNSAYIKTWVGALVPQSSYESAGLPCGGGWGNVRNILFSNFEVQGANAGPSVNQDSGNNGSYSGSSLMTVSNIVFANFTGYTSGGTSVTSKVSCSEVHPCYNIEFDDVLLYPGKNASNLGTGSCKYTANGGVHGLEGC

SEQ ID NO: 854 - protein, 440 aa, Aspergillus aculeatus
MRALFLLALGSIPALVSGQLSGSVGPLTSASTKGATKTCNILSYGAVADNSTDVGPAITSAWAACKSGGLVYIPSGNYALNTWVTLTGGSATAIQLDGIIYRTGTASGNMIAVTDTTDFELFSSTSKGAVQGFGYVYHAEGTYGARILRLTDVTHFSVHDVILVDAPAFHFTMDTCSDGEVYNMAIRGGNEGGLDGIDVWGSNIWVHDVEVTNKDECVTVKSPANNILVESIYCNWSGGCAMGSLGADTDVTDIVYRNVYTWSSNQMYMIKSNGGSGTVSNVLLENFIGHGNAYSLDIDGYWSSMTAVAGDGVQLNNITVKNWKGTEANGATRPPIRVVCSDTAPCTDLTLEDIAIWTESGSSELYLCRSAYGSGYCLKDSSSHTSYTTTSTVTAAPSGYSATTMAADLATAFGLTASIPIPTIPTSFYPGLTPYSALAG

SEQ ID NO: 855 - protein, 467 aa, Aspergillus flavus
MHSLSLISLALLSPLLVNAQLSGHVGPLTSSSSKASTKTCNVQDYGAKADKETDIGSAIEKAWDDCAEGGVVYIPSGDYAMSSRLKLSGGKASAIQLDGIIYRTGSDGGNLFMIEHSSDFEFFSSTSQGAIQGLGYEFHKDGSLNGPRLLRFYDVTDFSVHDVALVDSPAFHLSLDTCKNAEIYNMAIRGGDSGGLDGVDIWSENVWVHDVEVTNKDECVTVKSPAKNILVENIYCNWSGGCAMGSLGADTNISDVVYRNVYTWKSNQMYMIKSNGGSGSVSNLVLENFIGHGNAYSLDIDGEWSSMSTVSGDGVQLNNITVRNWKGTEEDGAARGPIKVVCAEKAPCTDITIDDFALWTESGDEQTYSCENGFGSGFCLQDGDGTSSYSTVITETAAPTGYEASSMSNDLSTAFGTDASIPIPTIPTSFFPGATPYSALAGAASGNAAKATSSATASRFRHRRGSH

SEQ ID NO: 856 - protein, 446 aa, Aspergillus niger
MPALPILALALAPLLVNGQLSGSVGPLTSAHSKAATKTCNVLDYGAVADNSTDIGSALSEAWDACSDGGLIYIPPGDYAMDTWVSLSGGKATAIILDGTIYRTGTDGGNMILVENSSDFELYSNSSSGAVQGFGYVYHREGDLDGPRILRLQDVSNFAVHDIILVDAPAFHFVMDDCSDGEVYNMAIRGGNSGGLDGIDVWGSNIWVHDVEVTNKDECVTVKSPANNILVESIYCNWSGGCAMGSLGADTDITDILYRNVYTWSSNQMYMIKSNGGSGTVNNTVLENFIGHGNAYSLDVDSYWSSMTAVDGDGVQLSNITFKNWKGTEADGAERGPIKVVCSDTAPCTDITIEDFAMWTESGDEQTYTCESAYGDGFCLEDSDSTTSYTTTQTVTTAPSGYSATTMAADLTTDFGTTASIPIPTIPTSFYPGLTAISPLASAATTA

SEQ ID NO: 857 - protein, 446 aa, Aspergillus niger
MPALPILALALAPLLVNGQLSGSVGPLTSAHSKAATKTCNVLDYGAVADNSTDIGSALSEAWDACSDGGLIYIPPGDYAMDTWVSLSGGKATAIILDGTIYRTGTDGGNMILVENSSDFELYSNSSSGAVQGFGYVYHREGDLDGPRILRLQDVSNFAVHDIILVDAPAFHFVMDDCSDGEVYNMAIRGGNSGGLDGIDVWGSNIWVHDVEVTNKDECVTVKGPANNILVESIYCNWSGGCAMGSLGADTDITDILYRNVYTWSSNQMYMIKSNGGSGTVNNTLLENFIGRGNRYSLDVDSYWSSMTAVDGDGVQLSNITFKNWKGTEADGAERGPIKVVCSDTAPCTDITIEDFAMWTESGDEQTYTCESAYGDGFCLEDSDSTTSYTTTQTVTTAPSGYSATTMAADLTTDFGTTASIPIPTIPTSFYPGLTAISPLASAATTA

SEQ ID NO: 858 - protein, 467 aa, Aspergillus oryzae
MHSLSLISLALLSPLLVNAQLSGHVGPLTSSSSKASTKTCNVQDYGAKADKETDIGSAIEKAWDDCAEGGVVYIPSGDYAMFSRLKLSGGKASAIQLDGIIYRTGSDGGNLFMIEHSSDFEFFSSTSQGAIQGLGYEFHKDGSLNGPRLLRFYDVTDFSVHDVALVDSPAFHLSLDTCKNAEIYNMAIRGGDSGGLDGVDIWSENVWVHDVEVTNKDECVTVKSPAKNILVENIYCNWSGGCAMGSLGADTNISDVVYRNVYTWKSNQMYMIKSNGGSGSVSNLVLENFIGHGNAYSLDIDGEWSSMSTVSGDGVQLNNITVRNWKGTEEDGAARGPIKVVCAEKAPCTDITIDDFALWTESGDEQTYSCENGFGSGFCLQDGDGTSSYSTVITETAAPTGYEASSMSNDLSTAFGTDASIPIPTIPTSFFPGATPYSALAGAASGNAAKATSSATASRFRHRRGSH

SEQ ID NO: 859 - protein, 507 aa, Emericella nidulans
MYVSRLLLFLAPLLVKGQLSGSVGPLTSVSSKSQTKTCNVLDYGAVADKSTDIGPALSSAWDECADGGVVYIPPGDYAIETWVKLSGGKACAIQLDGIIYRTGTDGGNMIMIEHTSDFEFFSSTSKGAFQGYGYEFHAKGSSDGPRILRLYDVSDFSVHDVALVDSPLFHFSMDTCSNGEVYNMAIRGGNMGGLDGIDVWSTNVWIHDVEVTNKDECVTVKSPSKNILVENIYCNWSGGCAMGSLGTDTDISDIVYRNVYTWKSNQMYMVKSNGGSGTVSNLVLENFIGHGNAYSLDIDSAWSSMSTIEGDGVELKNVTIRNWKGTEADGSQRGPIKVKCASGAPCTDVTVEDFAMWTESGDEQTYVCENAFGDGFCLADGDGTSTFTTTLTASAAPSGYSAPSMDADLETAFGTDSEIPIPTIPTSFYPGATPYSALAGASVSSSQVPAASSSAEAKFVASPATSSPTATSTAISSVDPVSAATTTATSHGHGKSHHKHQCRAHRH

SEQ ID NO: 860 - protein, 521 aa, Neosartorya fumigata
MRLHAFTLLSLLGLVPSFAAASLSGSVGPLTSASAKAAKKTCNVLDYGAKADKKTDLGPPLAAAFAACKSGGLVYIPAGDYAMSTWVKLANGKAWALQIDGVIYRTGTDGGNMIMIEHTSDFELYSSTSSGAMQGLGYEFHASNNWSGPRLLRLWDVSDFSVHDLILVDSPSFHFSIDTCSNGEVYNMAIRGGNHGGLDGVDVWSTNIWIHDLEVTNKDECVTVKSPAKNILVENIYCNLSGGCAMGSLGADTDISDITYKNIYTWNSNQMMMIKSNGGSGTVSNVVFENFIGHGNAYSLDIDSFWSSMSAVSGDGVTLNNITIKNWKGTEANGAQRGPIKIICPDKVPCYNILIEDFAMWTETGSKQWYSCQSAYGSGFCLKSGSHHTSYAVTTTTVSSAPSGYSAAKMASDLSTDFGSTKSIPIPTIPTSFYPGATPYSALMSKQSTKAAKARAVDMSVETPAAASRSEQVVQGAPQETGQSAPESAGPVPSGNPGPVPTGGSRPSRHRHGHHHFGSAI

SEQ ID NO: 861 - protein, 521 aa, Neosartorya fumigata
MRLHAFTLLSLLGLVPSFAAASLSGSVGPLTSASAKAAKKTCNVLDYGAKADKKTDLGPPLAAAFAACKSGGLVYIPAGDYAMSTWVKLANGKAWALQIDGVIYRTGTDGGNMIMIEHTSDFELYSSTSSGAMQGLGYEFHASNNWSGPRLLRLWDVSDFSVHDLILVDSPSFHFSIDTCSNGEVYNMAIRGGNHGGLDGVDVWSTNIWIHDLEVTNKDECVTVKSPAKNILVENIYCNLSGGCAMGSLGADTDISDITYKNIYTWNSNQMMMIKSNGGSGTVSNVVFENFIGHGNAYSLDIDSFWSSMSAVSGDGVTLNNITIKNWKGTEANGAQRGPIKIICPDKVPCYNILIEDFAMWTETGSKQWYSCQSAYGSGFCLKSGSHHTSYAVTTTTVSSAPSGYSAAKMASDLSTDSGSTKSIPIPTIPTSFYPGATPYSALMSKQSTKAAKARAVDMSVETPAAASRSEQVVQGAPQETGQSAPESAGPVPSGNPGPVPTGGSRPSRHRHGHHHFGSAI

SEQ ID NO: 862 - protein, 558 aa, Aspergillus niger
MLLDKLSVLSFLGLAPIFAAAQLSGSVGPLTSASTKAATKTCNVLDYGAKADKSTDLGAPLASAFADCKSGGLVYVPSGDYALSTWARLSGGEAWALQIDGIIYRTGTDGGNMIYIEHSSDFELFSSTSEGAMQGLGYEFHADDNWSGPRLLRLYEVTDFSVHDFILVDSPSFHFSLDTCTNGEIYNMAIRGGNHGGLDGIDVWSNNIWVHDVEVTNKDECVTVKSPSKNILIESIYCNWSGGCGMGSFGSDTNVSDITYRNIYTWSSNNMMLIKSNGGSGFVENVLLENFIGHGNAYSLDIDSYWASMSAVDGDGVQLSNITVKNWKGTEAYGAERGPVKVVCADGAPCYDITIEDFAMWTEEGDSQWYSCESAYGSGYCLQDSDDHVSYSVTTSTVSSAPSGYSATSMAADLTTDFGSTVSIPIPTIPTSFYPGATPYSALMANSASTAAASSIASHATVHSSSASVAASVPSAVAPSESIPAATSAVVSSAAAIAPSPAVGAQEGSTTSAPSFAAPSGAGNSPQGPTGASGFGEKGQQGEQGEQGEQGEQGVCYV

SEQ ID NO: 863 - protein, 558 aa, Aspergillus niger
MLLDKLSVLSFLGLAPIFAAAQLSGSVGPLTSASTKAATKTCNVLDYGAKADKSTDLGAPLASAFADCKSGGLVYVPSGDYALSTWARLSGGEAWALQIDGIIYRTGTDGGNMIYIEHSSDFELFSSTSEGAMQGLGYEFHADDNWSGPRLLRLYEVTDFSVHDFILVDSPSFHFSLDTCTNGEIYNMAIRGGNHGGLDGIDVWSNNIWVHDVEVTNKDECVTVKGPSKNILIESIYCNWSGGCGMGSFGSDTNVSDITYRNIYTWSSNNMMLIKSNGGSGFVENVLLENFIGHGNAYSLDIDSYWASMSAVDGDGVQLSNITVKNWKGTEAYGAERGPVKVVCADGAPCYDITIEDFAMWTEEGDSQWYSCESAYGSGYCLQDSDDHVSYSVTTSTVSSAPSGYSATSMAADLTTDFGSTVSIPIPTIPTSFYPGATPYSALMANSASTAAASSIASHATVHSSSASVAASVPSAVAPSESIPAATSAVVSSAAAIAPSPAVGAQEGSTTSAPSFAAPSGAGNSPQGPTGASGFGEKGQQGEQGEQGEQGEQGVCYV

SEQ ID NO: 864 - protein, 532 aa, Aspergillus oryzae
MRINTLSLFSLVSLVPTLALASLSGSVGPLTSASTKAATKTCNVLDYGAKADKTTDLGPPLASAFADCKSGGLVYVPSGDYALSTWAKLSGGKAWALQIDGTIYRTGTDGGNMIFIEHSSDFELFSSTSSGAMQGLGYEYHKDNKWSGPRLLRLYDVTDFSVHDFILVDAPAFHFSLDTCTNGEVYNMAIRGGNHGGLDGVDVWSTNVWIHDIEVTNKDECVTVKSPSKNILVENIYCNWSGGCGMGSLGKDTDISDITYRNIYTWNSNNMMFIKSNGGSGSATNLLFENFIGHGNAYSFDIDSYWASMSSQGGNGVELSNITLRNWKGTEENGASRGPIKIVCPDGAPCYDITIEDFAMWTEDSSRQRQWYSCRNAYGTGFCLKSGSNHVAYEATTTTVSSAPSGYSAATMAADLKTDFGITASIPIPTIPTSFYPGATPYSALMANKGSTAKVRAVVAPSKPTTVAAATSTPAEQQTSTSTPAPAVEQPSQQSPGQSAGEVGGCPFGNGRSVPTGPPRAGHRHHQRHGHH

SEQ ID NO: 865 - protein, 526 aa, Aspergillus terreus
MHVNTLSVLSLVGLVPLAAARLSGSVGPLTSASAKAATKTCNVLDYGAAADKTTDLGAPLASAFADCKTGGLVYVPPGDYALESWAQLSGGKAWALQIDGTIYRTGTDGGNMIFIEHSSDFELFSSTSSGAMQGLGYEFHKDDNWSGPRLLRLYDVSDFALHDFILVDSPSFHLSLDTCSNGEVYNMAIRGGNHGALDGVDVWSTNIWIHDVEVTNKDECVTVKSPAQNILVENIYCNWSGGCGMGSLGADTNISDITYRNVYTWNSNQMMLIKSNGGSGTVSNVVLENFIGHGNAYSLDIDSAWSSMSTQSGDGVEFSNFTIRNWKGTEANGAERGPVKIICPNGAPCYEMYIEDFAMWTEEGDEQWYTCQSAFGSGFCLQSGSDYSSYEATTSTATSAPSGYSAPTMASDLTRDFGSTVSIPIPTIPTSFYPGATPYSALMGAQSSASANVRAVAFGTSAVVSRAGSSSRPAQTGSFLTKSTTAAAGSIMGPTAAAVQGVCAPPAGQGRGAARYGGHRRHGHRH

SEQ ID NO: 866 - protein, 516 aa, Neosartorya fischeri
MRLHAFTLLSLLGLVPSFAAASLSGSVGPLTSASAKAAKKTCNVLDYGAKADKKTDLGPPLAAAFAACKSGGLVYIPAGNYAMSTWVKLANGKAWALQIDGVIYRTGTDGGNMIMIEHTSDFELYSSTSSGAMQGLGYELHAANNWSGPRLLRLWDVSDFSVHDLILVDSPSFHFSIDTCSNGEVYNMAIRGGNHGGLDGVDVWSTNIWIHDVEVTNKDECVTVKSPAKNILVENIYCNLSGGCGMGSLGADTDISDITYKNIYTWNSNQMMMIKSNGGSGTVSNVVLENFIGHGNAYSLDIDSYWSSMSAVSGDGVELSNITIKNWKGTEANGAQRGPIKIICPDKVPCYNILIEDFAMWTETGSKQWYSCQSAYGSGFCLKSGSHHTSYAVTTTTVSSAPSGYSAAKMPLDLSTDFGSTQSIPIPTIPTSFYPGATPYSALMSKQSTKAAKARAVDMSVETPAAASRSEQVVQGASQETSQPAPESAGPVRSVPTGGNRPSRHRHGHHHFWIAA

SEQ ID NO: 867 - protein, 447 aa, Aspergillus flavus
MQVKLFYTLALWAPILVSAQLSGSVGPLVDFKTKAKNKTCDITDYGAVADGKTDVGPAILDAWGNCSTGGLIYVPPGTYSLATDLELKHGESTAFQLDGVLARGHEGSYQLILVRNCHDCEFFSGNSQGAVQGYGYEYLQDGNYGERLFRFQDVSDFSVHGFAAIDSPAYYLVFDTVSNGEIYNLLVRGIADLGMTDAFDIWGQNVWIHDIEVTNGDECVTVKSPASDFLIENIYCNLSGGTAIGSLGTGTNISNIHYRNLYMNQADACYLKTHNGDGIVKNIVWENVIVHGGPYPLAVNEAWGKDVGSTGVQVQNLTFRNWYGENTANSRPAIRIECDEDVPCYDITLDNVNLWTEDGDYVEWSCANAYGSGACLQEAKDTGDLATYTTAVTVTATPSYSATHMPGDFTTNPPSTAPFTIPPMPTSFYPGATPISTLLSLSGAGGL

SEQ ID NO: 868 - protein, 459 aa, Aspergillus niger
MRASILPLTLFLATLAGAQLSGPVGPLVDYSTKARNQTCNIIDYGAVADGKTDISQALLDAWGNCSVGGLVYIPPGNYSLAEDIELKHGQSSAIQLDGVVMRGHRGSYQMILIRDCNDFEFFSGNSRGAIQGFGYEYLQNDTYGERLLRIQEVNNFSVHGFALIDSPSYYIVFDTVTSGEVYNILIRGVTSVGATDAIDVWGENMWFHDIEVSNGDECVTVKSPAHNYLIENIYCNLSGGTAIGSLGTGTNISDIHYRNLYMNQADACFLKSNNGDGIVKNIIWENVIVHGGPYPLAIDEAWGDDRGSVGVQVSNLTFRNWHGESVSASRPVIRLQCDSDVPCYDITIENVNLWANDSNYVVWQCENAYGDGACLSSAEGTKDLETFTSKQTITATPSYAAPTMAADFTFNLPSTSPFTIPPMPTSFYPGATPISTLLHLHGAGGLPSASPISHHRRHQ

SEQ ID NO: 869 - protein, 447 aa, Aspergillus oryzae
MQVKLFYTLALWAPILVSAQLSGSVGPLVDFKTKAKNKTCDITDYGAVADGKTDVGPAILDAWGNCSTGGLIYVPPGTYSLATDLELKHGESTAFQLDGVLARGHEGSYQLILVRNCHDCEFFSGNSQGAVQGYGYEYLQDGNYGERLFRFQDVSDFSVHGFAAIDSPAYYLVFDTVSNGEIYNLLVRGIADLGMTDAFDIWGQNVWVHDIEVTNGDECVTVKSPASDFLIENIYCNLSGGTAIGSLGTGTNISNIHYRNLYMNQADACYLKTHNGDGIVKNIVWENVIVHRGPYPLAVNEAWGKDVGSTGVQVQNLTFRNWYGENTANSRPAIRIECDEDVPCYDITLDNVNLWTEDGDYVEWSCANAYGSGACLQEAKDTGDLATYTTAVTVTATPSYSATHMPGDFTTNPPSTAPFTIPPMPTSFYPGATPISTLLSLSGAGGL

SEQ ID NO: 870 - protein, 443 aa, Aspergillus niger
MLVTSLIALLPAIAAAQVSGTVGPRTSASAKAAEKVCNVLDYGASANSTIDIGPPLKEAFQDCQTGGLVYIPEGDYLLSSWVSLVYGSGWALQLDGIIYRDKNVTDGGNMIFIEHTSDIEIFSNNSAGAIQGYGYLFHEQDEYGPRILRLNNVTDFSVHDLILVDSPAYFLNLVESYNGEVYNMVIRGASMGGLDGIDISGANYWIHDVEVTNGDECVTVKSPSANVRVENVFCNHSGGCAMGSLGTDTNISNIEFENIYTYNSTQMYMIKSNGGNGTVTNCSFKNFIGYSNAYMLDLDTYWGDESDGDGIKYENIGFENWKGTSSNGIQRSPIRILCPDANPCTNITLTAVELWTDTGDYVKQECSSAYGEGECLRQQNGTLASYSFTTTITSVPVTAYSPTTTMPGLISTSMDTTTSIPIPTIPTSFFPGASAYSTLMANM

SEQ ID NO: 871 - protein, 449 aa, Aspergillus flavus
MRSKTFSVLSSCLLLIATVQGQLSGSVGPSTSISDKKAVKTCNVLDYGATNDNKTDVGQPIMDAFEDCGSGGVIYIPDGDYLIQEWVSLENGTAFAIQLDGVIYRNGTTTSQGYMFGISGGSDFELYSSTSKGAIQGSGYLYHMNGEFTAPRLLHISDVSHWSVHDIALVDAPMFHFVIDDASNGEVYNMAIRGGNSGGLDGIDVSGDNIWIHDVMVTNKDECVTVKTGSHNFQIENIYCNWSGGCAMGSLGSGTNVSNIVYRNIYTWNSNQMYMIKSNGGDGEVSNLLFENFIGHGNAYSLDLDSEWSSMDTVDGDGIFYRNITFKNWKGTETDGESRPSIRVICPEATPCTDITIEDVDLWTEEGDSETYVCKNAFGSGACLKSDSSSTATYATTTTVTSAPSGYSATTMAADLTSAFGTDASIPIPTIPTSFYPGATPYSALAGSS

SEQ ID NO: 872 - protein, 448 aa, Aspergillus niger
MTWSTSFLVATSLLSIINSVHAQLTGSVGPLTSVIDKAAVKTCNVCDYGASSDNTTGVGQPIIDAFTDCGSGGLIHVPEGDYLLKDWVSSENGSAWSIQLDGVLHWDSSPSAQSYIFAITGGSDSELSSSNATGAIQGSGYLYHRHNTYTSPRMLYISGVSDWTVHDLVLVNSPMPHFVIDGGYNGEAYNMAICGGDHGGLDGIDLYGGNIWIHLMVTNKDECVTSKTNSHNFLIENIYCNPSGGCAIGSLGSSVNVTNILYRNVYTWDSNQMMMIKTNGGLGNVSNIVFENFIGHGNVNSLDLDSYWSSMNAIDGVGIYYHNITIYNWTGTAIDGETRPPIRVICPEDMPCTEITLVQIDLLVEEGRYDEYYCAIACGGYCLDSATSTLTTYTTTTYGNSASTGYEAPTMADDLATAFGTTASIPTPTTPASFFPGVAPVSAVAGSS

SEQ ID NO: 873 - protein, 450 aa, Aspergillus niger
MTWSTSFLSVHFFAFITTSIHAQLTGSVGPLTSVSDKAAVKTCNVLDYGARSDNTTDVGQPIIDAFADCGSGGLIYIPEGDYLLKNWISLENGSAWAIQLDGVLYRDSSPSSQSYMFEISGGRDFELFSSNATGAIQGSGYLYHRDDTYTGPRMLHISGVSDWSVHDLVLVDSPMFHFVIDGGYNGEVYNMAIRGADHGGLDGIDVYGDNMWIHDIMVTNKDECVTTKTNSHNFLIENIYCNSSGGCAIGSLGSGANVSNIVYRNVYTWDSNQMMMIKSNGGSGDVSNAVFENFIGHGNAYSLDLDSYWSSMDAIDGDGIYYHNITFQNWTGTAVDGETRPPIRVICPEDTPCTEIALVQIDLWVEEGGYDEYICKNAYGSGYCLDSATGTSTPYTTTTYVNSAPTGYEAPTMTDDLATAFGTSASIPIPTIPASFFPGVTPISAVAGSS

SEQ ID NO: 874 - protein, 432 aa, Aspergillus oryzae
MQSKTFSVLSSCLLLIATVQGQLSGSVGPSTSISDKKAVKTCNVLDYGATNDNKTDVGQPIMNAFEDCGSGGVIYIPEGDYLIQEWVSLRNGTAFAIQLDGVIYRNGTTTSQGYMFGISGGSDFELYSSTSKGAIQGSGYLYHMNGEFTAPRLLHISDVSHWSVHDIALVDAPMFHFVIDDASNGEVYNMAIRGGNSGGLDGIDVSGDNIWIHDVMVTNKDECVTVKTGSHNFQIENIYCNWSGGCAMDSLGSGTNVSNIVYRNIYTWNSNQMYMIKSNGGDGEVSNLLFENFIGHGNAYSLDLDSEWSSMDTVDGDDGESRPPIRVICPEAIPCTDITIEDVDLWTEEGDSETYVCKNAFGSGACLKSDSSSTATYATTTTVTSAPSGYSATTMAADLTSAFGTDASIPIPTIPTSFYPGATPYSALAGSS

SEQ ID NO: 875 - protein, 104 aa, Aspergillus pallidus
DCDYTCGSHCYSASAVSDAQSAGYQLYSAGQSVGRSRYPHQYRNYEGFNFPVSGNYYEWPILSSGSTYNGGSPGADRVVFNNNDELAGLITHTGASGNGFVACG

SEQ ID NO: 876 - protein, 177 aa, Aspergillus giganteus
MVAIKNLVLVALTAVTALAVPSPLEARAVTWTCLNDQKNPKTNKYETKRLLYNQNKAESNSHHAPLSDGKTGSSYPHWFTNGYDGDGKLPKGRTPIKFGKSDCDRPPKHSKDGNGKTDHYLLEFPTFPDGHDYKFDSKKPKENPGPARVIYTYPNKVFCGIIAHTKENQGELKLCSH

SEQ ID NO: 877 - protein, 132 aa, Aspergillus clavatus
MLYNKLITIAALLVPALAAPQGLDVRDCDYTCGSHCYSASAVSDAQSAGYQLYSAGQSVGRSRYPHQYRNYEGFNFPVSGNYYEWPILSSGSTYNGGSPGADRVVFNDNDELAGLITHTGASGNGFVACSGW

SEQ ID NO: 878 - protein, 177 aa, Aspergillus clavatus
MVAIKNLVLVALTAVTALAMPSPLEERAATWTCMNEQKNPKTNKYENKRLLYNQNNAESNAHHAPLSDGKTGSSYPHWFTNGYDGDGKILKGRTPIKWGNSDCDRPPKHSKNGDGKNDHYLLEFPTFPDGHQYNFDSKKPKEDPGPARVIYTYPNKVFCGIVAHTRENQGDLKLCSH

SEQ ID NO: 879 - protein, 177 aa, Aspergillus clavatus; identical to SEQ ID NO: 878

SEQ ID NO: 880 - protein, 176 aa, Neosartorya fumigata
MVAIKNLFLLAATAVSVLAAPSPLDARATWTCINQQLNPKTNKWEDKRLLYSQAKAESNSHHAPLSDGKTGSSYPHWFTNGYDGNGKLIKGRTPIKFGKADCDRPPKHSQNGMGKDDHYLLEFPTFPDGHDYKFDSKKPKEDPGPARVIYTYPNKVFCGIVAHQRGNQGDLRLCSH

SEQ ID NO: 881 - protein, 176 aa, Aspergillus restrictus; identical to SEQ ID NO: 880

SEQ ID NO: 882 - protein, 159 aa, Neosartorya fumigata
MKFSLSAAVLAFAVSVAALPQHDVNAAGNGVGNKGNANVRFPVPDDITVKQATEKCGDQAQLSCCNKATYAGDVTDIDEGILAGTLKNLIGGGSGTEGLGLFNQCSKLDLQIPVIGIPIQALVNQKCKQNIACCQNSPSDASGSLIGLGLPCIALGSIL

SEQ ID NO: 883 - protein, 157 aa, Emericella nidulans
MKFSIAAAVVAFAASVAALPPAHDSQFAGNGVGNKGNSNVKFPVPENVTVKQASDKCGDQAQLSCCNKATYAGDTTTVDEGLLSGALSGLIGAGSGAEGLGLFDQCSKLDVAVLIGIQDLVNQKCKQNIACCQNSPSSADGNLIGVGLPCVALGSIL

SEQ ID NO: 884 - protein, 644 aa, Neosartorya fumigata
MRLSHVLLGTAAAAGVLASPTPNDYVVHERRAVLPRSWTEEKRLDKASILPMRIGLTQSNLDRGHDLLMEISDPRSSRYGQHLSVEEVHSLFAPSQETVDRVRAWLESEGIAGDRISQSSNEQFLQFDASAAEVERLLGTEYYLYTHQGSGKSHIACREYHVPHSLQRHIDYITPGIKLLEVEGVKKARSIEKRSFRSPLPPILERLTLPLSELLGNTLLCDVAITPLCISALYNITRGSKATKGNELGIFEDLGDVYSQEDLNLFFSTFAQQIPQGTHPILKAVDGAQAPTSVTNAGPESDLDFQISYPIIWPQNSILFQTDDPNYTANYNFSGFLNTFLDAIDGSYCSEISPLDPPYPNPADGGYKGQLQCGVYQPPKVLSISYGGAEADLPIAYQRRQCAEWMKLGLQGVSVVVASGDSGVEGRNGDPTPTECLGTEGKVFAPDFPATCPYLTTVGGTYLPLGADPRKDEEVAVTSFPSGGGFSNIYERADYQQQAVEDYFSRADPGYPFYESVDNSSFAENGGIYNRIGRAYPDVAAIADNVVIFNKGMPTLIGGTSAAAPVFAAILTRINEERLAVGKSTVGFVNPVLYAHPEVFNDITQGSNPGCGMQGFSAATGWDPVTGLGTPNYPALLDLFMSLP

SEQ ID NO: 885 - protein, 602 aa, Neosartorya fumigata
MFSSLLNRGALLAVVSLLSSSVAAEVFEKLSAVPQGWKYSHTPSDRDPIRLQIALKQHDVEGFETALLEMSDPYHPNYGKHFQTHEEMKRMLLPTQEAVESVRGWLESAGISDIEEDADWIKFRTTVGVANDLLDADFKWYVNEVGHVERLRTLAYSLPQSVASHVNMVQPTTRFGQIKPNRATMRGRPVQVDADILSAAVQAGDTSTCDQVITPQCLKDLYNIGDYKADPNGGSKVAFASFLEEYARYDDLAKFEEKLAPYAIGQNFSVIQYNGGLNDQNSASDSGEANLDLQYIVGVSSPIPVTEFSTGGRGLLIPDLSQPDPNDNSNEPYLEFLQNVLKMDQDKLPQVISTSYGEDEQTIPEKYARSVCNLYAQLGSRGVSVIFSSGDSGVGAACLTNDGTNRTHFPPQFPAACPWVTSVGGTTKTQPEEAVYFSSGGFSDLWERPSWQDSAVKRYLKKLGPRYKGLYNPKGRAFPDVAAQAENYAVFDKGVLHQFDGTSCSAPAFSAIVALLNDARLRAHKPVMGFLNPWLYSKASKGFNDIVKGGSKGCDGRNRFGGTPNGSPVVPYASWNATDGWDPATGLGTPDFGKLLSLAMRR

SEQ ID NO: 886 - protein, 596 aa, Neosartorya fumigata
MAPFTFLVGILSLCICCIVLGAAAEPSYAVVEQLRNVPDGWIKHDAAPASELIRFRLAMNQERAAEFERRVIDMSTPGHSSYGQHMKRDDVREFLRPPEEVSDKVLSWLRSENVPAGSIESHGNWVTFTVPVSQAERMLRTRFYAFQHVETSTTQVRTLAYSVPHDVHRYIQMIQPTTRFGQPARHERQPLFHGTVATKEELAANCSTTITPNCLRELYGIYDTRAEPDPRNRLGVSGFLDQYARYDDFENFMRLYATSRTDVNFTVVSINDGLNLQDSSLSSTEASLDVQYAYSLAYKALGTYYTTGGRGPVVPEEGQDTNVSTNEPYLDQLHYLLDLPDEELPAVLSTSYGEDEQSVPESYSNATCNLFAQLGARGVSIIFSSGDSGVGSTCITNDGTKTTRFLPVFPASCPFVTAVGGTHDIQPEKAISFSSGGFSDHFPRPSYQDSSVQGYLEQLGSRWNGLYNPSGRGFPDVAAQATNFVVIDHGQTLRVGGTSASAPVFAAIVSRLNAARLEDGLLKLGFLNPWLYSLNQTGFTDIIDGGSSGCYVGTSNEQLVPNASWNATPGWDPVTGLGTPIYNTLVKLATSVSSTP

SEQ ID NO: 887 - protein, 594 aa, Neosartorya fumigata
MLSSTLYAGWLLSLAAPALCVVQEKLSAVPSGWTLIEDASESDTITLSIALARQNLDQLESKLTTLATPGNPEYGKWLDQSDIESLFPTASDDAVLQWLKAAGITQVSRQGSLVNFATTVGTANKLFDTKFSYYRNGASQKLRTTQYSIPDHLTESIDLIAPTVFFGKEQNSALSSHAVKLPALPRRAATNSSCANLITPDCLVEMYNLGDYKPDASSGSRVGFGSFLNESANYADLAAYEQLFNIPPQNFSVELINRGVNDQNWATASLGEANLDVELIVAVSHPLPVVEFITGGSPPFVPNADEPTAADNQNEPYLQYYEYLLSKPNSHLPQVISNSYGDDEQTVPEYYARRVCNLIGLMGLRGITVLESSGDTGIGSACMSNDGTNKPQFTPTFPGTCPFITAVGGTQSYAPEVAWDGSSGGFSNYFSRPWYQSFAVDNYLNNHITKDTKKYYSQYTNFKGRGFPDVSAHSLTPYYEVVLTGKHYKSGGTSAASPVFAGIVGLLNDARLRAGKSTLGFLNPLLYSILAEGFTDITAGSSIGCNGINPQTGKPVPGGGIIPYAHWNATAGWDPVTGLGVPDFMKLKELVLSL

SEQ ID NO: 888 - protein, 580 aa, Neosartorya fumigata
MYPLDGSARPHPPGTTRLNSVEPDKQIGFTVLVRPQTGAPRLPDLAQWQAIPIAERQFLSTAGFERTYGSSEDDIVSVASFLEKAGMTIRSRHAGAGTVEVQAKTCQIHSVFAVQLLYYRGQLRPAARKRRDDKQPAEETYIGFEGCISLPAALHDKVIHIFGLDTRTFGASGGYSGDPPRAQRLIVAELAALYGFPAGVDASQQTIGIFSGEGNDDKGQSLSNYRPADVAAYFNNQTVGYNRAPTVVPVSLTVADQTYRNDPDHPTQELSQDIMTAATIAQGCTVNVYFSDLTEQGWLAFLTRVLFPQGEEKRPTIVSISWTMYDEQTYRDRLSFLFQRLAVVGTSVFAIAGDWGANNNIIDGQPHVGWPGSDPWVTCVGGTVVGNVRSSGAFTEHAWSDRDNPDSQFTIDGHLGVTGGGMSRVFATPPYQLSSGISAVTDCNGERWTGGRFIPDITGMVGFRGFIVNGKRNYFIGTSCSTPLYAGLFAALASALGGGGEGGVLFGPLNTVLYQIDRGVYRDITFGHNDSGDMPACAYFAAGEGYDTVSGLGSVDGRRTLEELRRIYWPKTKGFGCFRN

SEQ ID NO: 889 - protein, 71 aa, Aspergillus clavatus
MKFLNILTLAFITGMASAAAVPGGTTTNDAASTLDNLNNKRSVCGQLCFNNKDCGGPCPKCNTKEGVCVKK

SEQ ID NO: 890 - protein, 116 aa, Aspergillus terreus
MKLTGLLSLALLTTLALAAPDPKKNGPNRDWCGQVCTGKNDCSGECNKCVNFVCKRTSVLIYKEYLHKNATDHAARLNATRHLTIMIDETTRVDHVTVKFNVETYGMESITRRPEA

SEQ ID NO: 891 - protein, 73 aa, Neosartorya fischeri
MKSFNLLSLSLLLAIASAAAVPDVEGTITNDAATPVNNLDDKRDHCGQVCLNKTGCGGKCPKCDMRSLTCKKA

SEQ ID NO: 892 - protein, 810 aa, Emericella nidulans
MRAKNGPGSWLALTAIATSLNTLALAAAKTINHSYEFNPVVVSGGGYITGIIAHPTEKNLLYARTDIGGTYRWNADEDKWIPLNDFISGADENLLGTESVALDPNDPDRLYLAQGRYLNSENSAFFVSQDRGATFDVYPAPFKMGANELGRNNGERLAVNPFKTDELWMGTRDAGLMVSEDGAQTWRNVSGFPQANANGIGIYWVIFDPRSEGTVYVGVGVPGGIYVTRDSGESWEAVPGQPVEWDEDILVFPAESQPQSTGPQPMKGVLAENGALYVTYADAPGPYGVTYGGVYVYNTTSSAWTNITPKTNNSFPAPFDNQTFPAGGFCGISVDSKNPERLVVVSLDRDPGPALDSMYLSHDGGKSWKDVSQLSTPSGSGGYWGHPIEEAAFKDGTAVPWLSFNWGPQWGGYGAPSPVRGLTKFGWWMTAVVIDPSDSDHVLYGTGATIWATDNLSKVDKNQSPGWYIQAQGIEESVALALASPNGGDSHLLTGLGDINGYRYGDLDVPQPMFDLPVLSNLNALDWAGQKPEIIIRAGPCGHNYTDGCGLAAYSADGGSSWTKFATCIPGINTSSSNPGVIAIDASGKDIVWSSAMTAYWPTLQAITPRTNQSGPYVTTDLGQTWVSPTGLNVQTPNISADRVQPRTFYSFTDGTWYLSRDGGLSYRAYKAKEVGLPAYSGALPIANFNRAGEIWLGLGDHGIYHTRNFGKKWTKITGRGVTARQLTIGAGARRSSEPTLFIVGKAASHGALSKDGVYRSDDNGKTWVRVNDEKHQYGGIAMIQGDPRVYGRVYLGTGGRGIIYADIKE

SEQ ID NO: 893 - protein, 815 aa, Neosartorya fischeri
MKFWLQQLGLAVLCASSAAARTAEHAYEFKSVAITGGGYITGIVGHPAEKNLLYARTDIGSTYRWEQELNKWIPLTDFLGPEDENLLGTESVAMDPTDPNRLYLAQGRYLSSNNSAFFVSNDRGATFTRYRAPFPMGANELGRNNGERLAVNPFKPNELWMGTRNAGLMKSSDRAKTWTNVTNFPDAAANGIGITFVIFDPQHEGTIYVGACIPGGLYYTTDGGKNWESIPGQPMQWDPSLLVYPNETQPQSAGPQPMKAVLASNGALYVTYADYPGPWGVAYGAVHVYNTTASIWTDITPNANNTSPKPYTPQAFPAGGYCGLSVAPDDPDTVVVVSLDRDPGPALDSMYLSRDGGKTWKDVSQLSTPPGSGGYWGHPIAEAALSNGTTVPWLSFNWGPQWGGYGAPSPVKGLTKFGWWMTAVLIDPSNPDHVLYGTGATIWATDTIAQADKNLAPKWYIQAQGIEETVTLAMISPREGAHLLSGAGDINGFRHDDLDTPQPMFGLPVFSNLNTLDWAGQRPEVIVRGGPCGHQYPDGCGQAAYSTDGGSEWTKFQTCIKGVNTSVHNPGVMTIDASGKYVVWTSAMYVVSPSVQAVTPPANDSGPYASSDWGKTWTSPRGLTVQTPYISADRVQPKTFYAFSGGVWYVSTDGGLSYDAFNATKLGLPAHTGAVPVVSVDRAGEIWLALGSNGVYHTTDFGKRWKRITHKGTVADLITVGAAAPGSTKPALFIRGSPGHPKKSDYGIYRSDDNGSTWDRVDDDDHRYGGFNLIQGDPRVYGRVYLGTGGRGLLYADIVPGQSDKEGNVPGTGGI

SEQ ID NO: 894 - protein, 238 aa, Aspergillus aculeatus
MKLSLLSLATLASAASLQRRSDFCGQWDTATAGDFTLYNDLWGESAGTGSQCTGVDSYSGDTIAWHTSWSWSGGSSSVKSYVNAALTFTPTQLNCISSIPTTWKWSYSGSSIVADVAYDTFLAETASGSSKYEIMVWLAALGGAGPISSTGSTIATPTIAGVNWKLYSGPNGDTTVYSFVADSTTESFSGDLNDFFTYLVDNEGVSDELYLTTLEAGTEPFTGSNAKLTVSEYSISIE

SEQ ID NO: 895 - protein, 241 aa, Aspergillus clavatus
MKFNLALALSLTVATAEAATELCKQWDSIIEGNFIVYNNLWGQGNADDGGHQCTTVKSISGDTVVWSTEWAWSGGPGQVKSYANAALQFTPTTLSSVSSIDSTWKWRDSYTGSDIVANVAYDMFLSSSATGSEEYEIMVWLAALGGAGPISSTGSPIATPTINGVQWDLYLGPNGAMQVYSFVAPSSTENFAGDMKGFIDYLTSEQGLSKDLYLLDVQAGTEPFSGSDAVLTVSEYSVNLA

SEQ ID NO: 896 - protein, 238 aa, Neosartorya fumigata
MKLSLSVALSLAAATAQAATQFCDQWGSVTEGNYILYNNLWGQAQATSGSQCTTFESLSGNTIVWNTKWSWSGGQGQVKSFANAALQFTPKKLSSVKSIDSTWKWNYSGSNIVADVAYDMFLSTSPGGDHNYEIMVWLGALGGAGPISSTGSPIATPTVAGIKFNLYLGPNGSMQVYSFVAQSTTNSFSGDMRDFFTYLESNQGLSSDLYLVDVQAGTEPFSGSNAVFTVSDYSVSVA

SEQ ID NO: 897 - protein, 240 aa, Aspergillus flavus
MKFLTPLVLSSLASAAALNRRADMCGQWDTTTTDKFTLYNNLWGEGNADSGSQCTGLDSDDGNTIAWHTSWTWTGGAGQVKSFANVAYNFEATQLSQLSSIPSTWKWENTGSDIVADVAYDLFTSSSADGDEEYEIMIWLAALGGAGPISSTGSAIATPTVGGQSWSLYSGPNGQMTVFSFVASSTTEDFSADLNDFLKYLQEEQGMPSSQYLTHVQAGTEPFSGSNVKFTTSSYSVSVA

SEQ ID NO: 898 - protein, 238 aa, Neosartorya fumigata
MKLSLSVALSLAASTAQAATQFCDQWGSVTEGNYILYNNLWGQAQATSGSQCTTFESLSGNTIVWNTKWSWSGGQGQVKSFANAALQFTPKKLSSVKSIDSTWKWNYSGSNIVADVAYDMFLSTSPGGDHNYEIMVWLGALGGAGPISSTGSPIATPTVAGIKFNLYLGPNGSMQVYSFVAQSTTNSFSGDMRDFFTYLESNQGLSSDLYLVDVQAGTEPFSGSNAVFTVSDYSVSVA

SEQ ID NO: 899 - protein, 241 aa, Aspergillus niger
MKVLALSALLSLASAASISRRSDFCGQWDTATAGDFILYNDLWGEDNASSGSQCTGVDSASGNEIAWHTSWSWEGGSSDVKSYANAALQFTGTQLSSISSIPSTWKWTYSGSDIVADVAYDMFLGSTADASSDEYEIMVWLAALGGAGPISSTGSTIATPTINGVTWDLYTGPNGDTTVYSFVAQSTTEDFSGDLNDFFTYLVDNEGVSDSLYLTTLEAGTEPFTGSDAELKVSEYSVSIE

SEQ ID NO: 900 - protein, 241 aa, Aspergillus niger
MKVLALSALLSLASAASISRRSDFCGQWDTATAGDFILYNDLWGEDNASSGSQCTGVDSASGSEIAWHTSWSWEGGSSDVKSYANAALQFTGTQLSSISSIPSTWKWTYSGSDIVADVAYDMFLGSTADASSDEYEIMVWLAALGGAGPISSTGSTIATPTINGVTWDLYTGPNGDTTVYSFVAQSTTEDFSGDLNDFFTYLVDNEGVSDSLYLTTLEAGTEPFTGSDAELKVSEYSVSIE

SEQ ID NO: 901 - protein, 240 aa, Aspergillus oryzae; identical to SEQ ID NO: 897

SEQ ID NO: 902 - protein, 250 aa, Aspergillus terreus
MKLSVLSLASLASAAALNAKVLTGKSLTRRADFCDQWGQVTTGNFILYNNLWGQGNADSGSQCTGLDSSSGNDSIAWHTSWSWSGGAGQVKSYANAAYVFTPKQLSALGSIPTSWSWKYTGSDIIANVAYDLFTSSTADGDNEYEIMIWLAALGGAGPISSTGSPVASPTVAGHSWDLYSGMNGQMQVYSFVASSQTESFSADLQEFIMYLQSNQGLPTSQYLVDVQAGTEPFSGSDATLTTSAYSVSVA

SEQ ID NO: 903 - protein, 239 aa, Emericella nidulans
MKLLALSLASLASAATITRRADFCGQWDTATAGNFIVYNNLWGQDNADSGSQCTGVDSANGNSVSWHTTWSWSGGSSSVKSYANAAYQFTATQLSSLSSIPSTWEWQYSTTDVVANVAYDLFTSSSIGGDSEYEIMIWLAALGGAGPISSTGSSIATVTLGGVTWNLYSGPNGSMQVYSFVASSTTESFSADLMDFINYLVENQGLSNSQYLTHVQAGTEPFTGSDATLTVSSYSVSVS

SEQ ID NO: 904 - protein, 238 aa, Neosartorya fischeri
MKFSLSVALSLAAATAQAATQFCDQWGSVTEGNYILYNNLWGQAQATSGSQCTTFESLSGNTIVWNTKWSWSGGQGQVKSFANAALQFTPKKLSSVKSIDSTWTWNYSGSNIVADVAYDMFLSTSPGGDHNYEIMVWLGALGGAGPISSTGSPIATPTVAGIKFNLYLGPNGSMQVYSFVAQSTTKSFSGDMRDFFTYLEGNQGLSSDLYLVDVQAGTEPFSGSNAVFTVSDYSVSVA

SEQ ID NO: 905 - protein, 406 aa, Neosartorya fumigata
MLYPRNLALFSLLSLSSAAPSQVERSPDAVLKPRAVCTPTAGGSPSIDDVPAIRKAIASCGNGGTIVFPAGSTYYLNSVLDLAGCSNCDIQVEGVLKFSGSTEYWGGKTAMLNIDMINGLRLRSLTGSGVIDGNGQNAYDRFASDKNYKRPTLLYITGGSNIEVSGLRQKNPPNVFNSVKGDTQHVTFKNLRMDATSNSQNPPKNTDGFDIGASTHVTISSVSVTNDDDCVAFKPGSNYVTVEDVTCTGSHGISVGSLGKSGTDVVQNILAHRINMIESTKAAGIKTYPSGNGHGLSTVKNVTFSDFNVRGCDYAFQIESCYGESESYCESNPGNAILQGIVVKGFSGTTSGKYDPVVANLNCGARGTCDVSMSAFSVKAPSGKATVLCDNTPSSLGVSCTSGASG

SEQ ID NO: 906 - protein, 406 aa, Aspergillus flavus
MISLNSIFLLSLVGLSRAAPSRSETSPDRTIKPRAACTPTAGGSSSTDDVPAIQEAITSCGDGGTIVIPADTTYYLNSVLDFKGCSNCDFQVEGLLQFTSSTDYWNGKTAMISVSDIDGLKLRSVTGSGVIDGNGQESWDKFAEDSSYKRPTLLYITGGSNIEVSGLRQKNPPNVFISVKGDTSNAQFTSLTMDATSNSDNLPKNTDAFDIGASTYVTISSVAITNDDDCVAFKPGANYVTVENVSCTGSHGISVGSLGKSSDDTVQNVYARNITMINSSKAAGIKTYPSGGDHGLSTVKNATFEDFIVDGCDYAFQIQSCYGEDDTYCEENPGDAVLEGIVVKGFTGTTSDKEDPVVANLNCGSKGTCDVTISGFEVKAPSGDAKILCGNTPSDLGVTCSSGASG

SEQ ID NO: 907 - protein, 406 aa, Neosartorya fumigata
MLYPRNLALFSLLSLSSAAPSQVERSPDAVLKPRAVCTPTAGGSPSIDDVPAIRKAIASCGNGGTIVFPAGSTYYLNSVLDLAGCSNCDIQVEGVLKFSGSTEYWGGKTAMLNIDMINGLRLRSLTGSGVIDGNGQNAYDRFASDKNYKRPTLLYITGGSNIEVSGLRQKNPPNVFNSVKGDTQHVTFKNLRMDATSNSQNPPKNTDGFDIGASTHVTISSVSVTNDDDCVAFKPGSNYVTVEDVTCTGSHGISVGSLGKSGPDVVQNILAHRITMIESTKAAGIKTYPSGNGHGLSTVKNVTFSDFNVRGCDYAFQIESCYGESESYCESNPGNAILQGIVVKGFSGTTSGKYDPVVANLNCGARGTCDVSMSAFSVKAPSGKATVLCDNTPSSLGVSCTSGASG

SEQ ID NO: 908 - protein, 406 aa, Aspergillus niger
MTLYRNLLLLASLGLSYAAPSKVQRAPDSSLHARAVCTPTAGGDSSTDDVPAITEALSSCGNGGTIVFPEGSTYYLNSVLDLGNCSNCDIQVEGLLKFASDTDYWSGRTAMISVSDVDGLKLRSLTGSGVIDGNGQDAWDLFASDSSYSRPTLLYITGGSNLEISGLRQKNPPNVFNSVKGGATNVVFSNLKMDANSKSDNPPKNTDGFDIGESTYVTITEVTVVNDDDCVALKPSSNYVTVDTISCTGSHGISVGSLGKSSDDSVKNIYVTGATMINSTKAAGIKTYPSGGDHGTSTVSNVTFTDFTVDNSDYAFQIQSCYGEDDDYCEENPGNAKLTDIVVSSFSGTTSDKYDPVVANIDCGSDGTCGISISGFDVKAPSGKSEVLCANTPSDLGVTCTSGASG

SEQ ID NO: 909 - protein, 406 aa, Aspergillus oryzae
MISLNSIFLLSLVGLSRAAPSRSETSPDRTIKPRAACTPTAGGSSSTDDVPAIQEAITSCGDGGIIIIPADTTYYLNSVLDFKGCSNCDFQVEGLLQFTSSTDYWNGKTAMITVSDIDGLKLRSVTGSGVIDGNGQESWDKFAEDSSYKRPTLLYITGGSNIEVSGLRQKNPPNVFISVKGDTSNAQFTSLTMDATSNSDNLPKNTDAFDIGASTYVTISSVAITNDDDCVAFKPGANYVTVENVSCTGSHGISVGSLGKSSDDTVQNVYARNITMINSSKAAGIKTYPSGGDHGLSTVKNATFEDFIVDGCDYAFQIQSCYGEDDTYCEENPGDAVLEGIVVKGFTGTTSDKEDPVVANLNCGSKGTCDVTISGFEVKAPSGDAKILCGNTPSDLGVTCSSGASG

SEQ ID NO: 910 - protein, 406 aa, Aspergillus tubingensis
MALYRNLYLLASLGLSSAAPSKVQRAPDSSIHARAVCTPTAGGDSSTDDVPAITEALSSCGNGGTIVFPEGSTYYLNSVLDLGSCSDCDIQVEGLLKFASDTDYWSGRTAMISVSNVDGLKLRSLTGSGVIDGNGQDAWDLFASDSSYSRPTLLYITGGSNLEISGLRQKNPPNVFNSVKGGATNVVFSNLKMDANSKSDNPPKNTDGFDIGESTYVTITEVTVVNDDDCVAFKPSSNYVTVDTISCTGSHGISVGSLGKSSDDSVKNIYVTGATMINSTKAAGIKTYPSGGDHGTSTVSNVTFNDFTVDNSDYAFQIQSCYGEDDDYCEENPGNAKLTDIVVSSFSGTTSDKYDPVVANLDCGADGTCGISISGFDVKAPSGKSEVLCANTPSDLGVTCTSGASG

SEQ ID NO: 911 - protein, 399 aa, Emericella nidulans
MTFGKAAFLSFSLFGASWAGPSRTLQARAVCTPKAGGSSSIDDVPAIVKSISACGDGGTIVFPEDSTYYLNSVLDLAGCSGCELQVEGLLKFASDTDYWNGRTAMINVKNIDGLTIRSLTGSGVIDGNGQNAYDRFAEDSSYDRPTPLYITGGGDIKVSNFRLKNAPNVFVSVKGGTTNAVFSDMRLDATSKSENLPKNTDGFDIGESTYVTISGTTVSNNDDCVAFKPGCNYLTVTDITCTGSHGLSVGSLGKSSDDIVQNVRVEGATMISSTKAAGIKTYPSGGDHGLSTVTNVTWKDITIQNCDYAIQIQSCYGEDEEYCETNPGDAVFSGIAFEGFSGTTSSKYDPVTGNLNCGEDGKCDVSVVDYSVKAPSGGAAENLTVTTYKNRCLCQARSV

SEQ ID NO: 912 - protein, 406 aa, Neosartorya fischeri
MLYYRNLALLSLLSLSSAAPSQVERSPDAVFKPRAVCTPTAGGSSSIDDVPAIRKAISSCGNGGTIVFPAGSTYYLNSVLDLAGCSNCDIQVEGLLMFSGSTEYWGGKTAMININKINALKLRSLTGSGVIDGNGQNAYDLFASNSDYERPTLLYITGGSNIEVSGLRQRNPPNVFNSVKGDAKDVTFTNLRMDATSRSDNPPKNTDGFDIGSSTHVTISSVSVSNDDDCVALKPGCNYVTVENVTCTGSHGISVGSLGKSSADTVQNVYAHRITMIDSTKAAGIKTYPSGNGHGLSTVKNVTFSDFNVRGCDYAFQIQSCYGESASYCASHPGNAILQDIIVKGFSGTTSGKDDWVVADLNCGARGTCDVSMSDFSVKAPSGKATVLCANTPSSLGVTCTSGASG

SEQ ID NO: 913 - protein, 211 aa, Aspergillus kawachii
MKVTAAFAGLLVTAFAAPVPEPVLVSRSAGINYVQNYNGNLGDFTYDESAGTFSMYWEDGVSSDFVVGLGWTTGSSNAITYSAEYSASGSSSYLAVYGWVNYPQAEYYIVEDYGDYNPCSSATSLGTVYSDGSTYQVCTDTRTNEPSITGTSTFTQYFSVRESTRTSGTVTVANHFNFWAQHGFGNSDFNYQVMAVEAWSGAGSASVTISS

SEQ ID NO: 914 - protein, 211 aa, Aspergillus niger
MKVTAAFAGLLVTAFAPPVPEPVLVSRSAGINYVQNYNGNLGDFTYDESAGTFSMYWEDGVSSDFVVGLGWTTGSSNAITYSAEYSASGSSSYLAVYGWVNLSQAEYYIVEDYGDYNPCSSATSLGTEYSDGSTYQVCTDTRTNEPSITGTSTFTQYFSVRESTRTSGTVTVAIHFNFWAQHGFGNSDFNYQVMAVEAWSGACSASVTISS

SEQ ID NO: 915 - protein, 211 aa, Aspergillus niger
MKVTAAFASLLLTAFAAPAPEPVLVSRSAGINYVQNYNGNLGDFTYDESTGTFSMYWEDGVSSDFVVGLGWTTGSSKSITYSAQYSASSSSSYLAVYGWVNSPQAEYYIVEDYGDYNPCSSATSLGTVYSDGSTYQVCTDTRTNAPSITGTSTFTQYFSVRESTRTSGTVTIANHFNFWAQHGFGNSNFNYQVMAVEAWNGAGSASVTISS

SEQ ID NO: 916 - protein, 211 aa, Aspergillus niger
MKVTAAFASLLLTAFAAPAPEPVLVSRSAGINYVQNYNGNLGDFTYDESTGTFSMYWEDGVSSDFVVGLGWTTGSSKSITYSAQYSASSSSSYLAVYGWVNSPQAEYYIVEDYGDYNPCSSATSLGTVYSDGSTYQVCTDTRRTRPSITGTSTFTQYFSVRESTRTSGTVTIANHFNFWAQHGFGNSNFNYQVMAVEAWNGVGSASVTISS

SEQ ID NO: 917 - protein, 211 aa, Aspergillus niger
MKVTAAFAGLLVTALAAPAPEPVLVSRSAGINYVQNYNGNLGDFTYDESAGTFSMYWEDGVSSDFVVGLGWTTGSSNPITYSADYSASGSSSYLAVYGWDNYPQAEYYIVEDYGDYNPCSSATSLGTVYSDGSTYQVCTDTRTNEPSITGTSTFTQYFSVRESTRTSGTVTVANHFNFWAQHGFGNSDFNYQVVAVEAWSGAGSASVTISS

SEQ ID NO: 918 - protein, 327 aa, Aspergillus aculeatus
MVQIKAAALAVLFASNVLANPIEPRQASVSIDAKFKAHGKKYLGTIGDQYTLNKNAKTPAIIKADFGQLTPENSMKWDATEPNRGQFSFSGSDYLVNFAQSNGKLIRGHTLVWHSQLPSWVQSIYDKGTLIQVMQNHIATVMQRYKGKVYAWDVVNEIFNEDGSLRQSHFYNVIGEDYVRIAFETARAVDPNAKLYINDYNLDSASYPKLTGLVNHVKKWVAAGVPIDGIGSQTHLSAGAGAAVSGALNALAGAGTKEVAITELDIAGASSTDYVNVVKACLNQPKCVGITVWGVADPDSWRSSSSPLLFDSNYNPKAAYTAIANAL

SEQ ID NO: 919 - protein, 211 aa, Aspergillus awamori; identical to SEQ ID NO: 913

SEQ ID NO: 920 - protein, 229 aa, Aspergillus clavatus
MVSFKYLFLAASALGALAAPVEVEESSWFNETALHEFAERAGTPSSTGWNNGYYYSFWTDNGGTVNYQNGNGGSYSVQWKDTGNFVGGKGWNPGSARTINYSGSFNPSGNAYLTVYGWTTNPLVEYYIVENYGTYNPGNGGTYRGSVYSDGANYNIYTATRYNAPSIEGDKTFTQYWSVRQSKRTGGTVTTANHFNAWAQLGMSLGTHNYQIVATEGYQSSGSSSITVY

SEQ ID NO: 921 - protein, 228 aa, Neosartorya fumigata
MVSFSYLLLACSAIGALAAPVEPETTSFNETALHEFAERAGTPSSTGWNNGYYYSFWTDGGGDVTYTNGAGGSYSVNWRNVGNFVGGKGWNPGSARTINYGGSFNPSGNGYLAVYGWTTNPLIEYYVVESYGTYNPGSGGTFRGTVNTDGGTYNIYTAVRYNAPSIEGTKTFTQYWSVRTSKRTGGTVTMANHFNAWSRLGMNLGTHNYQIVATEGYQSSGSASITVY

SEQ ID NO: 922 - protein, 232 aa, Aspergillus flavus
MVSFSSILLACSAAIGALATPIEPLADHPNEAFNETAFNDLVGRSTPSSTGYNNGYYYSFWTDGGGDVTYTNGNGGSYSVQWSNVGNFVGGKGWNPGSSRAITYSGSFNPSGNGYLAVYGWTTDPLIEYYIVESYGTYNPGSGGTYKGQVTSDGGTYNIYTSVRTNAPSIIGTATFTQFWSVRTSKRVGGTVTTGNHFNAWAKYGLTLGTHNYQIVATEGYQSSGSSAITVY

SEQ ID NO: 923 - protein, 228 aa, Neosartorya fumigata; identical to SEQ ID NO: 921

SEQ ID NO: 924 - protein, 327 aa, Aspergillus kawachii
MVQIKAAALAMLFASHVLSEPIEPRQASVSIDTKFKAHGKKYLGNIGDQYTLTKNSKTPAIIKADFGALTPENSMKWDATEPSRGQFSFSGSDYLVNFAQSNNKLIRGHTLVWHSQLPSWVQAITDKNTLIEVMKNHITTVMQHYKGKIYAWDVVNEIFNEDGSLRDSVFYKVIGEDYVRIAFETARAADPNAKLYINDYNLDSASYPKLAGMVSHVKKWIEAGIPIDGIGSQTHLSAGGGAGISGALNALAGAGTKEIAVTELDIAGASSTDYVEVVEACLDQPKCIGITVWGVADPDSWRSSSTPLLFDSNYNPKPAYTAIANAL

SEQ ID NO: 925 - protein, 211 aa, Aspergillus niger
MKVTAAFAGLLVTAFAAPVPEPVLVSRSAGINYVQNYNGNLGDFTYDESAGTFSMYWEDGVSSDFVVGLGWTTGSSKAITYSAEYSASGSSSYLAVYGWVNYPQAEYYIVEDYGDYNPCSSATSLGTVYSDGSTYQVCTDTRTNEPSITGTSTFTQYFSVRESTRTSGTVTVANHFNFWAQHGFGNSDFNYQVMAVEAWSGAGSASVTISS

SEQ ID NO: 926 - protein, 232 aa, Aspergillus oryzae; identical to SEQ ID NO: 922

SEQ ID NO: 927 - protein, 231 aa, Aspergillus terreus
MVSFLRLAVACFAAVGALAAPVESLEERSDELFNSTLHEFAERSTPSSTGWSNGYYYSFWTDGGGSVTYTNGAAGQYSVQWSNVGNFVGGKGWNPGSARTINYGGSFNPSGNGYLAVYGWTTNPLVEYYVVESYGTYNPGSGGTYKGTVNSDGGTYNIYTATRYNAPSIIGTATFTQYWSVRTSKRTGGTVTMANHFNAWASHGMNLGTHNYQIVATEGYQSSGSSSITVY

SEQ ID NO: 928 - protein, 211 aa, Aspergillus tubingensis
MKVTAAFAGLLVTAFAAPAPEPDLVSRSAGINYVQNYNGNLGDFTYDESAGTFSMYWEDGVSSDFVVGLGWTTGSSNAITYSAEYSASGSASYLAVYGWVNYPQAEYYIVEDYGDYNPCSSATSLGTVYSDGSTYQVCTDTRTNEPSITGTSTFTQYFSVRESTRTSGTVTVANHFNFWAHHGFGNSDFNYQVVAVEAWSGAGSASVTISS

SEQ ID NO: 929 - protein, 225 aa, Emericella nidulans
MVSFKSLLVLCCAALGAFATPVGSEDLAAREASLLERSTPSSTGWSNGYYYSFWTDGGGDVTYTNGAGGSYTVQWSNVGNFVGGKGWNPGSTRTINYGGSFNPSGNGYLAVYGWTQNPLIEYYIVESYGTYNPGSGGQHRGTVYSDGATYDIYTATRYNAPSIEGTATFEQFWSVRQSKRTGGTVTTANHFNAWAALGMRLGTHNYQIVATEGYQSSGSASITVY

SEQ ID NO: 930 - protein, 228 aa, Neosartorya fischeri
MVSFSYLLLACSAIGALAAPVESEDTSFNETALHEFAERGGTPSSTGWNNGYYYSFWTDGGGDVTYTNGAGGSYSVNWRNVGNFVGGKGWNPGSARTINYGGSFNPSGNGYLAVYGWTTNPLIEYYVVESYGTYNPSSGGTFKGTVNTDGGTYNIYTAVRYNAPSIEGTKTFTQYWSVRTSKRAGGTVTMANHFNAWSRLGMNLGTHNYQIVATEGYQSSGSSSITVY

SEQ ID NO: 931 - protein, 221 aa, Aspergillus clavatus
MVSFSSLALALSTVVGVLAAPGSEKYVELAKHQLTHSQTGTKNGYYYSFWTDNRGQVSYTNGKGGQYSVNWKDCGNFVAGKGWNPASAKTVTYSGNWKPSGNSYVSVYGWTQNPLIEFYIVESFGSYNPSTGATELGTVESDGGTYKIYKTKRVDAPSIEGKKTFDQFWSVRTSHRVGGTVTTKNHFNAWAKSGLKLGTFNYMILATEGYHSSGSATMTVS

SEQ ID NO: 932 - protein, 221 aa, Neosartorya fumigata
MVSFSSLVLAASTVAGVLATPGSEQYVELAKRQLTSSQTGTNNGYYYSFWTDGGGQVTYTNGNGGQYQVDWNNCGNFVAGKGWNPASEKAVTYSGSWQTSGNGYLSVYGWTTSPLVEFYIVESYGSYDPSTGATHLGTVESDGATYNLYKTTRTNAPSIQGTATFDQYWSVRTSHRQSGTVTTKNHFDAWRNAGLQLGNFDYMIVATEGYQSSGSATITVS

SEQ ID NO: 933 - protein, 221 aa, Aspergillus flavus
MVSFSSLLLAVSAVSGALAAPGDSTLVELAKRAITSSETGTNNGYYYSFWTNGGGDVEYTNGNGGQYSVKWTNCDNFVAGKGWNPGSAKTVTYSGEWESNSNSYVSLYGWTQNPLVEYYIVDKYGDYDPSTGATELGTVESDGGTYKIYKTTRENAPSIEGTSTFNQYWSVRQSGRVGGTITAQNHFDAWANVGLQLGTHNYMILATEGYKSSGSATITVE

SEQ ID NO: 934 - protein, 221 aa, Neosartorya fumigata; identical to SEQ ID NO: 932

SEQ ID NO: 935 - protein, 225 aa, Aspergillus kawachii
MLTKNLLLCFAAAKAVLAVPHDSVVERSDALHKLSERSTPSSTGENNGYYYSFWTDGGGDVTYTNGNAGSYSVEWSNVGNFVGGKGWNPGSAKDITYSGTFTPSGNGYLSVYGWTTDPLIEYYIVESYGDYNPGSGGTYKGTVTSDGSVYDIYTATRTNAPSIQGTATFTQYWSVRQNKRVGGTVTTSNHFNAWAKLGMNLGTHNYQILATEGYQSSGSSSITIQ

SEQ ID NO: 936 - protein, 225 aa, Aspergillus niger
MLTKNLLLCFAAAKAALAVPHDSVAQRSDALHMLSERSTPSSTGENNGFYYSFWTDGGGDVTYTNGDAGAYTVEWSNVGNFVGGKGWNPGSAQDITYSGTFTPSGNGYLSVYGWTTDPLIEYYIVESYGDYNPGSGGTYKGTVTSDGSVYDIYTATRTNAASIQGTATFTQYWSVRQNKRVGGTVTTSNHFNAWAKLGMNLGTHNYQIVATEGYQSSGSSSITVQ

SEQ ID NO: 937 - protein, 225 aa, Aspergillus niger; identical to SEQ ID NO: 936

SEQ ID NO: 938 - protein, 221 aa, Aspergillus oryzae; identical to SEQ ID NO: 933

SEQ ID NO: 939 - protein, 221 aa, Emericella nidulans
MVSFSSLLLACSAVTAFAAPSDQSIAERSLSERSTPSSTGTSGGYYYSFWTDGGGDVTYTNGDGGSYTVEWTNVGNFVGGKGWNPGSSQTISYSGSFNPSGNGYLSVYGWTQNPLIEYYIVESYGDYNPGTAGTHQGTLESDGSTYDIYTATRENAPSIEGTATFTQFWSVRQSKRTSGSVTTQNHFDAWSQLGMTLGTHNYQIVAVEGYQSSGSASITVS

SEQ ID NO: 940 - protein, 221 aa, Neosartorya fischeri
MVSFSSLVLALSTVAGVLAAPGSEQYVELAKRQLTSSQTGTNNGYFYSFWTDGGGKVTYNNGNGGQYQVDWTNCGNFVAGKGWNPGSERTVTYSGSWESSGNGYLSVYGWMTNPLVEYYIVESYGSYDPSTGATHLGTVESDGGTYNIYKTTRTNAPSIQGTATFDQYWSVRTSHRVSGTVTTKNHFDAWKKAGLKLGNFDYMIVATEGYQSSGSATLTVS

SEQ ID NO: 941 - protein, 317 aa, Aspergillus clavatus
MVVLSKIFSCALFLSLGSAAAIDIRQTSSINNAFKSHGKKYFGTCGDQNTLSIPQNSAIIKADFGALTPENSMKWDATEPSRGKFNFAGADHLVNYAKQNGKLVRGHTLVWYSQLPAWVKAISDKQTLTSVLKNHITTVMSRYKGQVYAWDVVNEIFEENGSLRNSVFYRVLGEDFVRIAFETARAVDPHAKLYINDYNLDSANYGKTQAMVKHVKKWLAAGIPIDGIGSQSHLSQALSALASTGVSEIAITELDIKGANPSEYVAVTKACLEVKKCIGITVWGVSDKNSWRKDNSPLLFDRNYNPKPAYNAIIAAL

SEQ ID NO: 942 - protein, 316 aa, Neosartorya fumigata
MVVLSKLVSSILFVSLVSAGVIEERQAASINQAFTSHGKKYFGTASDQALLQKSQNEAIVRKDFGQLTPENSMKWDATEPSQGRFNFAGADFLVNYAKQNGKKVRGHTLVWHSQLPSWVSAISDKNTLTSVLKNHITTVMTRYKGQIYAWDVVNEIFNEDGSLRDSVFSRVLGEDFVRIAFETARSVDPSAKLYINDYNLDSASYGKTQGMVRYVKKWLAAGIPIDGIGTQTHLGALTALASSGVSEVAITELDIAGASSQDYVNVVKACLDVPKCVGITVWGVSDRDSWRSGSSPLLFDSNYQPKAAYNAIIAAL

SEQ ID NO: 943 - protein, 325 aa, Neosartorya fumigata
MVVLSKLVSSILFVSLVSAGVIEERQAASINQAFTSHGKKYFGTASDQALLQKSQNEAIVRKDFGQLTPENSMKWDATEPSQGRFNFAGADFLVNYAKQNGKKVRGHTLVWHSQLPSWVSAISDKNTLTSVLKNHITTVMTRYKGQIYAWDVVNEIFNEDGSLRDSVFSRVLGEDFVRIAFETARSVDPSAKLYINDYNLDSASYGKTQGMVRYVKKWLAAGIPIDGIGTQTHLGAGASSSVKGALTALASSGVSEVAITELDIAGASSQDYVNVVKACLDVPKCVGITVWGVSDRDSWRSGSSPLLFDSNYQPKAAYNAIIAAL

SEQ ID NO: 944 - protein, 327 aa, Aspergillus niger [sequence omitted]

SEQ ID NO: 945 - protein, 327 aa, Aspergillus niger
MVQIKVAALAMLFASQVLSEPIDPRQASVSIDTKFKAHGKKYLGNIGDQYTLTKNSKTPAIIKADFGALTPENSMKWDATEPSRGQFSFSGSDYLVNFAQSNNKLIRGHTLVWHSQLPSWVQSITDKNTLIEVMKNHITTVMQHYKGKIYAWDVVNEIFNEDGSLRDSVFYKVIGEDYVRIAFETARAADPNAKLYINDYNLDSASYSKLTGMVSHVKKWIAAGIPIDGIGSQTHLSAGGGAGISGALNALAGAGTKEIAVTELDIAGASSTDYVEVVEACLNQPKCIGITVWGVADPDSWRSSSTPLLFDSNYNPKPAYDAIANAL

SEQ ID NO: 946 - protein, 326 aa, Aspergillus terreus
MVRLTVLAGFLLTSAACSACVIGERQAASSINNAFKAKGKKYFGTCGDQGTLSDSTNSAIVKADFGQLTPENSMKWDATEPNRGQFSFGGADYLVNYAASNGKMIRGHTLVWHSQLPGWVQGITDKNTLTSVLKNHITTVMQRYKGKVYAWDVVNEIFNEDGSLRKSVFYNVLGEDFVRIAFETARSVDPQAKLYINDYNLDNANYAKTKGMADHVRKWISQGIPIDGIGSQTHLGSGGSWTVKDALNTLASSGVSEVAITELDIAGASSTDYVNVVNACLSVSKCVGITVWGVSDKYSWRSNDKPLLFDSNFQPKAAYNAIISAL

SEQ ID NO: 947 - protein, 326 aa, Aspergillus terreus
MVRLTVLAGFLLTSAACSACVIGERQAAASINNAFKAKGKKYFGTCGDQGTLSDSTNSAIVKADFGQLTPENSMKWDATEPNRGQFSFGGADYLVNYATSNGKMIRGHTLVWHSQLPGWVQGITDKNTLTSVLKNHITTVMQRYKGKIYAWDVVNEIFNEDGSLRKSVFYNVLGEDFVRIAFETARSVDPQAKLYINDYNLDNANYAKTKGMADHVRKWISQGIPIDGIGSQTHLGSGGSWTVKDALNTLASSGVSEVAITELDIAGASSTDYVNVVNACLSVSKCVGITVWGVSDKYSWRSNDKPLLFDSNFQPKAAYNAIISAL

SEQ ID NO: 948 - protein, 327 aa, Emericella nidulans
MVHLKTLAGSAVFASLATAAVLPRQSASLNDLFVAAGKSYFGTCSDQALLQNSQNEAIVASQFGVITPENSMKWDALEPSQGNFGWSGADYLVDYATQHNKKVRGHTLVWHSQLPSWVSSIGDANTLRSVMTNHINEVVGRYKGKIMHWDVVNEIFNEDGTFRNSVFYNLLGEDFVRIAFETARAADPDAKLYINDYNLDSASYAKTQAMASYVKKWLAEGVPIDGIGSQAHYSSSHWSSTEAAGALSSLANTGVSEVAITELDIAGAASSDYLNLLNACLNEQKCVGITVWGVSDKDSWRASDSPLLFDGNYQPKDAYNAIVNALS

SEQ ID NO: 949 - protein, 314 aa, Neosartorya fischeri
MVVLSKLISSILFASLVSAAVIERQATSINQAFTSHGKKYFGTASDQRLLQNSQNEAIVRKDFGQLTPENSMKWDATEPSRGSFNFAGADFLVNYAKQNGMKVRGHTLVWHSQLPSWVSAITDKNTLTSVLKNHITTVMTRYKGQIYHWDVVNEIFNEDGSLRDSVFSRVLGEDFVRIAFETARSVDPSAKLYINDYNLDSASYGKTQGMVSHVKKWLAAGIPIDGIGSQTHLALTALASSGVSEVAITELDIAGASSQDYVNVVNACLGVPKCVGITVWGVSDKDSWRSSSSPLLFDSNYQPKAAYNAIIAAL

SEQ ID NO: 950 - protein, 805 aa, Aspergillus aculeatus
MAVAALALLALLPQALGQHNSSYVDYNVEANPDLFPQCLDTISLSFPDCQSGPLSKNLVCDSTASPYDRAAALVSLFTLEELIANTGNTSPGVPRLGLPPYQVWSEALHGLGRANFTDNGALHAGRPSFPSPILSAAAFNRTLINQIASIISTQGRAFNNAGRFGLDVYSPNINTFRHPVWGRGQETPGEDAYTLTAAYAYEYITGIQGGVNPEHLKLAATAKHFAGYDIENWDNHSRLGNDVNITQQDLAEYYTPQFLVAARDAHVHSFMCSYNAVNGVPSCSNTFFLQTLLRDTFSFVDHGYVSGDCGAVYGVFNPHGYAANEPSAAADAILAGTDIDCGTSYQYHFNESITTGAVARDDIERGFIRLYANLVELGYFDGNSSSSNPYRSLGWPDVQKTDAWNISYEAAVEGIVLLKNDGTLPLASPSEGKNKSIALIGPWANATTQLQGNYYGDAPYLISPVDAFTAAGYTVHYAPGTEISTNSTANFSAALSAARAADTIVFLGGIDNTIEAEAQDRSSIAWPGNQLELISQLAAQKSDDQPLVVYQMGGGQVDSSSLKFNAKVNALLWGGYPGQSGGLALRDILTGARAPAGRLTTTQYPAAYAESFSALDMNLRPNETTQNPGQTYMWYTGEPVYAFGHGLFYTTFNASSAQAAKTKYTFNITDLTSAAHPDTTTVGQRTLFNFTASITNSGQRDSDYTALVYANTSTAGPSPYPNKWLVGFDRLAAVAKEGGTAELNVPVAVDRLARVDEAGNTVLFPGRYEVALNNEREVVVEVELVGEQVVLLKWPEEVQGVAGDE

SEQ ID NO: 951 - protein, 804 aa, Aspergillus awamori
MAHSMSRPVAATAAALLALALPQALAQANTSYVDYNIEANPDLYPLCIETIPLSFPDCQNGPLRSHLICDETATPYDRAASLISLFTLDELIANTGNTGLGVSRLGLPAYQVWSEALHGLDRANFSDSGAYNWATSFPQPILTTAALNRTLIHQIASIISTQGRAFNNAGRYGLDVYAPNINTFRHPVWGRGQETPGEDVSLAAVYAYEYITGIQGPDPESNLKLAATAKHYAGYDIENWHNHSRLGNDMNITQQDLSEYYTPQFHVAARDAKVQSVMCAYNAVNGVPACADSYFLQTLLRDTFGFVDHGYVSSDCDAAYNIYNPHGYASSQAAAAAEAILAGTDIDCGTTYQWHLNESITAGDLSRDDIEQGVIRLYTTLVQAGYFDSNTTKANNPYRDLSWSDVLETDAWNISYQAATQGIVLLKNSNNVLPLTEKAYPPSNTTVALIGPWANATTQLLGNYYGNAPYMISPRAAFEEAGYKVNFAEGTGISSTSTSGFAAALSAAQSADVIIYAGGIDNTLEAEALDRESIAWPGNQLDLIQKLASAAGKKPLIVLQMGGGQVDSSSLKNNTKVSALLWGGYPGQSGGFALRDIITGKKNPAGRLVTTQYPASYAEEFPATDMNLRPEGDNPGQTYKWYTGEAVYEFGHGLFYTTFAESSSNTTTKEVKLNIQDILSRTHEELASITQLPVLNFTANIRNTGKLESDYTAMVFANTSDAGPAPYPKKWLVGWDRLGEVKVGETRELRVPVEVGSFARVNEDGDWVLFPGTFELALNLERKVRVKVVLEGEEEVVLKWPGKE

SEQ ID NO: 952 - protein, 792 aa, Aspergillus clavatus
MSAIKSIATVLAAILPSVLAQANTSYADYNTEANPDLTPQSVATIDLSFPDCDNGPLSKTIVCDTLTSPYDRAAALISLFTLEELVNATGNTSPGVPRLGLPPYQVWNEALHGLDRAYFTDEGQFSWSTSFPMPILTMSALNRTLINQVASIISTQGRAFSNAGRYGLDVYSPNINSFRHPVWGRGQETPGEDAYCLSSAYAYEYITGIQGGVDPKSLKLVATAKHYAGYDIENWDGHSRLGNDMNITQQDLSEYYTPQFLVAARDAKVRSVMCSYNAVNGVPSCANSFFLQTLLRDTFGFVEDGYISSDCDSAYNVFNPHEYAANVSSAAADSIRAGTDIDCGTTYQYYFDEAVDQNLLSRADIERGVIRLYSNLMRLGYFDGNSSAYRNLTWNDVVTTNSWNISYEVEGTVLLKNDGTLPLSESIRSIALVGPWMNVSTQLQGNYFGPAPYLISPLDAFRDSHLDVNYAFGTNISSNSTDGFSKALSAAKKSDAIIFAGGIDNSLEAETLDRMNITWPGKQLELIDQLSQLGKPLIVLQMGGGQVDSSLLKSNKNVNSLIWGGYPGQSGGQALLDIITGKRAPAGRLVVTQYPAEYATQFPATDMSLRPHGNNPGQTYMWYTGTPVYEFGHGLFYTTFRVSHARAVKIKPTYNIQDLLAQPHPGYIHVEQMPFLNFTVDITNTGKASSDYTAMLFANTTAGPAPYPKKWLVGFDRLPTLGPSTSKLMTIPVTINSMARTDELGNRVLYPGKYELALNNERSVVLPLSLTGKPAVLSKWPLEEQLIPLAKS

SEQ ID NO: 953 - protein, 792 aa, Neosartorya fumigata
MSVAKSIAAVLVALLPGALAQANTSYVDYNVEANPNLTPQSVATIDLSFPDCENGPLSKTLVCDTSARPHDRAAALVSMFTFEELVNNTGNTSPGVPRLGLPPYQVWSEALHGLDRANFTDEGEYSWATSFPMPILTMSALNRTLINQIATIIATQGRAFNNVGRYGLDVYAPNINAFRSAMWGRGQETPGEDAYCLASAYAYEYITGIQGGVDPEHLKLVATAKHYAGYDLENWDGHSRLGNDMNITQQELSEYYTPQFLVAARDAKVHSVMCSYNAVNGVPSCANSFFLQTLLRDTFGFVEDGYVSSDCDSAYNVWNPHEFAANITGAAADSIRAGTDIDCGTTYQYYFGEAFDEQEVTRAEIERGVIRLYSNLVRLGYFDGNGSVYRDLTWNDVVTTDAWNISYEAAVEGIVLLKNDGTLPLAKSVRSVALIGPWMNVTTQLQGNYFGPAPYLISPLNAFQNSDFDVNYAFGTNISSHSTDGFSEALSAAKKSDVIIFAGGIDNTLEAEAMDRMNITWPGNQLQLIDQLSQLGKPLIVLQMGGGQVDSSSLKSNKNVNSLIWGGYPGQSGGQALLDIITGKRAPAGRLVVTQYPAEYATQFPATDMSLRPHGNNPGQTYMWYTGTPVYEFGHGLFYTTFHASLPGTGKDKTSFNIQDLLTQPHPGFANVEQMPLLNFTVTITNTGKVASDYTAMLFANTTAGPAPYPNKWLVGFDRLASLEPHRSQTMTIPVTIDSVARTDEAGNRVLYPGKYELALNNERSVVLQFVLTGREAVIFKWPVEQQQISSA

SEQ ID NO: 954 - protein, 797 aa, Aspergillus flavus
MPGAASIVAVLAALLPTALGQANQSYVDYNIEANPDLFSECLETGGTSFPDCESGPLSKTLVCDTSAKPHDRAAALVSLLTFEELVNNTANTGHGAPRIGLPAYQVWNEALHGVAHADFSDAGDFSWSTSFPQPISTMAALNRTLIHQIATIISTQGRAFMNAGRYGLDVYSPNINTFRHPVWGRGQETPGEDAYCLASTYAYEYITGIQGGVDANPLKLIATAKHYAGYDIENWDNHSRLGNDMQITQQDLAEYYTPQFLVASRDAKVHSVMCSYNAVNGVPSCSNSFFLQTLLRDTFDFVEDGYVSGDCGAVYNVFNPHGYATNESSAAADSIRAGTDIDCGVSYPRHFQESFHDQEVSRQDLERGVTRLYASLIRAGYFDGKTSPYRNITWSDVVSTNAQNLSYEAAAQSIVLLKNDGILPLTTSSSTKTIALIGPWANATTQMLGNYYGPAPYLISPLQAFQDSEYKITYTIGTNTTTDPDSTSQSTALTTAKEADLIIFAGGIDNTLETEAQDRSNITWPSNQLSLITKLADLGKPLIVLQMGGGQVDSSALKNNKNVNALIWGGYPGQSGGQALADIITGKRAPAARLVTTQYPAEYAEVFPAIDMNLRPNGSNPGQTYMWYTGTPVYEFGHGLFYTNFTASASAGSGTKNRTSFNIDEVLGRPHPGYKLVEQMPLLNFTVDVKNTGDRVSDYTAMAFVNTTAGPAPHPNKWLVGFDRLSAVEPGSAKTMVIPVTVDSLARTDEEGNRVLYPGRYEVALNNEREVVLGFTLTGEKAVLFKWPKEEQLIAPQ

SEQ ID NO: 955 - protein, 792 aa, Neosartorya fumigata
MSVAKSIAAVLVALLPGALAQANTSYVDYNVEANPDLTPQSVATIDLSFPDCENGPLSKTLVCDTSARPHDRAAALVSMFTFEELVNNTGNTSPGVPRLGLPPYQVWSEALHGLDRANFTDEGEYSWATSFPMPILTMSALNRTLINQIATIIATQGRAFNNVGRYGLDVYAPNINAFRSAMWGRGQETPGEDAYCLASAYAYEYITGIQGGVDPEHLKLVATAKHYAGYDLENWDGHSRLGNDMNITQQELSEYYTPQFLVAARDAKVHSVMCSYNAVNGVPSCANSFFLQTLLRDTFGFVEDGYVSSDCDSAYNVWNPHEFAANITGAAADSIRAGTDIDCGTTYQYYFGEAFDEQEVTRAEIERGVIRLYSNLVRLGYFDGNGSVYRDLTWNDVVTTDAWNISYEAAVEGIVLLKNDGTLPLAKSVRSVALIGPWMNVTTQLQGNYFGPAPYLISPLNAFQNSDFDVNYAFGTNISSHSTDGFSEALSAAKKSDVIIFAGGIDNTLEAEAMDRMNITWPGNQLQLIDQLSQLGKPLIVLQMGGGQVDSSSLKSNKNVNSLIWGGYPGQSGGQALLDIITGKRAPAGRLVVTQYPAEYATQFPATDMSLRPHGNNPGQTYMWYTGTPVYEFGHGLFYTTFHASLPGTGKDKTSFNIQDLLTQPHPGFANVEQMPLLNFTVTITNTGKVASDYTAMLFANTTAGPAPYPNKWLVGFDRLASLEPHRSQTMTIPVTIDSVARTDEAGNRVLYPGKYELALNNERSVVLQFVLTGREAVVFKWPVEQQQISSA

SEQ ID NO: 956 - protein, 804 aa, Aspergillus japonicus
MAVAALALLALLPQALGQHNSSYVDYNVEANPDLFPQCLDTISLSFPDCQSGPLSKNLVCDSTASPYDRAAALVSLFTLEELIANTGNTSPGVPRLGLPPYQVWSEALHGLARANFTDNGAYSWATSFPSPILSAAAFNRTLINQIASIISTQGRAFNNAGRFGLDVYSPNINTFRHPVWGRGQETPGEDAYTLTAAYAYEYITGIQGGVNPEHLKLAATAKHFAGYDIENWDNHSRLGNDVNITQQDLAEYYTPQFLVAARDAHVHSFMCSYNAVNGVPSCSNTFFLQTLLRDTFSFVDHGYVSGDCGAVYGVFNPHGYAANEPSAAADAILAGTDIDCGTSYQYHFNESITTGAVARDDIERGFIRLYANLVELGYFDGNSSSSNPYRSLGWPDVQKTDAWNISYEAAVEGIVLLKNDGTLPLASPSEGKNKSIALIGPWANATTQLQGNYYGDAPYLISPVDAFTAAGYTVHYAPGTEISTNSTANFSAALSAARAADTIVFLGGIDNTIEAEAQDRSSIAWPGNQLELISQLAAQKSDDQPLVVYQMGGGQVDSSALKSNAKVNALLWGGYPGQSGGLALRDILTGARAPAGRLTTTQYPAAYAESFSALDMNLRPNETTQNPGQTYMWYTGEPVYAFGHGLFYTTFNASSAQAAKTKYTFNITDLTSAAHPDTTTVGQRTLFNFTASITNSGQRDSDYTALVYANTSTAGPSPYPNKWLVGFDRLAAVAKEGGTAELNVPVAVDRLARVDEAGNTVLFPGRYEVALNNEREVVVEVELVGEQVVLLKWPEEVQGVAGDE

SEQ ID NO: 957 - protein, 804 aa, Aspergillus niger
MAHSMSRPVAATAAALLALALPQALAQANTSYVDYNIEANPDLYPLCIETIPLSFPDCQNGPLRSHLICDETATPYDRAASLISLFTLDELIANTGNTGLGVSRLGLPAYQVWSEALHGLDRANFSDSGAYNWATSFPQPILTTAALNRTLIHQIASIISTQGRAFNNAGRYGLDVYAPNINTFRHPVWGRGQETPGEDVSLAAVYAYEYITGIQGPDPESNLKLAATAKHYAGYDIENWHNHSRLGNDMNITQQDLSEYYTPQFHVAARDAKVQSVMCAYNAVNGVPACADSYFLQTLLRDTFGFVDHGYVSSDCDAAYNIYNPHGYASSQAAAAAEAILAGTDIDCGTTYQWHLNESIAAGDLSRDDIEQGVIRLYTTLVQAGYFDSNTTKANNPYRDLSWSDVLETDAWNISYQAATQGIVLLKNSNNVLPLTEKAYPPSNTTVALIGPWANATTQLLGNYYGNAPYMISPRAAFEEAGYKVNFAEGTGISSTSTSGFAAALSAAQSADVIIYAGGIDNTLEAEALDRESIAWPGNQLDLIQKLASAAGKKPLIVLQMGGGQVDSSSLKNNTNVSALLWGGYPGQSGGFALRDIITGKKNPAGRLVTTQYPASYAEEFPATDMNLRPEGDNPGQTYKWYTGEAVYEFGHGLFYTTFAESSSNTTTKEVKLNIQDILSQTHEDLASITQLPVLNFTANIRNTGKLESDYTAMVFANTSDAGPAPYPKKWLVGWDRLGEVKVGETRELRVPVEVGSFARVNEDGDWVVFPGTFELALNLERKVRVKVVLEGEEEVVLKWPGKE

SEQ ID NO: 958 - protein, 804 aa, Aspergillus niger; identical to SEQ ID NO: 957

SEQ ID NO: 959 - protein, 798 aa, Aspergillus oryzae
MPGAASIVAVLAALLPTALGQANQSYVDYNIEANPDLFSECLETGGTSFPDCESGPLSKTLVCDTSAKPHDRAAALVSLLTFEELVNNTANTGHGAPRIGLPAYQVWNEALHGVAHADFSDAGGFSWSTSFPQPISTMAALNRTLIHQIATIISTQGRAFMNAGRYGLDVYSPNINTFRHPVWGRGQETPGEDAYCLASTYAYEYITGIQGGVDANPLKLIATAKHYAGYDIENWDNHSRLGNDMQITQQDLAEYYTPQFLVASRDAKVHSVMCSYNAVNGVPSCSNSFFLQTLLRDTFDFVEDGYVSGDCGAVYNVFNPHGYATNESSAAADSIRAGTDIDCGVSYPRHFQESFHDQEVSRQDLERGVTRLYASLIRAGYFDGKTSPYRNITWSDVVSTNAQNLSYEAAAQSIVLLKNDGILPLTSTSSSTKTIALIGPWANATTQMLGNYYGPAPYLISPLQAFQDSEYKITYTIGTNTTTDPDSTSQSTALTTAKEADLIIFAGGIDNTLETEAQDRSNITWPSNQLSLITKLADLGKPLIVLQMGGGQVDSSALKNNKNVNALIWGGYPGQSGGQALADIITGKRAPAARLVTTQYPAEYAEVFPAIDMNLRPNGSNPGQTYMWYTGTPVYEFGHGLFYTNFTASASASSGTKNRTSFNIDEVLGRPHLGYKLVEQMPLLNFTVDVKNTGDRVSDYTAMAFVNTTAGPAPHPNKWLVGFDRLSAVEPGSAKTMVIPVTVDSLARTDEEGNRVLYPGRYEVALNNEREVVLGFTLTGEKAVLFKWPKEEQLIAPQ

SEQ ID NO: 960 - protein, 793 aa, Aspergillus terreus
MPRVASVAAVLAALLPSALGQANTSYVDYNHEANPDLFPQCVATIELSFPDCENGPLSKTLVCDKSARPHDRAAALVSMFTLEELVNNTGNTGTGVPRLGLPKYQVWSESLHGVYRANWASEGDYSWATSFPQPILTMAALNRTLIHQIGDILSTQARAFSNVGRYGLDTYAPNINSFRHPVWGRGQETPGEDAYYLASTYAYEYITGIQGGVDPETLKLVATAKHYAGYDIENWDGHSRLGNDMQITQQDLSEYYTPQFLVSARDAKVHSVMCSYNAVNGVPSCSNSFFLQTLLRETFGFVEDGYVSGDCGAVYNAFNPHEYAANESSASADSIRAGTDIDCGTSYQYHFTNAFDEGEISRQDIERGVIRLYTNLVRLGYFDGNSSQYRDLTWSDVQTTDAWNISHEAAVEGTVLLKNDGTLPLADSIRSVALIGPWANATTQMQGNYYGPAPYLTSPLAALEASDLDVHYAFGTNISSTTTAGFADALAAARKADAIIFAGGIDNTIEGEALDRMNITWPGNQLDLINQLSALGKPLVVLQMGGGQVDSSALKHNTNVSALLWGGYPGQSGGTALLDIIRGVRAPAGRLVTTQYPAGYATQFPAIDMGLRPNGTNPGQTYMWYTGTPVYEFGHGLFYTTFEAKRASTATNHSSFNIEDLLTAPHPGYAYPQLRPFLNFTAHITNTGRTTSDYTAMLFANTTAGPAPHPNKWLVGFDRLGALEPGASQTMTFPITIDNVARTDELGNRVLYPGRYELALNNERSVVLRFTLTGEKAVLMKWPLEKQEIPPAA

SEQ ID NO: 961 - protein, 803 aa, Emericella nidulans
MRSLISVAVLSALPTAFSQANTSYTDYNVEANPDLFPLCLQHLNASFPDCASGPLSLTPVCDRSLSPKDRATALVSLFTFDELVNNTGNTGLGVSRLGLPNYQVWGEALHGVGRANFVESGNFSWATSFPMPITMMAALNKTLIHQIGTIVSTQLRAFSNAGLGGVDVYSPNINTFRHPVWGRGQETPGEDAFLTSVYGYEYITALQGGVDPETLKIIATAKHYAGYDIESWNNHSRLGNDMQITQQELSEYYTPPFIVASRDAKVRSVMCSYNAVNGVPSCANKFFLQTLLRDTFEFSEDGYVSGDCGAVYNVWNPHGYASNEAAASADSILAGTDIDCGTSYQWHSEDAFEDSLVSRSDIERGVIRLYSNLVQAGYFDGEDAPYRDITWDDVLSTDAWNIAYEAAVEGIVLLKNDETLPLSKDIKSVAVIGPWANVTEELQGNYFGPAPYLISPLTGFRDSGLDVHYALGTNLTSHSTSGFEEALTAAKQADAIIFAGGIDNTIEAEAMDRENITWPGNQLDLISKLSELGKPLVVLQMGGGQVDSSSLKDNDNVNALIWGGYPGQSGGHALADIITGKRAPAGRLVTTQYPAEYAEVFPAIDMNLRPNETSGNPGQTYMWYTGTPVYEFGHGLFYTTFEESTETTDAGSFNIQTVLTTPHSGYEHAQQKTLLNFTATVKNTGERESDYTALVYVNTTAGPAPYPKKWVVGFDRLGGLEPGDSQTLTVPVTVESVARTDEQGNRVLYPGSYELALNNERSVVVKFELKGEEAVILSWPEDTTSDFVSSIDGGLDRKQDVIA

SEQ ID NO: 962 - protein, 771 aa, Neosartorya fischeri
MARIMSWHYGKAITLFVCLGPVALSLDTFPDCSSGPLSKLAVCDTSLDVTTRARSLVNAMTFEEKVNNTQYNSPGVPRLGLPAYNWWSEALHGVAGSPGVEFADSGPFSYATSFPQPILLGATFDDDLIKQVATVVSTEGRAFGNAGRAGLDFWTPNINPFRDARWGRGQETPGEDPLHVSRYVYHLVDGLQNGIGPANPKVVATCKHFAAYDLEDWNGVVRHSFNAEVSTQDLSEFYLPPFKSCARDAKVDAVMCSYNALNGVPACADSYLLQTILREHWKWDEPGHWITGDCGAIDDIYNGHNYTKTPAEAAATALNAGTDLDCGTVFPKYLGQAADEGLYTNKTLDKALVRLYSSLVKLGYFDPAEDQPYRSIGWKDVDSPAAEALAHKAAVEGIVLLKNDKTLPLKAKGTLALIGPYANATKQMQGNYEGPPKYIRTLLWAATQAGYDVKYVAGTAINANSTAGFDAALSAAKQADVVVYAGGIDNTIEAEGHDRTTIVWPGNQLDLIDQLSKIGKPLVVVQFGGGQVDDSSLLSNPHVNALLWTGYPSQEGGSAIFDILTGKTAPAGRLPVTQYPADYVNQVPLTDMALRPGSNTPGRTYRWYDKAVLPFGFGLHYTTFKISWPRRALGPYDTAALVSRSPKNVPIDRAAFDTFHIQVTNTGKTTSDYVALLFLKTIDAGPKPYPLKTLVGYTRAKQIKPGEKRSVDIKVSLGSLARTAENGDLVLYPGRYTLEVDVGENQYPTASFTVKGKEAILDSFPQPPETR

SEQ ID NO: 963 - protein, 332 aa, Aspergillus flavus
MVQFSSIVQCTLLATAASAYVTSRQAAESLHDAFTAAGKKYFGNIAEQALLENPQNEPIIAADFGALTCENSMKWDATEPTQGGYNFDGADYVVNYAVEKGKLLRGHTLLWHSQLPSWVSQISDPATLTGVIQDHVTTLVSRWKGQIYAWDVVNEIFAEDGSLRESVFSNVLGEDFVRIAFEAARAADPDCKLYINDYNLDDASYSKTQGFVSKVGEWIAAGVPIDGIGMWLACLFKHAYAGGFPTSGAQAALEALASTGASEVAVTELDIGGATSDDWVNVVNACLNVEKCIGITVWGVSDKDSWRADESPLLFDVNYQPKDAYGAIIAAL

SEQ ID NO: 964 - protein, 327 aa, Aspergillus oryzae
MVHLKALASGTLFASLASSAVISRQAAASINDAFVAHGKKYFGTCSDQALLQNSQNEAIVRADFGQLTPENSMKWDALEPSQGSFSFAGADFLADYAKTNNKLVRGHTLVWHSQLPSWVQGITDKDTLTEVIKNHITTIMQRYKGQIYAWDVVNEIFDEDGTLRDSVFSQVLGEDFVRIAFETAREADPNAKLYINDYNLDSADYAKTKGMVSYVKKWLDAGVPIDGIGSQSHYSANGFPVSGAKGALTALASTGVSEVAVTELDIEGASSESYLEVVNACLDVSSCVGITVWGVSDKDSWRSSTSPLLFDSNYQAKDAYNAIIDAL

SEQ ID NO: 965 - protein, 324 aa, Aspergillus flavus
MVHLKALASGTLFASLASSAVISRQAAASINDAFVAHGKKYFGTCSDQALLQNSQNEAIVRADFGQLTPENSMKWDALEPSQGSFSFAGADFLADYAKTNNKLVRGHTLVWHSQLPSWVQGITDKDTLTEVIKNHITTIMQRYKGQIYAWDVVNEIFDEDGTLRDSVFSQVLGEDFVRIAFETAREADPNAKLYINDYNLDSADYAKTKGMVSYVKKWLDAGVPIDGIVSLLPPRDEGLTSCTALTALASTGVSEVAVTELDIEGASSESYLEVVNACLDVSSCVGITVWGVSDKDSWRSSTSPLLFDSNYQAKDAYNAIIDAL

SEQ ID NO: 966 - protein, 323 aa, Aspergillus oryzae
MVHLKSLAGILLYTSLCIASSQQAPASINNAFVAKGKKYFGTCADQGTLSDGTNSGIIKADFGQLTPENSMKWDATEPSQGKFSFSGADYLVNYAATNNKLIRGHTLVWHSQLPSWVQGITDKNTLTSVLKNHITTVMNRYKGKVYAWDVVNEIFNEDGTLRSSVFYNVLGEDFVRIAFETARAADPQAKLYINDYNLDSANYGKTTGLANHVKKWIAQGIPIDGIGSQTHLSAGGSSGVKGALNTLAASGVSEVAITELDIAGASSNDYVNVVEACLEVSKCVGITVWGVSDKNSWRSAESPLLFDGNYQPKSAYNAILNAL

SEQ ID NO: 967 - protein, 439 aa, Neosartorya fumigata
MHFSIGSLFLYLIASASCTAASPQYIQRSRRTPFTTSTSKPSAFTNPSTDTATTPYVLELTKINNKGNARSAVELNSQVRSGSANLVSFAEGVGFATSINIGNQTFEVVIDTGSSDLWVVRDGFICIDPVSRKEVAQSECRFGPAYAPNTTFHEVVGEFVDIKYADGEILSGVIGTENVTLAGITVNQTIGVMDYAGWYGDGVTSGLMGLAYSSLASAYTTNNRQPRLYNPIFATMYEQGLIDPIFSMVMNRNASNGTAAGYLTLGGLPPVDINGNFSTTPILITNIKGYPKDYDFYAVNIDGVALGNRSLPEAAGGIQYIIDSGTTLNYYPTPVADSVNAAFIPPAVYNDYDGAYVVDCNATASVHGVMIGGSTFYINPTDMILPGGMDNSGNKTCISGINAGGDVGQGIFVLGGTFLRNVVAVFDVGAAEMRFAASA

SEQ ID NO: 968 - protein, 428 aa, Neosartorya fumigata
MHSLQSFLFLLLLGYGVFAAPTSPQAQSQGRSFKVERIKRGNSIHGPTALRRAYRKFGIVPTTFGVDLSDFVPFNTTSISGTAANLVTDVQEPEQTGAVSAQSVQNDAAFVSPVTIGGQKIVMNFDTGSADFWVMNTELPASAQVGHTVFDPSKSSTFKKMEGATFEIKYGDSSFANGGVGTDTVDIGGATVTGQAIGIPTSVSNSFVEDTYSNGLVGLGFSSLNTVQPQQQKTFFDNIADSLDKPVMTAHLKSDGVGEYEFGIIDQTKYQGDMINVTVDSSGGFWQFQSAHYKVGDGPIQTIQNNAVAIADTGTSLMLLDDTVVNAYYAQVKGAQYASSAGGYIYPCNTELPNLAVAVGAKHLATVPGTFLDFAEVGINKTTGQTVCFGGIQSNQGTSMQILGDVFLKAFFVVFDLRGPSIGLASPK

SEQ ID NO: 969 - protein, 164 aa, Neosartorya fumigata
MLTSLPNHSASSMTWNTTLESSAYELASRLQRPPMNDCACLLTHFSDIGGGGYGQNIGYGVSADEIGVMITNLMYNDEFGYYDGLYGQANPDMTYFEKWGHFSQIVWKSSVSVGCATVVCNSLGNVDSSQPSPFTVCNYYPPGNFAGEYADNVLAPLGHAFYSA

SEQ ID NO: 970 - protein, 402 aa, Emericella nidulans
MSRLVSFASLLAAVNAHGYVQNIVVNGVYYSGWEINTYPYMTDPPVVAAWQIPNSNGPVDVSNGYTTEDIICNLNATNAAGYVEVAAGDKINLQWSAWPDTHHGPVISYLADCGDDCTTVDKTTLEFFKIDAVGLVDDSTVPGTWGDDELIENNNSWMVEIPTSIAPGNYVLRHEIIALHSAGTEGGAQNYPQCFNLKVTGSGTDSPAGTLGTELYNLDDPGILVNIYASLSTYVIPGPTLYSGATSIAQATSAITATGSATSGAGGAAATGSSAATTTAAAASTTATPTTAAAQTAKSASAPSSAATGSVPAAPTTATVSTTTSIATSVGTTLTRTTLATTTTAAAAEPSASAPAPSGNSASGSNPLYAQCGGLNFKGASGCVAGATCKKMNPYYSQCVSA

SEQ ID NO: 971 - protein, 121 aa, Emericella nidulans
MQLTKTLSLLAASLSVLLAPVTAAPAPGTSCHVGASWPDHHDCHKFFECAAGGHPVRKTCGPGTAYSPEIGVCDYEWKVRSCRAHSWTHGAEEGASGSHSGWDKSKNEKGHEGHWSGAGRH

SEQ ID NO: 972 - protein, 355 aa, Emericella nidulans
MFKLHSFTAALAAGLLTTIVSAAGLHEAALAAGLEYFGTATDNGELTDIPYVTQLNNTADFGQITPGNTQKWDSTEPSQGTFSFTKGDVIADLADANGQYLRCHTLVWHNQLPSWVTSGSWTNTTLTAALRNHITNVVNHYKGRCIHWDVVNEEYGGAKAAGARAIVQLIKNAGVKIDGVGFQAHFSVGTVPSRSSLASVLQSFTSLGVEVAYTEADVRIQLPTSATTLAQQSTDFQNLAGSCVDTAGCVGFTIWDWTDKYSWVPSTFSGYGAALPWDENFVKKPAYDGLLVGLGGTVTTTTTTTATSTTTSATATSTATSPHWGQCGGIGWTGPTLCASPWTCTYVNDWYSQCL

SEQ ID NO: 973 - protein, 274 aa, Emericella nidulans
MHFTQFISTSLSISLLAGSALAIPTGSYSHSNSTDGSGSNIDSLLPPIVPVNPRSGNKELITSLLLAPTQADRAALLTEPGDYIFDFNEGGAPEGAEAKGLGGFSIAAHSKTFPALIGNGASMTLGFLGPCGMNTPHVHNRATELNVVVKGRLVTNFILENGVSPVENTLDLYQMAVFPQGSIHQEFNPDCGETVFVAGFNDADPGVSQVAQGLFGLRGDVVQATLGGIQTFNGQDIESFREMIPKNVALGIEACLAKCGLQKNEKRELKELMN

SEQ ID NO: 974 - protein, 314 aa, Emericella nidulans
MKYSMILGAALCALGAMAEVEPSYVTEWTTTTVTDWTIVTITKTITVTPTSAATSTTTSVPEPTSVPATQAKVQDTAPAAAAETEAAVESVSTAAPSSTVESTSTVIAEQPEATTWSSAWSSTWSTTQAATTETAAQSTATASSTQTAANAYQSNVLYSHNVHRANHSSPDVAWSSDLESSAQVLASRCVYEHDTSINGGGYGQNIGYGTSADEVAVMISNLMYNDEMGYFENLYGQATPDMTLFEKWGHFSQIVWKGTTEVGCATVDCPSLGNVDSASSVPFTVCNYSPAGNYDGEYADNVLKPLGNPVWSAS

SEQ ID NO: 975 - protein, 836 aa, Emericella nidulans
MKKPNHAVLGIGLALCIEAAYSAASQSYTWKNVVTGGGGGFVPGIVFNPSEEGLAYVRTDIGGAYRLNSDDTWTPLTDFVGNSNWNRWGVDALATDPVDTNRLYLAVGMYTNEWDTSNGAILRSTDKGETWTETALPFKVGGNMPGRGMGERLAVDPHKNSILFFGARSGHGLWKSTDYGATWSNVTSFTWTGTYFQDSSSTYTSDIVGIAWVTFDSTSGSSGSPTPRIFVGVADTGKSVFVSEDAGATWNWVTGEPQYGFLPHKGVLSPAEKTLYISYSNGAGPYDGTNGTVHKYDISSGTWTDISPTSMEDTYYGYGGLSVDLKVPGTLMVAALNCWWPDELIWRSVDSGANWSPIWAWNGYPNINYYYDYEVSNAPWLEDTTSTDGFPVRVGWMVEALSIDPFDSNHWLYGTGATIYGGHDLTSWDSIHRVTLQSLASGIEETAVQALIVPPGGPPLLSAVYDVGGFYHSDLDTPPTQAYHTPTYGSTNGLDYAGNNPATIVRSGSTDADDPTVALSNDFGRTWSANYAASSATGPGPVAISADGDTILLMSNTQGALRSQYQSTFAAVTSLPSGAVIASDKANNTVFYGGSSGSFYVSTNTGTSFTKTATLGSSSTVNAIRAHPSLAGDVWASTDTGLYHSTDYGRTFTKTGSSCTAGWGFGLGKPSSTSAYPVIYGFFTVDGVTALSKTEDEGTTWAMISDSEHGFGAASANVVNGDMGNYGRVFVGTNGRGIFYGEPNGSSPPSSSSTSTTATTSSTSTTLTTTSTPTTTVTTTTTSTTATATATASPYGQCGGSEYTGPTACPSGWTCTFFNHFYSQWLYGVLLAVWGR

SEQ ID NO: 976 - protein, 477 aa, Neosartorya fumigata
MRISSLIMAASAAGLVSALPVREMTKKRSSGFTWVGINESGAEFGSNIPGKLGTDYTWPDTSKIQTLRDAGMNIFRVPFLMERLVPSSITGNLDATYLSDLKKTVEFITGSGAYAVLDPHNYGRYSGSIISSTSDFQEFWKTVASEFASNDKVIFDTNNEYHDMDQTLVLNLNQAAINGIRAAGATTQYIFVEGNHYSGAWTWADNNDNLKGLKDPEDKIVFEMHQYLDSDGSGTSESCVSSTIGQERVESATQWLKDNSLKGFLGEFAGGVNSQCETAVEGLLSYMSENSDVWLGAEWWSAGPMWGNYMYSLEPSTGPAYSSYLPILKNYFVSGTSSSSSSSSSITSSTTSVNNPTTSATTQAQVVNTSSSSPTPSPTSVPAAEAPAPTPTEAAKTSSAASTTPTTAAASTTASACRAPEPADETTLPSATPTTSASASGIAKHWYQCGGINWTGPTTCESGYTCVEQNPYYHQCV

SEQ ID NO: 977 - protein, 397 aa, Neosartorya fumigata
MKASTIICALLPLAVAAPNAKRASGFVWFGSNESGAEFGETKLPGVLGTDYIWPDASTIKTLHDAGMNIFRVAFRMERLIPNQMTGTPDATYLNDLKATVNAITSLGAYAVIDPHNYGRYYGNIISSTDDFAAFWKTLAAQFASNDHVIFDTNNEYHDMDQTLVLNLNQAAINAIRAAGATSQYIFVEGNSWSGAWTWTTVNDNLKALTDPQDKIVYEMHQYLDSDGSGTSATCVSSTIGQERVQAATQWLKTNGKKGIIGEFAGGANSVCQSAVTGMLDYLSANSDVWMGAAWWAAGPWWADYIFNMEPPSGTAYQNYLSLLKPYFVGGSGGNPPTTTTTTTQPTTTTTTTTAGNPGGTGLAQHWGQCGGIGWTGPTACASPYTCQKLNDYYSQCL

SEQ ID NO: 978 - protein, 476 aa, Neosartorya fumigata
MTLLFGIFLARLAVAAAQSSCVSAWGQCGGISYTGSTCCQSGNTCAEINSYYYQCIPATATSTTTVTSPSSSGSSSANTSGYTTTTVLPSPTATQNPYPPANASSCGSWALVDNVCCPYYCLSDNESESCTSSCTGGCGSPDSSMCKSGTMWGEQHTVTSNEDWHYSRSTHFGLTSGGACGFGLYGLCTKNSVTASWTDPMLGSTCDAFCTAYPLLCKDPANVTLRGNFAAPNGDYYTQFWPSLAASGNPDNYLSCGECFEVIRTKPDGTDYAVGESGYTDPIVLEVVDSCPCNANSKWCCGSGADHCGEIDFKYGCPLPEGSHHMDLSDIAMGRLQGNGSLADGVIPIRYRRVPCPKPGNIYIWLHDGAGPYYFALSAVNTNGPGSVISIEVQAGGSGPWVALEHDPNYTSSRPQERYGSWVLPQGKGPITVPVSMRLTAPNGQQVVKEGAITSYTPPATAVEGFWYIDLGVQFT

SEQ ID NO: 979 - protein, 127 aa, Aspergillus clavatus
MQFTYKALSALAVSFFFSTASAVAHCKPGQAWPDVHDCHNFFECASGGVPVLKTCGPGTAYCPKTGICDYEFKNPACRLHGAGPEGHAGPGGHDGKGPEGHGGPGGIEEFAGHGRPDGPAGPGAINH

SEQ ID NO: 980 - protein, 860 aa, Aspergillus clavatus
MRTAEAILLAAGLLVEAAYAAASQQYTWKSVMTGGGGGFVPGIVFNPSEKGLAYARTDIGGAYRLNADDSWTPLQDYAANSDWHDWGVDALATDPVDPARVYLAVGLYTNEWDPENGSILRSKDRGNTWAEAKLPFKVGGNMPGRGLGERLAIDPNDNSILYFGARSGHGLWKSTDYGVTWSNVTSFTWTGTYVQDPTSSYTADRVGIAWITFDSTSGLKGSGSSRIFVGIADTGKSVFVSEDAGATWSWVTGEPMYGFLPHKGVLSPAEKTLYISYANGAGPYDGTNGTLHKYDIANKKWTDISPTPAASVSYGYGGLAVDLKVPGTIMVAALNSWWPDGIVWRSVNSGATWSAIWDWNGYPNMNKYYSYDISNAPWLLDGSTGKEFPQKVGWMMEALVIDPFDSDHWLYGTGATIYGGHDLTKWDTVHNVTLKSLAVGIEEMAILGLIAPPGGPQLLSAVGDVGGYYHSDLSKAPQHSFQTPMYSTTQGIDYAGNKPSNIVRSGSSDNLPTVALSSDFGKTWSGNYAASSSTPTGPVAFSADADTILLMNSNGAMVSKSSSTFTAVSSLPSGAAIASDKANNTVFYSGSAGSIYVSANGAASFTKTATLGSSTSVNTIRAHPSIAGDVWATTDKGLWHSTDYGKTFTQIGSGCAAGWSFGLGKGSSTGSYAVLYGFFTVDGVTGLFKTEDKGANWQMISDASHGFGSASTNVVNADMLNYGRVFVGTNGRGIFYGEPGGSVPSSTATATSATQTSISTASSSTTVKTSSITASTSTTMTTTTKPSTTGTTTSSGPNGTATSSPWEQCGGIGYTGPTLCPSGWKCTVQNDYYSQCELSIILQTAIFLRRTRTDCNLGMQ

SEQ ID NO: 981 - protein, 339 aa, Aspergillus clavatus
MKSIANTKGVVLLALALPVLGQQSLYGQCGGNGWSGPTECTAGACCQVQNPWYSQCLPGDCKPSSPTTTLVTSTTASTTTVTAPGGHSTGCGKTPSMNSGTYTMTVNGIQRQYTLTLPQNYDRSKPYKLIFGYHWLGGTMQNVAGGAYYGVQPLSGNSAIFVAPQGLDNGWANKNGDDITFNDQLVAKLTTEFCIDDSQIYSMGWSYGGSMSYALACARPDVFRGVAVMSGANLSGCSPGTKPVGYYGQHGGSDDVLSISLGRQIRDTFVKDNQCTPQNPSEPAKGSGKHIKTVYSGCSTDHPVWWIAFDGPHEPLATDAGSSSSWTPGELWSFISQFN

SEQ ID NO: 982 - protein, 212 aa, Aspergillus clavatus
MSRSFIASCAVAIALSIGAHAQAPLYAQCGGQGYSGPTSCVSGAVCTAWNDWYHQCVPGTSTMQSSTATAAPVSTTSAAPSPSPSATGLRYFITFGDSYSQTGFDVSGTKPSESNPLGNPTLPGWTSSGGLNWIGALISKYNTSTVLSYNFAYGGATTNASIVKPYAPTVRSFIDQVAEFSSSIATKPSYAPWTAENSLVGVWMGVNDVGNT

SEQ ID NO: 983 - protein, 394 aa, Aspergillus clavatus
MKTTTLVAALLPLVLAAPNTKRSSGFVWFGANESGAEFGESNLPGILGKDYIWPSASTIRTLHDGGMNVFRVAFRMERLIPNKMTGSPDGTYMNDLRSTVEAITSLGAYAVIDPHNYGRYYGNIITSTDDFAAFWKTLASEFASNDHVIFDTNNEYNTMDQTLVLNLNQAAINAIRASGATSQYIFVEGNSWSGAWTWTDINDNMKALTDPQDKIVYEMHQYLDSDGSGTSPSCVSSTIGKERMVAATQWLKDNNKKGFLGEFAGGPNDVCKSAVTGMLDYMSLNTDVWMGAEWWAAGPWWADYMFSMEPPSGTGYQNYFNLLKPYFSTSSSSPSPSTTTTTKATTTTTTAAGPTGTGVAQPWAQCGGSGYSGPTQCAAPYTCTKQNDWYSQCL

SEQ ID NO: 984 - protein, 402 aa, Aspergillus clavatus
MVHLPSIAAALAALPLVYGAGLNTAAKAKGLKYLGSATDNGELSDAPYVAQLSNTEDFGQLTPGNSMKWDATEPSQNSFSYAGGDAIVNLAQANGQLMRCHTLVWHSQLPNWVSSGTWTNATLIAAMKNHITNVMTHYKGKCYAWDVVNEALNEDGTYRDSVFYRVIGEAFLPIAFATAAAADPNVKLYYNDYNIENPGNKATGAQRIVKLVQSYGAKIDGVGLQAHFIVGSTPSQSDLTTTLKGYTSLGVEVAYTELDIRMQMPSSSAKLAQQSADYQSVAAACVTTPGCIGITIWDWTDKYSWVPSVFSGYGDACPWDSNYVKKPAYNGILAGLGAGSSTGTTSSSTLTTTTKTSTTTGATTTGVSQKWGQCGGSGWNGPTTCVSGTTCQKQNDWYSQCL

SEQ ID NO: 985 - protein, 446 aa, Aspergillus clavatus
MRIANLIMAASAAGLVSAYPTREMAKKRASGFSWVGVNVSGGEFGSNIPGKLGTDYTWPDISKIQTLRETGMNIFRVPFLMERLVPGSMTGSPDATYLGDLKKVVQSITDSGAYAILDPHNYGRYSGSIISPSDFKVFWKTIASEFASNDKVIFDTNNEYHDIDQTVVLNLNQAAIDGIRAAGATAQYIFVEGNHWTGAWTWTDNNDNLKGLKDPQGKIVYEMHQYLDADGSGTSESCASPTIGKERMQSATQWLKKNGLKGFLGEFAGGVNSQCETAVDGLLSYMSDNSDVWLGAEWWAAGPWWGSYMYSLEPGSGPAYSTYLPILEKYFVKGSGSGSGSGSSSSSSSSSSSSTTTSSSTTNVAPSKPTTTAAPTTSAPTQPPAVEPSPSAPKAPSSAPPKGAPTAPEVAAKHWYQCGGINWTGPTSCESGYTCTEMNPYYYQCV

SEQ ID NO: 986 - protein, 257 aa, Aspergillus clavatus
MKLVQSLSFILSLLPATLAEVQFTVPAFGTSFKSGDVVTAHWKELGTSPRISELTHYDLYLYAGGETADTQMEIASLIRDGMFARGNSVSFKIDPHFGGSQTNAYFLKMVSFGPEAFAINFSERFTLNNMTGSFPPQLVEDIRSLPDSEDYPVKEDLRKRVIQTAHTVPYALQTGPTRYAPMAKKPGSTIPAKAKTPTPQFSASLYTIATTWLPVATVHMTLSTSMTFSVVSIENTASPAPHPHDMAARKLLERWKD

SEQ ID NO: 987 - protein, 632 aa, Aspergillus clavatus
MATVRICVCGDEGTGKSSLITSLVKGVFVTNKIQPVLPQITIPPTIGTPENVTTTTVVDTSALPQERNNLAREIRKSNVILLVYSDHYSYERVALFWLPYFRSLGVNVPVVLCANKSDLAAEHSEAQVIEEEMLPVMAEFKEIDSCIRTSAREHRNVNEAFFLCQKAVTHPIAPLFDTKESALKPAAVAALQRIFYLSDKDRDGYLSDKEIGDFQMRCFDKPLSTEDLVHIKEIIQKTHPGSVTPFGIDCRGFIHLNKMYAEKGRHETVWIILRAFQYTDNLSLQESFLHPRFEVPPYASAELSPEGYRFFVNLFLLSDKDNDGGLNDAELASLFAPTPGLPASWADGSFPSSTVRNEAGHVTLQGWLAQWSMTTFQSPKTTLEYLAYLGFESSDRSNPSTTAALKVTRPRKRRKRPGRVGRNVVLGHVLGAPGSGKSALLDAFLSRGFNSTYRPTIQPRTTVNTVELPGGKQCYLILDELGELEPAILENQAKLLDQCDVIVYTYDSSDPDSFAYIPQLRANHPHLEELPSVFVALKADLDRTTQRAEHQPHEYTAMLNMPSPPLHVSATWSSIQEVFVHIAEAAMEPSTAFPRSEEDVEGKWMAWGIALGAVVCAGAAAVMIWRRVSGGG

SEQ ID NO: 988 - protein, 355 aa, Aspergillus clavatus
MRQAQTFKLLAALLSASQVAGHGHVTNIVINGVSYRGWNIDSDPYNSNPPIVVAWQTPNTSNGFVAPNDVGTDDIICHLDAKNARGHAVIAAGDKISFQWTSWPESHWGPVITYLANCGESCETVDKTTLEFFKIDAVGLVDGSNPPGFWGDDQLIENNNSWMVEIPKSIAPGYYVIRHELIALHAAGSPNGAQLYPQCFNLQITGSGTAKPSGVKGTKLYTPTDPGILVNIYSSLDYIIPGPTLIPDAVSLVQSTSAITASGTPITGSGSVPPATDGPSTTKATPTSSTTLSTTTKATITQAPTSSTTSAGSTATQTAYGQCGGSGWTGPTACGSGATCTSYSEWYSQCIPKSG

SEQ ID NO: 989 - protein, 139 aa, Aspergillus clavatus
MLATTLIMVASALSANALGINCRGSAKCSALWGPSDAAKQLTNVIQGIDTNRWYLNGEHIACVGNDAGNGGGYCAFLQKTGGTNGGVIKNLAHYINDHGCKQCGSVPYYYPQGNNNVDDGELTYNYVDNPCVPAGAKLC

SEQ ID NO: 990 - protein, 253 aa, Aspergillus clavatus
MHTHTSSRLLELLLWFQFCLASHASITTLSAAVTPTIPHPPSYTSPELFKDTILSASNTYRRNHNASELTWNETLTKYARDWAEGCKWRHSDGPYGENLAFGYADPITAVSAWGDEGQKYNFKLPTGFTEETGHFTQLVWRATKEVGCAAVDCGYSDGSDAKDKHGQYTRAQGWYVVCEYSPAGNVIGNNNAFFRVNVQSTSTYSGPTATGAETGAVATSTGTSGVGGMYDNRYLGAETRNVLVGLMLFVNMV

SEQ ID NO: 991 - protein, 511 aa, Aspergillus clavatus
MTLLILLAGLATAASALTATVNTAQTYQTMDGFGFSQAFGRAYDLYNIPSDQRDYALDLLFSPTKGAGMTILRNRIGSSSGDSILPNSPGSPNSIPHYKALGTDSVQVWVTQQAVKYGVKTIYADAWSAPAFMKTNGEEKSGGYLCGVTGKTCPSGDWKQAYANYLVQYIKDYAELGLDISHVGFLNEPDYTVSYSSMLSDGTQAADFIKVLHPTLQKAGLSHVGITCCDATGWSAQKTRTAELIAANAEGLLSRITSHSYSSDPTSPMGANIPVWQTETADLSGAWETTWHSSGGKGEGLTWAEKIHTAITQGGVSAYLYWEGFERATTNACLVITDGKRVIPSGRLWAFGHWSRYVRPGAVRVAISGSTSTLKMTAFKNKDGTVSVQIINTGPSASEVTVAGFAAASAKAYLTDNNHAQISETTVSVNGGKASVNVPGHAFVTVVLSGNGSRVPPSLSPATKPETKPETGNAVVTGRWSQCGGQGWTGPTACAAPYTCKAQNPWYSQCL

SEQ ID NO: 992 - protein, 145 aa, Aspergillus clavatus
MHTSSLIHGLVIAFSLATSSSALGINCRGSANCNTFGDNQVAAQLKHAIDGIDSNRWYQNGQHIACIGTVAPITGKGGFCAFLQKTGGTNGAVIKNLAHYIPEHGCKVCGSVPYYYPQGNNNVDDGELTFNYVDNSCSQDDAKLC

SEQ ID NO: 993 - protein, 286 aa, Aspergillus clavatus
MLFTAVTLALLGQALASALDLEERQSSCPNIHVFGARETTAPAGYGSSSTVVNLILNAYPGSTSEAISYPACGGQSSCGGVSYANSVVAGINAVASAVNTFNQKCPQTQLVLVGYSQGGQIMDNALCGGGDPNQGYTNTAVALSASAVNMVKAAIFMGDPRFIAGLSYEVGTCKVAGFDPRPPGFNCPSGSKIQSYCDAADPYCCNGNDANTHQGYGSVYGQAALTFVKSKLSSSSSGGGSGGGSVGTGGTIARYGQCGGQGWTGATSCQSQYTCTAVSQWYSQCL

SEQ ID NO: 994 - protein, 459 aa, Aspergillus clavatus
MASRRSLVAAALALLPLVHAQNPGAADAGNPKLTTYKCTTAGGCVKQDTSVVIDWNYHWIHTANGYDSCTTSSGVDSSLCPDAATCARNCVIEPANYTSAGVATSGDTLTMHQYIKSDGEYVNASPRLYLLGSDGDYVMMKLLGQELTFEVDLSTLPCGENGALYLSEMSATGGRNEYNKGGAEYGSGYCDAQCPVQTWKNGTLNTNGSGFCCNEMDILEGNSRANSFTPHPCSSTDCDKGGCGFNPYALGQQNYWGPGGTVDTFKPFTVTTQFITSDGTQTGTLKEIRRQYIQNGKEWCTSGASFGGLTTMGQALGRGMVLAFSIWNDNSQFMNWLDSGSNGPCSSTEGNPDLIKAQNPTTHVVFSNIRWGDIGSTFSNPGGSSSSSTTRIVTITKPTTVFPTSTKTTTIQAPTTTTTASGATQTQWGQCGGQGWSSPTACATPYTCQAQNAWYSQCV

SEQ ID NO: 995 - protein, 300 aa, Aspergillus clavatus
MRYSWLIGAACAAGALAKPLDKRSYITDWTIITVTETITLAPQAAPTAPVSKVDPFPVPVPVPVPAPVEPEPPVVVTTAAPAPVPTTTAGTVEELPDTSSEWTSTWTSSAASRVVEPTTLVTAAPTAAPTAPANPGNAYQAAILYNHNIHRSNHSVSSLTWNATLESSAQALAAQCIYRHDTDISGGGYGQNIGYGVSSEEIGAMITNLMYNDEFGYYQNLYGQANPDMTYFEKWGHFSQILWKGSVSVGCATVVCPLLGNVDSSAPSPFTVCNYYPPGNYAGEYAENVLPPIGRAFYAA

SEQ ID NO: 996 - protein, 403 aa, Aspergillus clavatus
MILSAKMLGAILLELALTAAAQQTLYGQCGGNGWTGPTQCVSGACCQIQNPWYSQCLPGSCSPSTTLTRVTTTATSTASTATSGTGGSLPSSFKWSSSGPLVDPKNDGRGIAALKDPSIVEVDGTYHVFASTATSAGYNMVYFNFTDFNQANNAPFFYLDKSPIGSGYRAAPQVFFFKPQNLWYLVYQNGNAAYSTNKDISNPAGWSAPKTFYSSQPSIITENIGNGYWVDMWVICDSANCHLFSSDDNGHLYRSQTTLANFPNGMTNTVIAMQDSNPNNLFEASNVYHVGGGKYLLIVEAIGSGGDRYFRSWTSTSLTGTWTALAASESNPFAGAKNVAFSGNVWTKSISHGEMIRDQVDQTLTISPCKLRYLYQGVDPAATGNYNSLPWKLALLTQTNSAC

SEQ ID NO: 997 - protein, 412 aa, Aspergillus aculeatus
MKFTVLALLLSQVWAAPQAKRSSNFLWLGSNESGAEFGQANIPGVLGTDYIWPDASKIQVLVNAGMNIFRVPFMMERLIPTSLTGAADATYLADLKATIESITSLGAYAVVDPHNFGRYYGNIITSTSDFAAFWTTYVSFCPSSHYWTHKDHADNEYHDEDQTLVFNLNQAAITAIRAAGATSQYIFVEGNSYSGAWTWTTYNTNLVNLTDPSDKIIYEMHQYLDSDGSGTSSDCVSTTIGAERVAAATTWLRQNGKRAVLGEFAGGANSQCLTAVTGMLDALSAASDVWLGALWWSAGPWWGTYIFNMEPTTGTAYTYYLSLLQSYVPGGSSGTTTTTAVATTTTSKASTTSTTTTKTTTTSTKTTTTATSTSTAVAPLYGQCGGIGWTGATTCASGSTCTKQNDYYSQCL

SEQ ID NO: 998 - protein, 856 aa, Aspergillus aculeatus
MARSSLALLCAALLGKLADAAASQAYTWKNVVTGGGGGFTPGIVFNPSAKGVAYARTDIGGAYRLNSDDTWTPLMDWVGNDTWHDWGIDALATDPVDTDRVYVAVGMYTNEWDPNVGSILRSTDQGDTWTETKLPFKVGGNMPGRGMGERLAVDPNKNSILYFGARSGHGLWKSTDYGATWSNVTSFTWTGTYFQDSSSTYTSDPVGIAWVTFDSTSGSSGSATPRIFVGVADAGKSVFKSEDAGATWAWVSGEPQYGFLPHKGVLSPEEKTLYISYANGAGPYDGTNGTVHKYNITSGVWTDISPTSLASTYYGYGGLSVDLQVPGTLMVAALNCWWPDELIFRSTDSGATWSPIWEWNGYPSINYYYSYDISNAPWIQDTTSTDQFPVRVGWMVEALAIDPFDSNHWLYGTGLTVYGGHDLTNWDSKHNVTVKSLAVGIEEMAVLGLITPPGGPALLSAVGDDGGFYHSDLDAAPNQAYHTPTYGTTNGIDYAGNKPSNIVRSGASDDYPTLALSSNFGSTWYADYAASTSTGTGAVALSADGDTVLLMSSTSGALVSKSQGTLTAVSSLPSGAVIASDKSDNTVFYGGSAGAIYVSKNTATSFTKTVSLGSSTTVNAIRAHPSIAGDVWASTDKGLWHSTDYGSTFTQIGSGVTAGWSFGFGKASSTGSYVVIYGFFTIDGAAGLFKSEDAGTNWQVISDASHGFGSGSANVVNGDLQTYGRVFRGHERPGHLLRQSQREPAGRHGDGDGDTTTSKTSTTVSTTLKTTTSSASTTSSSTTVKTTTSSSSTTSKASSTTTTKTTTTSTTTSSGTTATASAYAQCGGNGWTGATVCFTGYTCTYSNAFYSQCVPS

SEQ ID NO: 999 - protein, 416 aa, Aspergillus niger
MRISNLIVAASAASMVSALPSRQMKKRDSGFKWVGTSESGAEFGSALPGTLGTDYTWPETSKIQVLRNKGMNIFRIPFLMERLTPDGLTSSFASTYLSDLKSTVEFVTNSGAYAVLDPHNYGRFDGSIITSTSDFKTWWKNVATEFADNDKVIFDTNNEYHDMEQSLVLDLNQAAINGIRAAGATTQYIFVEGNAYTGAWDWTTYNDNLSGLTDSEDKIIYEMHQYLDSDSSGTSETCVSSTIGQERLEKATEWLKTNNKQGIVGEFAGGVNSVCEEAVEGMLAYMSENSDVWVGASWWSAGPWWGTYMYSLEPTDGTAYSTYLPILEKYFPSGDASASSSASVSVAAATSTASTTTAAFEQTTTPATQGPSATNSAGEVNQYYQCGGINWTGPTVCASPYTCKVQNDYYYQCVAE

SEQ ID NO: 1000 - protein, 410 aa, Aspergillus niger
MKTLSLAAVLLVQAWTANSSPRAKRSSGFQWFGSNESGAEFGSGNIPGTLGTDYIWPDATAIATLHSAGMNIFRVPFLMERLVPDELTGAADATYMADLKATVQTITDLGAYAVVDPHNFGRYYGNIITSTSDFAAFWTTVASEFTDNDLVIFDTNNEFHDEDQTLVLDLNQAAITAIRATAATTQYIFVEGNSYTGAWTWTTTNTNLVNLTDPNDHLIYEMHQYLDSDGSGTSSTCVSSTIGAERIADATTWLKENGKQAVLGEFAGGANSVCEEAVTGMLDAMVDASDVWLGGMWWSAGPWWGDYIFSLEPDDGIAYEYYLGVLEGYTPGSSSGSSGGSTTSAVASASSTSSAGSTTSKVTTTTAATATSTAVAAHYAQCGGEGWTGATTCADGYTCTVENEWYSQCL

SEQ ID NO: 1001 - protein, 149 aa, Aspergillus niger
  MOD_RES (139)..(139): Any amino acid
LISNVQNGPYGENLAFGYPNVSSAVAAWGDEVQKYNFQEPTGFTEETGHFTQLVWRETREVGCAAIDCGGINGTERPQGWYVVCEYSPRGNIIGGNKKLGDKEFFKINVQPSSTYSGPYNTGSAGNGAARVECIMGLCXGNWDMDSGIN

SEQ ID NO: 1002 - protein, 340 aa, Aspergillus niger
MKYLPLVVAATASLAPTASAHYIFSKLVLNGEASADWQYIRETTRSVVYEPTKYTSTFDNLTPNDNDFRCNLGSFSNAAKTEVAEVAAGDTIGMKLFYDTSIAHPGPGQVYMSKAPTGNVQEYEGDGEWFKIWEKTLCNENADLTKDAWCTWGMSQFEFQIPAETPAGEYLVRAEHVGLHGAQANEAEFFYSCAQVKVTGSGTGSPSLTYKIPGLYNDNMTLFNGLNLWVDSAEKIETDILETPIGDDVWSGHGSESSSAASPSVSSASVASPGTTTAVAHAHVQTPASSSTSSTAASSGNLVSHWGQCGGLNYAGPTECESPCTCVEQNPWYHQCVTSS

SEQ ID NO: 1003 - protein, 349 aa, Aspergillus niger
MRQAQSASLLAALLSATQVAAHGHVTNLVVDGVYYEGFDISVFPYESDPPKVAAWTTPNTGNGFISPDEYRNPNIICHENATNAQAHVVVGAGEKINIQWTAWPDSHHGPVLDYLARCDGSCETVDKTDLEFFKIDGVGLVSDTEVPGTWGTDQLINNNNSWMVEIPPSIAAGNYVLRHELIALHGAEEQDGAQNYPQCFNLQVTGTGTATPSGVKGTELYTATEGGILVNIYSSLSTYTMPGPTAYSGDVSITQTTSAVTSTGTAVVGSASAVASASSTAAAATSAAAVTSSTITPAPAVSSAASGSSGSQSLYGQCGGINWTGATQCASGSSCHSYNPYYYQCIASA

SEQ ID NO: 1004 - protein, 827 aa, Aspergillus niger
MDTRQAKRKRQNSSSSGQKPQEPQEPPTPVSIRRTRRTEYYITSATSCETPHQSKKVRFSDPGPGRQHGSAHSTGLTPAMLRSSFEERAEDDPLIRSPSRGQRRRSTPLPRSRRSMDAPDAASTAFSEHVVQFTPLRQLLDARTKRRIRRIGLSDEINHLEREKRESAQYEKTLQSLLRERDSLKNELDSVKRNQDVSKSLATSEETTWLSPQSMIEQVLSENVRLREQLSFPSPGATTDHDTISNSEGETMVINESAWDCDTMLISNSPDIRALDARLSVPDNISLLSQGHANTDASTQASIPDHRQEAEIIALSADLAAARKEKRDLFDACRARVASFGGTAIEGLLRQSSPPPDFLDQVLPTLTQTLRRASDAAQALDNVKEELSGLGFPGNNAEEIISTMRDHFRAARLQLERAVPGETANASLSDGKATLGALVKRVEVLVKSLGDEQERLQGSVGRENAIRGQFDTLLARYEGASKKIQDLEESIASSAGDMLHTRMRMQELEREGKEQAVSIQRLNAALDKYHEEVKGLEALVTELEDDKAKNNESHKQEVDELQQKLEEQARSLRTTESTVVERETRIRELEEDLQQNRTRVCDLATKIESLEAERQQTIQSLEQEAKEEQQRLEQEVGSMNVLVSELNTSLAEAKSDIDRLRRSNTGLEEQLRQEVEARDSLLDKWAAEQARSFAFMKETVNSERRKARVRTANWELRSDEIQSSDGLNIGSEPITPVSMTRFVDVEAGRGKHLLVSQRVTQLEGVPEFIRSTSINTNAASTYGTTTPGSVAFDLELSQQEALTDTPGGADKASSHYDTSSRRKTKFS

SEQ ID NO: 1005 - protein, 633 aa, Aspergillus niger
MATVRICVCGDEGTGKSSLITSLVKGVFVTNKIQPILPQITIPPTIGTPENVTTTTVVDTSALPQERNNLAREIRKSNVILLVYSDHYSYERVALFWLPYFRSLGVNVPVVLCANKSDLAADHTEAQVIEEEMLPLMAEFKEIDSCIRTSAREHRNVNEAFFLCQKAVTHPIAPLFDSKESSLKPAAIAALQRIFYLCDKDRDGYLSDKEIKDFQMRCFEKPLSEEDLVHIKETIQRTHPHSVTPSGIDCRGFLQLNKMYAEKGRHETVWIILRAFQYTDNLSLQENFLHPRFDVPPYASAELSPEGYRFFVNLFLLSDKDNDGGLNDAELASLFAPTPGLPASWADGSFPSSTVRNEAGHVTLQGWLAQWSMTTFTSPKTTLEYLAYLGFESSDRSNPSTTAALKVTRPRKRRKRPGRVGRNVVLGHVLGAAGSGKSALLDAFLSRGFSTTYRPTIQPRTAVNTVELPGGKQCYLILDELGELEPALLENQVKLLDQCDVIVYTYDSSDPDSFAYIPALRAKYPHLEELPSVFIALKADLDRTTQRAEYQPHEYTAMLNMPSPPLHVSATWSSIQEVFVHIAEAAMEPSTAFPRSEEDVEGKWMAWGIALGAVVCAGAAAVMIWRRVSGSGV

SEQ ID NO: 1006 - protein, 263 aa, Aspergillus niger
MMRLARTVYLVLSLLSAALADIEFIDPAAGTVIRAGDEFTAHWRDSGTLPRLASLVQYDLYLCAGGDTVGSHEDIALLAKNALFAKGNSVTFKIDSEVGGNDANAYFLRIAASGPDASVVNYSDRFTLTNMTGSFSPTVINGIPSAMYPTDSFPPAHMDESHEELRKRQVAGPFTIPYQLQTGPTRYAPMAKKPGSTIPVGTPTPQYPTSAYSVATTYLPQATVQMTLSASETYSVISIENTASPAPHAGDTKMKRFLERWKD

SEQ ID NO: 1007 - protein, 474 aa, Aspergillus niger
MRSILFILFSVFAGLAAGQLIGPVGPTTQLEDKDIECNILDYGGVADNETDVATSIETTFTECVLNNPKSRLVIPEGDYLIKRSVVLSNGTNWAFQLDGLITAAYGGNWTVDPVDFEFYSSNGLGAFQGQGYIYRNLANTDRPRLVRLISPTNASVHDLILVDSPKFHIVFDFAVNLEAYHLTIRGANLGSYDGIDAIGTNYYIHDNEAITNRDECVSVKSPSHHALVENLVCNQAGSGVSIGSLNVSAEISNIEARNISIIQGNNIAFIKTYPGGSGYVKDVTFENFRSLNSLYGLDINQYWQNTWEPDTGSVTLSNLVFKNFSGSVADGALRPPLYLFASDLTFATNVTVEEFSVWTETGTTVVNKISNIFGTGDDSYGENDGIESLQSGESPYTYTSTYTITASPTNWQAPSTPTWALPSTGYGSKFNENCSGYFYIANLSTAASPIPVYTPAPLWRPGGIDYNLHYWGSF

SEQ ID NO: 1008 - protein, 228 aa, Aspergillus niger
MIYYIHLFAITAYLFLPASAQDNSSGSPAGPIGDIVCATAVQEVANMPYPGDCSKWIKCDTEYAGTATVYTCDEGLWFSFDVQTCVWPDQSGCVDGMGIRCSSPSLLLYGIQGIWLFSTIDSVAQALSASKDSNSDEHKSNTQPYTEYYSPTLTTLLLYYSSHSYNSSYHLMSLLRIDYPCKITGSLSTTVLNSVKVLISLTFYTSHTSISKFVSNISKRHDKMLLSL

SEQ ID NO: 1009 - protein, 549 aa, Aspergillus niger
MSGRLMAVHSIVVILSISHSPASATLSGPNIVSGLRDVEVRDPGPGRFLGLVDQLIVDDPLCYSSTKIPTVYPTPPFPNSGYALVKLAGQRMLACLLTRDRPPSMTHRDVEIRPEPTQIADPTGYTPPAGVALLSVIKLPPQLQLLFCSLQTILSLHARSPFVLYRWLFPPFPSTFLLPFAFIFGCTCFHSFKKVFPLPEGYKPTTPHSIMRYSLALGALCAAGALANNVDKRSYVTDWTIVTLTTTITEYPTPTVYENVAAQEASAAASSSSAAAVAAAAESSSSAAAAAAAAASASAEASSSAAAAAAAAAEASTSSVVTPVVETTAAATTAAAATTAAAEEVATSWTSAWTSAWTSSWSSAAAPTTTLATSTSSSASSTATNAYQSAVLYNHNVHRSNHSASSLEWSSDLESSAYTLAAKCVYEHDTSIDGGGYGQNIGYGVESSEIGVMITNLMYNDEMGYYTDLYGEADPDMTYFDNWGHFSQIVWAATTHVGCATVTCDSLGNVDASEALPFTVCNYSPAGNYEGEYGTNVKRPLGQAVYVAS

SEQ ID NO: 1010 - protein, 861 aa, Aspergillus niger
MRRTFAALVAGYLLDSVHAAASQAYTWKNVVTGGGGGFTPGIVFNPSAKGVAYARTDIGGAYRLNSDDTWTPLMDWANNSNWHDWGIDAIATDPVDTDRVYVAVGMYTNDWDPNDGSILRSTDQGDTWEETKLPFKVGGNMPGRGVGERLAVDPNDNSILYFGARSGNGLWKSTDYGETWSNVTAFKWTGTYFQDSSSTYTSDPVGIAWVTFDSTSGSSGSPTPRIFVGVVDTGESVFVSEDAGETWTWVSGEPMYGFLPHKGILSPSEHTLYISYSNGAGPYDGTNGTVHKYNITSGVWTDISPTSMTDTYYGYGGLAVDLQVPGTVMVAALNCWWPDELIWRSTDSGATWSPIWAWNGYPSINYYYSYDISNAPWLQDDTSTDEFPVRVGWMVEALAIDPFDSDHWLYGTGETIYGGHDLQNWDSEHNVTIESLAVGIEEMAVLGLITPPGGPALLSAVGDDGGFYHTSLTTAPSQYYHTPTYSSTNGIDYAGNKPANIVRSGSSDSDPTLALSSSFGESWYADYAASSSTATGQVALSADADTILLMNSDGAYRSANSATLSAVSSLPSGAVIASDKANNTYFYGASGSSFYLSSDTAATFTVTTTLGSSTTANAIRAHPSLAGDVWVSTDTGLFHSTNYGKSFTHIGSGCTEGWSFGFGKPSSDGDYPVLFGFFTVDGVTGLFKTEDQGVNWQIISDAEHGFGSASANVVNGDLQNYGRVFVGTNGRGIFYGDPSGTLPSATATASSASSTAVKSSTSASTSKVGSSTTVSSSTATTITTSSIKSTTLTTTTKSSSSTTSTSSTATGTASAYGQCGGSGFTGPTQCPSGWTCTYENEYYSQWADICRSGGMSESRAV

SEQ ID NO: 1011 - protein, 88 aa, Aspergillus niger
MRFTYQALAVFISSLLVNSAAAHACESSAVWPDPADCHHFYQCIPGTEPAHKVCGAGTAFNPKISACDYEQNVPSCFKDPHHPRPFHA

SEQ ID NO: 1012 - protein, 93 aa, Aspergillus niger
  MOD_RES (35)..(35): Any amino acid
MKTFISTDLLFLIASSSSFAVAQSSICPKGTSPKXCADDVLGSAADSICNDPPRQPTDGADLSTICGDIGQEASCCYPPAYGQQGICSLVADA

SEQ ID NO: 1013 - protein, 289 aa, Aspergillus niger
MKSFIALSLLATALGAPTATHQARQFDLSSLTSGLSALTSGSAASSGSTGSTGSETTTGSSGLSALASLFPSSSTSSTTGSTSGSGSSSSSDGLSSLMSMFSSSGSGSSTENGVTQHSGSCKKLTFIFARGTTEIGNMGTVVGPEVASELATLTGNQVTVQGVNYPADWEGNVSLGSSGGPTMASYVKEALQQCPNTKVVLGGYSQGSMVVHYAANQLSADQLSGAVLFGDPLKMEGVGKLSSSKVKEFCASGDPVCENGMNVMAHLTYGSDAKEAAQFLVQAAGVSSS

SEQ ID NO: 1014 - protein, 363 aa, Aspergillus sojae
MQLLQSSVIAATVGAALVAAAPVELEARDSCTFTSAADAKSGKTSCSTITLSNIEVPAGETLDLTGLNDGTTVIFSGETTFGYKEWEGPLISVSGTNIKVQQASGAKIDGDGSRWWDGEGGNGGKTKPKFFYAHKLDSSSITGLQIYNTPVQGFSIQSDNLNITDVTIDNSAGTAEGHNTDAFDIGSSTYINIDGATVYNQDDCLAINSGSHITFTNGYCDGGHGLSIGSVGGRSDNTVEDVTISNSKVVNSQNGVRIKTVYDATGTVSNVKFEDITLSGITKYGLVVEQDYENGSPTGTPTNGITVSGITFEKVTGTVESDATDIYILCGSGSCTDWTWSGVSITGGKTSSKCENVPTGASC

SEQ ID NO: 1015 - protein, 411 aa, Aspergillus kawachii
MRQAQSASLLAALLSATQVAAHGHVTNLVVDGVYYEGFDISVFPYESDPPKVAAWTTPNTGNGFISPDAYRDPNIICHENATNAQAHVVVGAGEKINIQWTAWPDSHHGPVLDYLARCDGSCETVDKTDLEFFKIDGVGLVSDSEVPGTWGTDQLINNNNSWMVEIPPSIAAGNYVLRHELIALHGAEEEDGAQNYPQCFNLQVTGTGTATPSGVKGTELYTATENGILVNIYSTLTTYTVPGPTAYSGAVSITQTTSAITSTGTAVVGSASAVASASSTAAAATSAAAVTSVDTNTQVAQSSSAPAPAAPSSSSSAYTQIPVQVPSSWTTLLTFTNTPQAVQPTTSVQPEPAQSTITPAPAVSSAASGSSGSQSLYGQCGGINWTGATQCASGSSCHSYNPYYYQCIASA

SEQ ID NO: 1016 - protein, 368 aa, Aspergillus kawachii
MHSYQLLGLAAVGSLVSAAPAPSRVSEFAKKASTCTFTSASEASESISSCSDVVLSGIEVPAGETLDLSDAADGSTITFEGTTSFGYKEWKGPLIRFGGKDLTVTMADGAVIDGDGSRWWDSKGTNGGKTKPKFMYIHDVEDSTFKGINVKNTPVQAISVQATNVHLNDFTIDNSDGDDNGGHNTDGFDISESTGVYISGATVKNQDDCIAINSGESISFTGGTCSGGHGLSIGSVGGRDDNTVKNVTISDSTVSDSANGVRIKTIYKETGDVSEITYSNIQLSGITKYGIVIEQDYENGSPTGTPSTGIPITDVTVDGITGTLEDDATQVYILCGDGSCSDWTWSGVDLSGGKASDDCENVPSSASC

SEQ ID NO: 1017 - protein, 578 aa, Aspergillus kawachii
MHGTRLVFSIAALPLAILVYATASTPAPVDLNSLRLTSNTDYVNSIDVNANQSVIVSADEHYTNTAAQLVQNIVPGASFRLVDDHYVGDNGVAHVYFRQTAHDIDIDNADFNVNVCSPLTLVEKSSPLQIGRDGQLLSFGHSFFTGASPSSYLDKPNLSSPVVALRGARDALQLPLIIDNVSTEAADGRNEYIFRKAAGAVSDPTAKLVYIVKPDGTLALTWRVEIDMYEHWLLTYIDAETTTVHGVVDYVADATYQVYTNDPTEGHRTILTNPWDLSASEYTWISDGLNNYTTTRGNNAIAHWNPTGGGSYLYNLRPSNPDLNFQWPYSPNMSPPRSYINASIVQLFYTANTYHDLLYTLGFTESAGNFQWNNSARGGRDKDYVILNAQDGSGYSNANFATPPDGIPGRMRMYIWIESTPSRDGSFDAGIVIHEYTHGVSNRLTGGSHNAGCLNTLESGGMGEGWGDFMATAIRIKPNDTRRTSYTMGAWADNDKRGVRDYPYSTSFAENPLNYTSVNTMNGVHAIGTVWATMLYEVMWNLIDKYGKNDGPRPVFRDGVPTDGKYLMMKLVVDGMAL

SEQ ID NO: 1018 - protein, 521 aa, Aspergillus kawachii
MRISNLIVAASAATMVSALPSRQMKKRDSGFKWVGTSESGAEFGSALPGTLGTDYTWPETSKIQVLRNKGMNIFRIPFLMERLTPDGLTGSFASTYLSDLKSTVEFVTNSGAYAVLDPHNYGRFDGSIIESTSDFKTWWKNVATEFADNDKVIFDTNNEYHDMEQSLVLNLNQAAINGIRAAGATTQYIFVEGNAYTGAWDWTTYNDDLSGLTDSEDKIIYEMHQYLDSDSSGTSETCVSSTIGKERIEKATEWLKTNNKQGIIGEFAGGVNSVCEEAVEGMLAYMSENSDVWVGASWWSAGPWWGTYMYSLEPTDGTAYSTYLPILEKYFPSGDASSSSSASASVAAATSAVSTTTTAAFEQTTTPATQVEIASSSSSSSAVAASQTTLSKVKSKSKSPCKLSSATSSAVSSAAAVTTPAVAATTPAAAPTSSSVAFATTSVYVPTTTAAAPSQVSSSAAASSSGVVGVSDPQGPSATNSAGEVNQYYQCGGINWTGPTVCASPYTCKVQNDYYYQCVAE

SEQ ID NO: 1019 - protein, 785 aa, Aspergillus kawachii
MDTRQAKRKRQSSSSSGQRPQEPQEPPTPVSIRRTRRTEYHITSATSCNTPHQSKKVRFSDPGPGRQHGSAHSTGLTPAMLRSSFEERAEDDPLIRSPSRRQRRRSTPLPRSRRSMGAFDAASTASSEHVVQFTPLRQLLDARTKRRIRRIGLSDEINHLEREKRESAQYEKTLQTLLRERDSLKNELDSVKRNQDVSKSIASSEETTWLSPQSMIEQVSSENIRLREQLSFPSPGATTDHDTISNSEGETMVINESAWDCDTMLISNSPDIRGVDARVSVPDNISLLSQGHANTDASTQASIPDYRQEAEIIALSADLAAARKEKRDLFDACRARVASFSGTAIEGLLRQSSPPPDFLDQVLPTLAQTLRRASDAAQALDNVTEELSGLGFPGNNAEEIISTMRDQFRAARLQLERAVPGETANASLSDGKATLGALVKRVEILVKSLGGEQERLEGSVGRENALRGQFDTLLARYEGASKKIHDLEESIASSAGDMLHTRMRMQELECEGKEQAVSIQRLNAALDKYHEEVKGLEALVTELEDDKAKNNESHKQEVDELQQQLEEQARSLRTAESTVAERETRIRELEEALEQNRTSVRDLTARIESLEAERQQTIQDLEQEATEQQQRLEQEVGSMNVLVSELNTSLEEAKSDVDRLRRSNTGLEEQLRLEVEARDSLLDKWAAEQARSFAIMKETVNSERRKARVRTANWELRSDEIQSSDGLNIEPITPVSMTRFVDVEAGRGKHRKRLDSGVGILTDDLEDADAGIMPESLPSDPAELL

SEQ ID NO: 1020 - protein, 378 aa, Aspergillus kawachii
MVTSSSVIILTLWAALVSASPVADPLVTPAPKLDDLAKRATSCTFSGSEGASSASKSKTSCSTIVLSDVAVPSGTTLDLTDLNDGTHVIFEGETTFGYEEWSGPLVSVSGTDITVTGADGAYLNGDGSRWWDGEGSNGGKTKPKFFYAHDLTSSTISGIYIQNSPVQVFSIDGSTYLTMEDITIDNSDGDDGEAANTDGFDIGDSTYITITGANVYNQDDCVAVNSGENIYFSGGVCSGGHGLSIGSVGGRSDNTVKNVTFYDSEIKSSQNGVRIKTIYGDTGSVSEVTYKEITLSDITDYGIVVEQNYDDTSKSPTDGITIEDFVLDNVQGSVESSGTNIYIVCGSDSCTDWTWTDVDVSGGKTSSDCENVPDDISC

SEQ ID NO: 1021 - protein, 435 aa, Aspergillus kawachii; identical to SEQ ID NO: 741

SEQ ID NO: 1022 - protein, 275 aa, Aspergillus kawachii
MLHRTISRILTTTTTTATILIILLSALITLTTAQQQQPQSKATVIVTIITTATATAPPTTTTTTTQEPPSYTSPALFQSSILDVSNTYRKAHNASNLIWNTTLTQYALNWAQECKWQHSNGPYGENLAFGYPNVSSAVAAWGDEVQKYNFQEPTGFTEETGHFTQLVWRETREVGCAAIDCGYNNTNTTTNDDDDNGNGKRSEAGGGGGGGGINGTERPQGWYVVCEYSPRGNIIGGNKKLGDKEFFKINVQPSSTYSGPYNTGSAGNGAQRVEF

SEQ ID NO: 1023 - protein, 459 aa, Aspergillus kawachii
MRAIILPYILFLATLARAQLSGPVGPLVDYSTKARNQTCNIIDYGALADGKTDISQPLLDAWGNCSVGGLVYIPPGNYSLAEDIELKHGQSSAIQLDGVIMRGHRGSYQMILIRDCNDFELFSGNSRGAIQGFGYEYLQNETYGERLLRIQEVSNFSVHGFALVDSPSYYIVFDTVSSGEVYNILIRGVTSVGATDAIDVWGENMWFHDIEVSNGDECVTVKSPAHNYLIENIYCNLSGGTAIGSLGTGTNISDIHYRNLYLNRADACFLKSNNGDGVVKNIIWENVIVHGGPYPLAIDEAWGDDRGSVGVQVSNLTFRNWHGESASASRPVIRLQCDSDIPCYDITIDNVNLWANDTSYVVWLCENAYGDGACLPSAKGTTDLKSFTSKQTITATPSYAAPTMAADFTSDLPSTSPFTIPPMPTSFYPGATPISTLLHLHGAGGLPSASPVSHHQRQH

SEQ ID NO: 1024 - protein, 346 aa, Aspergillus kawachii
MKYLPLAVAVTASLAPTASAHYIFSKLVLNGEASADWQYIRETTRSICYEPTKFTNTFDNLTPNDNDFRCNLGSFSNAAKTDVAEVAAGDTIGMKLFYDTSIAHPGPGQVFMSKAPTGNVQEYEGDGEWFKIWERTLCNEEGDLTKDAWCTWGMSEFEFQIPAETPAGEYLVRAEHVGLHGAQANEAEFFYSCAQVKVTGSGTGSPSLTYQIPGLYNDSMTLFNGLNLWVDSAEKIQTDILETPIGDDVWNGSGSGSSSAASPSVSSASVASPGTTTAAVHAYVQTPASSSSSSSSNIQSAAASSGNLVSHWGQCGGLGYAGPTECESPCTCVEQNPWYHQCVTSA

SEQ ID NO: 1025 - protein, 438 aa, Aspergillus kawachii
MVILSASGLAILAGLSLAASAVPSLQKNGTTCTVIPLGNGQDDVPNILSAVDQCGQTSGGRIVLPAPYTYRINQRMTTHLTDSRLEIGGTLLFSDNIDYWVNNSYRVDFQNQSSAWRITGHDYVVDGGPYQGGVDGNGQLWYTWAKGGSNVFGRPMPVHVFQSTRATLRNLAIRQPQFWAVLVDSSSHINLDNFYVNATNHDFSVSPEGEWVQNTDGIDTYRSDHITITNWIYQGGDDAVAFKGNSTNIHVENVTVYGGPGIAFGSLGQYPDRTDIVENVTVRNVQVQPSYQRAMNSGVYFKSWIGVNYGDPPNGGGGGHGYVRNVTVENLRLKDVQLPVYIDTCLSYLFSENITQYCDTSTYEFNDLHFKNISGNGLATVTDYPGKNISFAVSLLCSEKAPCTDLTFQNINIKLPANYTGKDVLCENAEVQGLRCNT

SEQ ID NO: 1026 - protein, 257 aa, Aspergillus kawachii
MAPLKSLLLTASLATLAISTPLASDPGSLYARQFGTGSTANELEQGSCKDVTLIFARGSTELGNMGTVIGPPLCDSLKSKLGSDKVACQGVGGQYSAGLVQNALPQNTDPGSISAAKQMFEEANSKCPNTKIVAGGYSQGSAVIDNAVQEVSSTVRDQIKGVVLFGFTRNVQDHGQIPNYPKDDVKVYCAVGDLVCDDTLIVTAMHLTYGMDAGDAASFLAEKVQSSTSTSTSTSSSSDAASSSSAAGGLASFFGGL

SEQ ID NO: 1027 - protein, 88 aa, Aspergillus kawachii
MRFTYQALAVFISSLLVNSAAAHACESSAVWPDPANCHKFYQCNPGTEPAHKECGAGTAFNPKISACDYEQNVPSCFKDPHHPRPFHA

SEQ ID NO: 1028 - protein, 387 aa, Aspergillus kawachii
MALYRNIFLLASLGLSSAAPSKVQRVPDSSLHARAVCTPTAGGNSSTDDVPAITEALSSCGNGGTIVFPEGSTYYLNSVLDLSSCSDCDIQVEGLLKFASDTDYWSGRTAMISVSDVDGLKLRSLTGSGVIDGNGQDAWDLFASDSSYSRPTLLYITGGSNLEISGLRQKNPPNVFNSVKGGATNVVFSNLKMDANSKSDNPPKNTDGFDIGESTYVTITEVTVVNDDDCVAFKPSSNYVTVDTISCTGSHGISVGSLGKSSDDSVKNIYVTGATMINSTKAAGIKTYPSGGDHGTSTIQSCYGEDDDYCEENPGNAKLTDIVVSSFSGTTSDKYDPVVANLDCGADGTCGISISGFDVKAPSGKSEVLCANTPSDLGVTCTSGASG

SEQ ID NO: 1029 - protein, 841 aa, Aspergillus kawachii
MRGSNLFQLTLALLLSLVTAEDGYDGWLRYAPVSCDLHCRQALPSHIVLLNSTKGSPIETAGQELKAGFQSILSTNLTSHPFQCDSSASILVATLDEYRQKCRDINVPELDPDGFWLQSEGDTVRILGNNARGALYGAYEYLAMVAQGNFSRVAYTTSPHAPIRWVNQWDNMDGSIERGYGGASIFFKDGTVVEDMAPVEQYARLLASIRINALVVNNVNANATLLLPENMKGLGRIADACRPYGVQIGISLNFASPEDLGGLGTYDPLDPGVIAWWQNITDSLYTYVPDMAGYLVKADSEGQPGPDTYNRTLSQGANLFARALQPHGGVLMYRAFVYNNNLNESDWKADRAKAAVEYFKDLDGQFDENVVVQIKYGPIDFQVREPTSPLFANLYQTNTAIELEVSQEYLGQQCHLVYLPPLWKTVLDFDLRVDHKPSMVRDIISGQRFNRTLGGWAAVVNVGTNRTWLGSHLAMSNLYAYGRLAWSPTDDSEQILKDWTRLTFGQNHHVIDTIADMSMTSWPAYENYTGNLGIQTLTDILYTHYGPNPATQDNNGWGQWTRADHNSVGMDRTISNGTGYTGQYPEEVARLYESLETTPDDLVLWFHHVPWTHRLHSGLTVIQHFYNAHYAGSEAAHGFIKQWESLKGLIDRERYEAMRSRLVYQAGHSIVWRDAINNFYYNMTGIPDVVGRVGHHPWRIEAESMRLEGYQTYTVSPFEAASNTTAIITTSNSTTGTARTTIKAPSGVYDIGVNYYDLYGGQSKWTLSVGDKLVGQWLGDMEHQSLGHTPSIYLDGHSATRITFHGVVVRQGDQLKIVGEANGVEPAPVDYVVLLPPGVVD

SEQ ID NO: 1030 - protein, 411 aa, Aspergillus kawachii
MKTLSLVAVLLVQAWTASSSPRAKRSSGFQWFGSNESGAEFGSGNIPGTLGTDYIWPDATAIETLHSAGMNIFRVPFLMERLVPNELTGAADATYMADLKATVQIITDLGAYAVVDPHNFGRYYGNIITSTSDFAAFWTTVASEFTDNDLVIFDTNNEFHDEDQTLVLNLNQAAITAIRATGATTQYIFVEGNSYTGAWTWTTTNTNLVNLTDPNDHLIYEMHQYLDSDGSGTSSTCVSSTIGAERIADATSWLRENGKQAVLGEFAGGANSVCEEAVTGMLDAMVDASDVWLGGMWWSAGPWWGDYIFSLEPDDGVAYEYYLSVLEGYTPGSSSSSGGTTTTAAASTSSTSAAGSATTSKVTTTTAAATATSTAVAAHYAQCGGQGWTGATTCADGYTCTVENAWYSQCL

SEQ ID NO: 1031 - protein, 496 aa, Aspergillus kawachii
MMKRSALLASFLPLALGCDNPETHSCASAFSVSSAAAATFCATFTASTVTATTGVPDVFLSNCDYKTKHLSSACSCLGTSDGSAPASTPAAPAVSSSSKVGKAPAVAATRTSAIPTTFHTTPIRVPVSTPAAAAVTTQAVVPVQSSVAGNGGTTCTVTEYASISSAVASCSNILLSNINAPASSTIDLSGLQTGAAVIFAGETTFGDTYDSDFDPIVISGTDVTITGEEGHVINGNGEAYWDGEGSNGGQDKPDHFIVVKDMYNSKIENLNILNYPVHCFEIEDTEYLTITGLILNNTAGDAANSKSDGDPAAHNTDGFDIKQSDFLTLSNTWVHNQDDCVAVTSGSSIVVDNLYCYGGHGLSIGSIGGKSNNTVNGVTFSNSQVINSENGCRIKSNADTTGEVYNVRYENITLSGITDYGIDVQQDYENGGATGDPTNDVKIENISFVNVKGTMSDGKDYYILCGDGSCSNFVFTDVDITGGSDDSCNYPSSGCP

SEQ ID NO: 1032 - protein, 286 aa, Aspergillus kawachii
MMRLARTVVYFALSFLPTAFADIEFIEPAAGAVIRAGDVVTAHWRDSGALPRLASLVQYDLYLCAGGDTAGSNVRALSMFSPLIQTLLTPRSSIQEDVALLVKDALFTRGNSVSFKIDPEVGGNDANAYFLRIAASGPETSVVNYSDRFTLTNMTGSFSPTVLNGIHSAIYSTDSFPSSLEDDNHEELRKRQVAGPFTIPYQLQTGPTRYAPMAKKPGSTIPAGTPTPQYPTSAYSVATTYLPQATVQMTLSASETYSVVSIENTASPAPHAGDTKMKRFLERWKD

SEQ ID NO: 1033 - protein, 362 aa, Aspergillus kawachii
MHFLQNAFVAATMGAALAAAAPLEKRSCTFTSASAAKSGKSSCSTITLDNIAVPAGETLDLTGLKKGTTVIFEGETTFGYKEWKGPLISMSGTDITVKQASGAKINCDGARWWDGKGSNGGKTKPKFFQAHKLDESSITGLKIYNTPVQGFSILADHLTITDVTIDNSAGTSKGHNTDAFDIGQSTYITIDGATVYNQDDCLAINSGEHITFTNGYCDGGHGLSIGSIGGRSDNTVNDVTISNSKVLNSQNGVRIKTIYGKTGTVENVKFEDITLSDISKYGIVVEQDYENGSPTGTPTNGVKVEDITFKKVTGSVKSSGTDIYILCGSGSCSNWTWSGVDVTGGKKSSKCKNVPSGASCSD

SEQ ID NO: 1034 - protein, 429 aa, Aspergillus kawachii
MALIVLKVLFLASLIIPSIALSDQARNGNARTKCEVKPGGSSEIDDVPAILDALTTCGSGGRVTFTNHTYYINSVMNTTWLDDVEIDLQGTLLWSTNISYWLNHSLPVGYQNQSTAWILGGKDIVFEGHGYGTFNGSGPTWYKYVGSKSNYPRRPNQLTVSGATGAVFKGLRFVQSQMWTMSIIYTSDSVFDSIYVNNLYDDGDSAQNTDGANTIYSNNITFTNWEVVNGDDSISTKANSTDITIANSKFTSGLGIAIGSIGQYNGAFETVKGLKISNITYDKTTHAVYFKTWTGDQVGYPPNGGGGGLGYASDIVATNLKTNNLKGAPFTISQCTTFSGASGNCTNSKFQIRDLVFTDISGTVDSAEVASFQCSAVAPCEDITIENVSLRIAGNTTLADEYLCGNVEGAVGWNCTGEVCVGSSATGGC

SEQ ID NO: 1035 - protein, 271 aa, Aspergillus kawachii
MKLLSFLVGLAGLAAASPMGLAERQLSDGNELREGSCKPIIFIFARASTEPGLLGISTGPAVCNDLKMAKAGQVLCQGVGPAYTADLMSNALPDNTSPAAISEAESLFKLAASKCPNSQILAGGYSQGTAVMDDSIKQLSDDVKDKIKGVVLFGYTRNAQEGGQIGNFPKDKVKIYCAMGDMVCDGTLIVTAAHFTYVMNTGEASQWLESKLSDTTTSSLTDSSSSGTSSSTSTGDSSSESSSATGLGGLSGLSGLGSSTSGGFPSLASLF

SEQ ID NO: 1036 - protein, 440 aa, Aspergillus kawachii
MSVFKASLLFLLSSSLVHGVPHSSRASRSQQCVVPSKYQASNGTADDSSAISQAFAECATDSVIIFEEGVNYNVFQPITATNLSNVEIRMHGNLHLPQNITAVQNIVSDGSSTWFTLEGPKVDWTGPEDVNNGWIDSYGQPWWDANPAGSSGIDNRPHLMSFKTSQATIKYFRSRKPIAWNVKLHGQDITVSHAIIDATSTGSFPFNTDGFDVEGTNIQITDSIMYNGDDAIAVGADSHDILFTRNTIGYQTHGMSIGSLGKDPTDFANISNIRFDDVTVVDGLYAARFKSWSGGTGLVKNVTWNNIRVFNVTFPIYVTQSYSDQGASRSGTVNASSAVMMEDFTWSDFSGSINTYQPGDGSCVSDPCWYNVGLPNLKHTEALIIECHTSQSCKNFVTDNIQLYPQVLEPASVICLNATAALNPDLGFTCKNGTYSPIST

SEQ ID NO: 1037 - protein, 304 aa, Aspergillus kawachii
MLLSTHLLFVITTLVTSLLHPIAAHAVKRSGSLQQVTDFGDNPTNVGMYIYVPNNLASNPGIVVAIHYCTGTGPGYYGDSPYATLSEQYGFIVIYPSSPYSGGCWDVSSQATLTHNGGGNSNSIANMVTWTISKYGADSSKVFVTGSSSGAMMTNVMAATYPELFAAATVYSGVSAGCFYSNTNQVDGWNSTCAQGDVITTPEHWASIAEAMYSGYSGSRPRMQIYHGSIDTTLYPQNYYETCKQWAGVFGYDYSAPEKTEANTPQTNYETTIWGDSLQGIFATGVGHTVPIHGDKDMEWFGFA

SEQ ID NO: 1038 - protein, 339 aa, Aspergillus kawachii
MRYSLALGALCAAGALANNVDKRSYVTDWTVVTLTTTITEYPTPTVYENVAAQEATAAASSSSAAAAAAAAESSSSAAAAAAAASASAEASSSAAAAAAAAAAEASTSSVVTPVVETTAAATTAAAVATSAAEEVATSWTSAWTSAWTSSWSSTVAPSTTLATSTSSSASSTATNAYQSAVLYNHNVHRSNHSASSVEWSSDLESSAYTLAAKCVYEHDTSIDGGGYGQNIGYGVEASEIGVMITNLMYNDEMGYYTDLYGEADPDMTYFDNWGHFSQIVWAATTHVGCATVTCDSLGNVDASEALPFTVCNYSPAGNYEGEYATNVKRPLGQAVYVAS

SEQ ID NO: 1039 - protein, 384 aa, Aspergillus kawachii
MVRQLILIGGMLAAVAVHAAPAEPAHPMVTEAPDANLIEKRATTCTFSGSEGASKASKSKTSCSTIYLSDVAVPSGTTLDLTDLNDGTHVIFQGETTFGYEEWTGPLVSVSGTDITVEGESGAVLNGDGSRWWDGEGGNGGKTKPKFFYAHDLTSSTIKSIYVENSPVQVFSIDGSTDLTMTDITVDNTDGDTDDLAANTDGFDIGESTYITITGAEIYNQDDCVAINSGENIYFSASVCSGGHGLSIGSVGGRDDNTVKNVTFYDVNVLKSQQAIRIKTIYGDTGSVSEVTYHEIAFSDATDYGIIIEQNYDDTSKTPTTGVPITDFVLENIIGTCEDDDCTEVYIACGDGSCSDWTWTGVSVTGGKVSDDCLNVPSGISCDL

SEQ ID NO: 1040 - protein, 536 aa, Aspergillus kawachii
MSSFQIYRAALLLSILATANSQQVGTYTTETHPSLTWQTCTSSGSCTTNNGAVVIDANWRWVHSTSSSTNCYTGNEWDTSICTDDVTCAANCALDGATYEATYGVTTSGDELRLNFVTQGSSKNIGSRLYLMSDDSTYEMFKLLGQEFTFDVDVSNLPCGLNGALYFVAMDADGGTSKYSGNKAGAKYGTGYCDSQCPRDLKFINGEANCDGWEPSSNNANTGVGDHGSCCPEMDVWEANSISNAFTAHPCDSTSQTMCDGDTCGGTYSASGDRYSGTCDPDGCDYNPYRLGDTDFYGPGLTVDTNSPFTVVTQFITDDGTSSGTLTEIKRLYVQNGKVIANGASTYSSVNGSSITSDFCEAQKTLFGDENVFDTHGGLAGMGEAMANGMVLVLSLWDDYASNMLWLDSDYPVDSSASTPGVARGTCSTDSGVPATVEAESPNAYVTYSNIKFGPIGSTYSSGSSSGSGSSSSSSSTTTKATSTTLKTTTTTSSGSSSTSAAQAYGQCGGQGWTGPTTCVSGYTCTYQNAYYSQCL

SEQ ID NO: 1041 - protein, 459 aa, Aspergillus kawachii
MHYTLSLALAFLPFGIQAQQTLWGQCGGQGYSGATSCVAGATCSTINEYYAQCTPATGSGSATTLKTTTSTTTAAMTTTTATSSPAASASPTTTASASGNPFSGYQLYVNPYYSSEVASLAIPSLTGSLSSLQAAATAAAKVPSFVWLDTADKVPTMADYLADIKSQNSAGASPPIAGQFVVYDLPDRDCAALASNGEYSIADNGVEHYKAYIDSIREVLVQYSDVHTLLVIEPDSLANLVTNLNVAKCANAQSAYLECTNYALTQLNLPNVAMYLDAGHAGWLGWPANQQPAADLFASVYKNASSPAAVRGLATNVANYNAWTISSCPSYTQGNSVCDEQQYINAIAPLLEAQGFDAHFIVDTGRNGKQPTGQQAWGDWCNVINTGFGVRPTTSTGDDLVDAFVWVKPGGESDGTSDSSATRYDAHCGYSDALQPAPEAGTWFQAYFVQLLTNANPAF

SEQ ID NO: 1042 - protein, 993 aa, Aspergillus kawachii
MHLLPLTLFLTAAFGVSVPRSPLIPGAQIIPASNTAHLHAIGAQYPKYPDRETVTIRPSRNELDDVSSDFLWGLKQANHGGRLLLKRGETYVIGKKLDLTFLDNIEVQLEGEIQFTNNITYWQANNFYYDFQKSITFWRWGGQDIKIFGSGVLNGNGQKWYDEFAGKQILDSDNTFYRPILFLTDNATRVSVEGITQLNSPCWTNFFVRTNDVSFDNVYIHAFSTNASSDPANTDGMDSLEVDGVSFTNMRIDVGDDCFSPKPNTTNIFVQNMWCNNTHGVSMGSIGQYAGEMDIIENVYIENVTLLNGQNGARLKAWAGQDVGYGRINNVTYKNIQIQNTDAPIVLDQCYFDINATECAEYPSAVNITNILFENIWGSSSGKDGKIVADLVCSPDAVCTNITLSNVNITSPKGTAEIVCDDIQGGIGVDCGSGKTTLLEHILLSPDHGLRIAVIVNDMSSLNIDATLIKHHHTVSHTKESLIQLQNGCICCTLRGDLLAELARLASQDGVEYVVIESTGISEPMQVAETFTAEFGAAMLEADGDGSGAEQQVLSVEERRVIEDIVKQGGLHTLTSLDTTVTVIDAFNLYSNLDTAEFLSDRYTSGEVIPEDERTISDLMVDQIEFADVIIINKIDLVDKVAKDKIHTLIKLLNPAAKVLEAKYSKIDVREILDTGRFDFVKAASGAGWLRSLHEMSRLSTGNGERVAPKPETLEYGINNFVYTARRPFHPRRLFKLLHDKFIILQNAAGEDGDDDDEEEEGEDDVDDEEMKDDDEDNTEDEEEDDDEDITSIPPETILSNKRSDPILAPILRSKGFFWLATRPYQFGEWSQAGAMLTLGCGGGWFAELPDEAWPEDADVRKSIEDDFKGEWGDRRQEIVFIGEGIDTTAIKKLLDECLLDKKEMKKWEKVMRTKGVKRAEKQEIMAGIWEDGWEDWPDLEDDDIKDEEEEVKGEKSGKRKASELLNGHGHGHAHGHSHAHGPGHKSRPVVKK

SEQ ID NO: 1043 - protein, 633 aa, Aspergillus kawachii
MATVRICVCGDEGTGKSSLITSLVKGVFVTNKIQPILPQITIPPTIGTPENVTTTTVVDTSALPQERNNLAREIRKSNVILLVYSDHYSYERVALFWLPYFRSLGVNVPVVLCANKSDLAADHTEAQVIEEEMLPLMAEFKEIDSCIRTSAREHRNVNEAFFLCQKAVTHPIAPLFDSKESSLKPAAIAALQRIFYLCDKDRDGYLSDKEIKDFQMRCFEKPLSEEDLIHIKETIQRTHPHSVTPSGIDCRGFLQLNKMYAEKGRHETVWIILRAFQYTDNLSLQENFLHPRFDVPPYASAELSPEGYRFFVNLFLLSDKDNDGGLNDAELASLFAPTPGLPASWADGSFPSSTVRNEAGHVTLQGWLAQWSMTTFTSPKTTLEYLAYLGFESSDRSNPSTTAALKVTRPRKRRKRPGRVGRNVVLGHVLGTAGSGKSALLDAFLSRGFSTTYRPTIQPRTAVNTVELPGGKQCYLILDELGELEPALLENQVKLLDQCDVIVYTYDSSDPDSFAYIPALRAKYPHLEELPSVFIALKADLDRTTQRAEYQPHEYTAMLNMPSPPLHVSATWSSIQEVFVHIAEAAMEPSTAFPRSEEDVEGKWMAWGIALGAVVCAGAAAVMIWRRVSGSGV

SEQ ID NO: 1044 - protein, 292 aa, Aspergillus kawachii
MKSFITLSLLATALGAPTSTLQARQFDLSSLTSGLSALTSGSAASSSSGSTGSTGTGSETTTGSSGLSALASLFPSSSTSSTTGSTSGTSDSSSDGLSSLLSMFSSSGSGSSTENGVTQHSGSCKKLTFIFARGTTEIGNMGTVVGPEVASELASLTGNQVTVQGVNYPADWEGNVSLGSSGGPTMASYVKEALQQCPNTKVVLGGYSQGSMVVHYAANQLSADQLSGAVLFGDPLKMEGVGKLSSSKVKEFCASGDPVCENGVNVMAHLTYGSDAKEAAQFLVQAAGVSSS

SEQ ID NO: 1045 - protein, 410 aa, Aspergillus terreus
MKLSLLAVLALPLALAAPNKRASSFVWFGSNESGAEFGQGNIPGVLGKDYIWPDASAIATLHSAGMNIFRVAFMMERLVPSTMTGAADATYMGDLKAVSRVELVYLDVLANPAQTVKGDHRYGYGNIISSTSDFAAFWTTVAKEFASNDKVIFDTNNEYHDMDQTLVLNLNQAAINAIRGAGATSQYIFVEGNSYSGAWTWATVNDNLKALTDPSDKIVYEMHQYLDSDGSGTSETCVSGTIGQERVAAATTWLKNNGKKGFLGEFAGGANSVCATAVKGMLDALAQNADVWMGASWWAAGPWWGTYMFNMEPPSGTGYTNYLSVLKPYFVGGSGGTTTTTTTTTTTKTTSTATTTTTKATTTTTTTASSTATAGAQHWGQCGGNGWTGPTTCVSPYTCQKQNDWYSQCL

SEQ ID NO: 1046 - protein, 455 aa, Aspergillus terreus
MRIGSLIMAASAAGLVHAYPRREITKRETGFTWFGVSESGAEFGESNIPGTLGTDYTWPDTAKIQTLRSAGMNIFRVPFLMERLVPDNMTGTPDSTYLQGLKKTVTAITDSGAYAVLDPHNYGRYSGSIISSTSDFKAFWKTVAGEFASNDKVIFDTNNEYHDMDQSLVLDLNQAAINGIRAAGANTQYIFVEGNSYTGAWKWASTNDNLAQLTDPVDDRLVYEMHQYLDSDGSGTSETCVSATIGKERVQSATQWLKDNNKKGFLGEFAGGANQQCETAVEGLLAYMAQNADVWMGAEWWAAGPWWGDYMYSLEPTDGAAYEAYMPILKKYFVGAAGSSSSAASTSSAAASTSASSVSVTSAEASSAPAPTAPVSTAPVSTASSATTPTTTQATSVITSVTSLLPIFTSPPSTSNPPGVASRWGQCGGINWNGPKTCQGGYTCVMQNPYFHQCL

SEQ ID NO: 1047 - protein, 403 aa, Aspergillus terreus
MHMHSLVAALAAGTLPLLASAAGLHQSAVAKGLVYFGSATDNGELSDTAYVSQLSNTNDFGQITPGNSMKWDATEPSRNSFSYSGGDAIANLAEKNGQKLRCHTLVWHSQLPSWVSSGSWTNATLIAAMKNHITNVVTHYKGRCYAWDVVNEALNEDGSYRNSIFYQVIGEAYIPIAFATAAAADPSAKLYYNDYNTEYAGAKATGAQRIVKLVQSYGAKIDGVGLQAHLIVGNVASASTLASVLKGFTSLGVEVAYTELDIRMTLPSTSALLAQQATDYQNVAAACVSTSGCIGITIWDWTDKYSWVPSVFSGQGAALPWDSNFAKKPAYNGILAGLGASSSTSTTSTTLTTTTKTTTSAGSGSTGVSQKWGQCGGLGWTGPTTCVSGTTCQYQNDWYSQCL

SEQ ID NO: 1048 - protein, 847 aa, Aspergillus terreus
MGHTGRYCSIMLRTIIFIALLGIVSAENGSAGWLRYSRLPSSVVHKFDPPTRIVTLNATSSSPVYSAGKELENGFKGLFGKDLTHLSSGCGRSSSIIVGTFDSFTAACGPLPKEVVLEVDGFWLSTEGHSVRIIGQNERGALYGTFEYLSMLARGNFSSVSYVSNPSAPVRWTNEWDNMDGTIERGYGGLSFFFANGSILPDLTRAAEYARLLASVKINGVILTNVNADPATLKPENIKGLGRIGDAMRPYGVQIGIALNFASPQTLGGLPTFDPLDEDVISWWHNVTAEIYGAVPDFGGFLVKANSEGQPGPLTYNRTLAQGANLFADAVKPYGGIVMFRAFVYSLLNISDWRADRASAAYEAFQGLDGAFKDNVIVQIKAGPLDFQVREPASPLFGYLRNTNVAIELPVTQEYLGQQSHTVYLAPLWKSVLDMDLRVDNESSRVSEIVTGRRFKRKLGGFAGVANAGNNVTWMGSHLSMSNLYAYGRLAWDPTEDSETIVRDWSHLTFGLNPKVTDVVTRIHMESWPAYLNYSSGNTGLPTLTDVTNNHFGPNVRAQDDNGYGIWTRSDSFSIGMDRTVRNGTGFSGQYPPELAVKFEHIDTTPTELLLWFHHVNYTHTLPTGQTVIQYMYDTHYSGAEVAQTFPSMWKGLEKGIDQQRFREVLHQLTFQAGHAIAWRDSIVDYYHNLTQIPDEKGRVGKHEWRIEAESMTLNGYKIISPDPPESASNFSLVTTVTNTTRATAKTKLQVKSGLYDIVVVYFDLGGGVAKWETHLDNRLLGKWQGDNEYTLSHAATQEPDGASKARITFNDVHVKKGDTLEIVGVGDGLDTAPLDYVAVSPRGTMD

SEQ ID NO: 1049 - protein, 121 aa, Aspergillus terreus
MRTALAILSSTLSAALALANPLAARHGAPICPSGTAYSSMQCCAVNVADVVSLDCQPPGPLPSSAAEFKEICAKIGDKPQCCTLALAGQAIACQNPAGMDEDSGSSESESDSGSGGGGGDA

SEQ ID NO: 1050 - protein, 285 aa, Aspergillus terreus
MLWTLSILPLLGHAIASAVPAEKRQSCPGVHVFGARETTASPGYGSSSTVVNLILSAYSGSTAEAISYPACGGQSSCGGVSYSASVAAGIDAVASAVNSFNTQCPSTQLVLVGYSQGGEIMDAALCGGGVPNQGVTNTAVRLSSSAVNMVKAAIFMGDPLFRAGLPYDVGTCSAGGFDARPAGFSCPSASKIQSYCDGPDPYCCNGSNAATHNGYGAEYGQAALTFVKSKLSSSSSGGGSTGGGSGSGGTVAQYGQCGGQGYTGATTCQSPYTCTVMNQWYSQCL

SEQ ID NO: 1051 - protein, 846 aa, Aspergillus terreus
MLRSLGAAILAAGLLVAPANGAASQTYTWKNVRTGAGGGFVPGIVFNPSAKGVAYARTDIGGAYRLNSDDTWTPLQDHVNSSNWNNWGVDALATDPIDTNRLYLAVGMYTIDWDPNNGAILRSTDKGDTWESTALPFKVGGNMPGRGMGERLAVDPNDNKILYFGARSGHGLWKSTDYGVTWSNVTSFTWTGTYVQDSSSAYTADPVGIAWVTFDSTSGSKGSATPRIFVGTADTGKSVFKSEDAGKTWAWVSGEPMYGFLPHKGVLSPAEKTLYISYSNGAGPYDGTNGTVHKYNISSGVWTDISPTSVASTYYGYGGLAVDLQVPGTIMVAALNCWWPDELIWRSVDSGATWSPIWDWNGYPNINYYYGYDITNAPWIQDSTSTDEFPVRVGWMVEALAIDPFDSNHWLYGTGETIYGGHDLLKWDSAHNVTLKSLAVGVEEMAVLGLITPPGGPALLSAVGDVGGFYHTDLDTAPSQSFHTPSYGTTNDIDYAGNKPSNIVRSGSSDTDPTLALSNDFGKTWSADYAASSSTGTGKVALSADGDTILLMSSTQGAMRSQNQGTLSAVSSLPSGAAIASDKANNTVFYGGSAGSFYVSTNTGASFKKTVSLGSSSSVNAIRAQPSVAGDVWASTDKGLWHSTDYGSSFTQVGSGCTAGWSFGFGKASSTGSYPVIYGFFTVDGVTALFKTEDKGANWQMISDAEYGFGSATSNIVNGDLSNYGRVFVGTNGRGIFYGVPSGSLPTTTTTAHTTSTTKSSTSSTSTTLTTTTKTSSTSTTKSSTTTTSKTTTTTTKTTSTTSSATSTGTSTPYGQCGGIGYTGPTACPTGWKCTYANDYYSQCIQ

SEQ ID NO: 1052 - protein, 265 aa, Aspergillus terreus
MRSSILLGVLGAAGALGSPLDKRAYVTDWTVVTVTTTITGAPPAQTYAPVQAVQISQHLRRPPPPLRLRRPRRVASSKSIESLFSRSSSTSTSSSAPAATPTDYQSAILYNHNVHRSNHSASSLAWSADLESSAHTLASRCVYQHDTSIAGGGYGQNIGYGVSADEIGVMITNLMYNNEMGYYSDLYGEATPDMTNFDLWGHFSQIVWKGTTHVGCATVTCPSLGNVDSSSAVPFTVCNYSPAGNYDGEYSSNVLAPLGHAMYVA

SEQ ID NO: 1053 - protein, 371 aa, Aspergillus terreus
MHYLHSASLIAPLLAATKVAAHGHVTNVVVNGVYYQGFDIGSFPYMADPPKVAAWTTPNTGNGFISPEQYGSADIICHENATNAQAHIPIKAGDRINLQWTAWPESHHGPVIDYLARCDGSCSTVDKTSLEFFKIDGVGLVDDSDVPGVWGDDQLIKNNNSWMVEIPKSIAPGNYVLRHELIALHSAQTEGGAQNYPQCFNLQVTGSGTDQPSGVVGTKLYSESGPGIVVNIYSSLSSYTVPGPTMYSGAASITQTSSAVTSTGTAVTGTGGASQAAVAVPTSEVTTLPVQVPTTLMTSAATPVSSSAIPSSSSIVPSTSPTSSPSAGTYGTQKLYGQCGGEGWVGPTACGQGATCRAYNRYYHQCVSSTN

SEQ ID NO: 1054 - protein, 338 aa, Aspergillus terreus
MKGAMLLAFSLTAVAQQTLYGQCGGSGWSGPTQCVSGACCMSQNPWYSQCLQGNCMTTTSVSTTRTTSVSVTTTTSTGSSPSSTSVSQGCGKSPTLSSGTHTMTVNGATRQYILTLPQGYDSSRPYKLIFGYHWLSGTMQNVVSGNYYGVQPLAGNSAIFVAPQGKNNGWANSGGEDITFTDQMLSTLQGDLCIDKTQIYSMGWSYGGSMSYALACARPNVFRGVAVMSGANLSGCSPGTQPVAYYAQHGVSDTVLSISLGRQIRDTFVKDNGCTAQNPPEPAAGSGTHIKSVYSGCSSGHPVWWIPFDGPHEPLATDRGASSSWTPGQIWDFISQFS

SEQ ID NO: 1055 - protein, 248 aa, Aspergillus terreus
MRFTRSLPFVLSLFTAALADVEFTTPTVDTVLKAGDVVTVHWKDSGIPPRISELTQYDLYLCAGEDLTGLNEEIALLMKDVAFARGNSVSFKIDPALGADVPEAYFLKMVSSGPDAFTINYSHRFSISGMAGTFSPDSIQSIREDRAELRKRQAQGAYTIPYELQVGPTRYAPMAKQPGSTIPPNLSPTPQHPASPYTIATTFLPAPTVQQTMTATLTHSVVSMENTASPAPNPHDAQMKRYLERWKD

SEQ ID NO: 1056 - protein, 384 aa, Aspergillus terreus
MVWLAALVLLPLVSAQSPVWGQCGGTGWTGATTCASGSCCVYSNEWYSQCQPCSGSGSTTLTTTTTSKASSTTTTTKAATSSTCALPSKYTWTSTGPLANPKSGYVSLKDFTHVPYNGQHLVYASDVNSAGSYGSMSIGPFADWSAMSSASQNTMSSGTVAPQLFYFRPKSTWVLAYQWGATAFSYRTSSDPTNANGWSSAQPLYSGTLSSSSTGPIDLTLIGDDTTMYLFFAGDNGNIYRASMPIGNFPGNFGSSATVVLSDSQYKLFEAVQVYRVQGQQLYLMIVEAIGSNGRYFRSFTATSLGGAWTAQATTEAAPFAGKANSGATWTNDISHGDLIRSTADETMPVDPCNLQFLYQGRDPSQNPDYNLLPYRPGLLTLKR

SEQ ID NO: 1057 - protein, 346 aa, Aspergillus terreus
MKSFSPSLLLLASVAPLVSGHYVFSKFLVDGSVSQDFEYIRRNSNGYMPTLAGDILSNDFRCNQGSMDSAASTKVYTVAPGTEIGFGLAYGASMKHPGPLQVYMSKAPGDVKEYDGSGDWFKVYQEGVCSDISDGLVDTDWCTWGKDTVKFKIPSDMPPGQYLVRVEHIGLHRGFSGNSEFYFTCAQIEVTGSGTGTPAEVAKIPGIYKPDDANIHFNIYYPTPTAYDLPGPSVWVEGKGGSAAQSSAPAPSAVESAASEAPAVTSAVKVPAESETTAAPAQTTLATACKPAAPAETTAASEVAINAPAGAIKKYFQCGGMHWKGSGACESGTSCKQWNPYYHQCV

SEQ ID NO: 1058 - protein, 451 aa, Aspergillus terreus
MRLWPLTFWVTLVTAWVDNRGTTCVLYPESLVHRGQPVDDAPSIQQAFDMCGTNGTVIFSENVFHVNTVLNTTNLLNCDVHLRGELRFSTNIPYWRTHSISVVLQDQVTAWLFGGQNVNFYGEGGFYNGQGQAWYNANRNESNQAGRPMSMTFYNSTNLLVDGLKVVQPQFWATFVWASRNVTFTNLFVNATSNSEWGTMNTDGFDSWQSDNLLVENATIISGDDCIAAKGNTTNLLARNIYCEGGTGITIGSIGQYPDMPDYNLNTTFENVTIKNAMDGAYIKTWQGTRIFTPSNGDWGGGGTGLVKNITFRNFEMDNVGLPIQVSQCVYSAGSDKNCNTSTLQIEDVKWENIHGTSRFNIASSIYCSDERPCPNITFENVNITSLNATRGLPYYGTDMQHELFQCTNVLGQKSSGIPCNQAAPSNFSQWIYGNVDSSGLSTGTSGHLGN

SEQ ID NO: 1059 - protein, 615 aa, Aspergillus terreus
MATVRICVCGDEGTGKSSLITSLVKGVFVTHKIQPVLPQITIPPTIGTPENVTTTTVVDTSALPQERNNLAREIRKSNVILLVYSDHYSYERVALFWLPHFRSLGVNVPVVLCANKSDLAADHSEAQVIEEEMLPLMAEFKEIDSCIRTSAREHRNVNEAFFLCQKAVTHPIAPLFDSKESSLKPAAIAALQRIFYLSDKDRDGYLSDKEIKEFQMRCFEKPLSEEDLVHIKETIQKAHPASVTPSGIDCRGFIHLNRMYAEKGRHETVWIILRAFQYTDNLSLQESFLHPKFEVPPYASAELSPEGYRFFVNLFLLSDKDNDGGLNEAELASLFAPTPGLPASWADGSFPSCTVRNEAGHVTLQGWLAQWSMTTFTSPKTTLEYLAYLGFESSDRSNPSTTAALKVTRPRKRRRRPGRVGRNVVLGHVLGAPGSGKSTLLDAFLSRGFSTTYHPTIQPRTAVNTVELPGGKQCYLILDELGELEPAILENQAKLLDQCDVIIYTYDSSDPDSFSYITSLRDKYPHLEELPSVFVALKADLDRTTQRAEYQPHEYTAMLNMPSPPLHVSATWSSIQEVFVHIAEAAMEPSTAFPRSEEDVEVLSNFGVMYQGTPR

SEQ ID NO: 1060 - protein, 264 aa, Aspergillus terreus
MDQKATEYIQLPRPATRHHVQRPHQFSRARTQLLTQPDVEANTDGADTIRSSHITFNNWTVYNGDDSISLKGNSTDITITNSHFYNGLGIALGSIGQYKDQFETIERFTVKNIDYHNTLHAVYFKTWTDDQNGYPPNGGGGGLGYASDMVFQNLRASGLRGSAISISQCTRFSGAPGEGNCTNSQFQIRDITLANLTGTTKVSSVASFQCSAVAPCTNIGLFHTDLTLSNGTIAGEYLCGNVEDPRGFECTGAPCVGGSATGEC

SEQ ID NO: 1061 - protein, 503 aa, Aspergillus terreus
MRFTVLIGGGFSLVHLVTALNNGLAVTPQMGWDNWNAFGCSLSQSLILSTASFIKKTGLRDAGYHYIILDDCWSSGRASNGALIADSTKFPNGMSYLGNQLHADGFGFGIYSSAGTKTCAGYPGSLGYETIDANTFASWGVDYLKYDNCNNNGQSGSQAVSSARYAVMQKALAASGRQILYAICNWGEDKPWIWGPSVGNSWRITGDIFDRFNTAYSTCPVPNSGGYQCSVTQIMSMQATISSYSAKGGWNDMDMLEVGNGGMSDAQYVAHFSIGFSILANPAVIAVNQDPLGVAASYRWTRNNVQLWSGPLASTTGGSVNDVVVVLFNNGGSSTTASATLSEIFGSSSVPSTQFEIRDLWGSRLSDSQAQSILNDGAAAHSSLLYNATAQSYSTGLSQANPMLLGTAVGSVSGPSGTITQSIPATGCRMFRLRAISSTTSSTTTTRSSTTTKSTSSTTTSAAQPQQTKWGQCGGQGWTGPTQCESPSTCQFQNGKCSQYKTI

SEQ ID NO: 1062 - protein, 237 aa, Aspergillus terreus
MRSFFSLALIASATGILASPADPMITASPTLAKRATSCTFSGSNGAASASASQKACATMVLSALAVPSGTTLDLSDLADDTTVIFEGETTWGYKEWSGPLLQISGKGIKVQGASGAVLNPDGARWWDGEGSNGGKTKPKFFYAHDLSDASITDLHITNTPVQAVSINGCDGLTVTDMTIDNSAGDSAGGHNTDGFDIGSSSDVTITGAKVYNQDDCVAVNSGTGVTFSGGLDEWYVM

SEQ ID NO: 1063 - protein, 351 aa, Aspergillus terreus
MHTLQSAILLGGLLATQVAAHGHVTNIVINGVYYRGWNIDSDPYNSNPPLVAAWRTPNTANGFIAPDAFGTSDIICHLNALNGQGHIQVAAGDRISLQWNTWPESHHGPVLDYLADCGGSCETVDKTTLKFFKIDGVGLVDDTTPPGIWGDDQLIANNNTWLVEIPSSIAPGNYVLRHELIALHGAGSANGAQNYPQCFNLQITGSGTVKPSGVLGTALYSPTDPGILVNIYNSLNYIVPGPTPIPQAVSVVQSSSAIRATGTATAPGATGGTTATTTSKATTTSSTTLVTTTSASTTSRTTTTTTAGAGGSQTVYGQCGGTGWTGPTACVASATCTTLNPYYAQCLPTST

SEQ ID NO: 1064 - protein, 471 aa, Aspergillus terreus
MNSLTKSIIAAGLVFHPLVQAQQPSSSSPGNPSLTTWKCTTGGGCLQQDTSVVLDWGFHWIHTSNSQSCTTSSGVNSALCPDEATCAKNCVIDPANYATAGVATSGDTLTMHQYYQNNGVITNASPRLYLLGSDGNYVMLKLLGQELSFNVDLSTLPCGENGALYLSEMSATGGRNEYNTGGAQYGSGYCDAQSPVMAWRNGTLNTSGQGFGCNEMDILEANSRANSFTPHPCNGNDCDKGGCGFNPYALGQQNYWGPGGTVDTSKPFTITTQFITDDGTKTGTLKEIRRQYIQNGKIIANAKSSAGVDSITEPWCESVDGAAATYGGLKRMGEALGRGMVLIFSIWNDAGGFMNWLDSGSAGPCSSTEGNPSLIQSAHPDTHVVFSNIRWGDIGSTYTNPGGSGSSSSSTTTTTKTTSTTTTTKITTTTSAGGATQTHWGQCGGQGWTGPTACASPYTCQKQNEWYSQCL

SEQ ID NO: 1065 - protein, 86 aa, Aspergillus terreus
MQLTNFLAAAATALLCTTARANAVPCNGRDIWAYPGDCHAFYQCGAGNVGVFMTCGNDRAFHPELRTCGPITPELCRWFNGGFDSN

SEQ ID NO: 1066 - protein, 841 aa, Aspergillus niger; identical to SEQ ID NO: 143

SEQ ID NO: 1067 - protein, 459 aa, Aspergillus niger; identical to SEQ ID NO: 306

SEQ ID NO: 1068 - protein, 250 aa, Aspergillus niger
LSLLSAALADIEFIDPAAGTVIRAGDEFTAHWRDSGTLPRLASLVQYDLYLCAGGDTVGSHEDIALLAKNALFAKGNSVTFKIDSEVGGNDANAYFLRIAASGPDASVVNYSDRFTLTNMTGSFSPTVINGIPSAMYPTDSFPPAHMDESHEELRKRQVAGPFTIPYQLQTGPTRYAPMAKKPGSTIPVGTPTPQYPTSAYSVATTYLPQATVQMTLSASETYSVISIENTASPAPHAGDTKMKRFLERW

SEQ ID NO: 1069 - protein, 439 aa, Aspergillus niger
MYLLPLTLFLTAAFGVSIPRSPLIPGAQIVPASSTADLRAIGAQHHKYPDRETVTIRASRNALDDVSSDFLWGLKQANHGGRLLLKQGETYVIGKKLDLTFLDNIEVQLEGEIQFTNNITYWQANNFYYDFQKSITFWRWGGQDIKIFGSGVLNGNGQKWYDEFAGKQILDSDNTFYRPILFLTDNATRISVEGITQLNSPCWTNFFVRTNDVSFDNVYIHAFSTNASSDPANTDGMDSLDVDGVSFTNMRIDVGDDCFSPKPNTTNIFVQNMWCNNTHGVSMGSIGQYAGEMDIIENVYIENVTLLNGQNGARLKAWAGQDVGYGRINNVTYKNIQIQNTDAPIVLDQCYFDINATECAKYPSAVNITNILFENIWGSSSGKDGKIVADLVCSPDAVCTNITLSNVNLTSPKGTAEIVCDDIQGGIGVDCVSDESVTR

SEQ ID NO: 1070 - protein, 362 aa, Aspergillus niger; identical to SEQ ID NO: 719

SEQ ID NO: 1071 - protein, 437 aa, Aspergillus niger
MRASILPLTLFLATLAGAQLSGPVGPLVDYSTKARNQTCNIIDYGAVADGKTDISQALLDAWGNCSVGGLVYIPPGNYSLAEDIELKHGQSSAIQLDGVVMRGHRGSYQMILIRDCNDFEFFSGNSRGAIQGFGYEYLQNDTYGERLLRIQEVNNFSVHGFALIDSPSYYIVFDTVTSGEVYNILIRGVTSVGATDAIDVWGENMWFHDIEVSNGDECVTVKSPAHNYLIENIYCNLSGGTAIGSLGTGTNISDIHYRNLYMNQADACFLKSNNGDGIVKNIIWENVIVHGGPYPLAIDEAWGDDRGSVGVQVSNLTFRNWHGESVSASRPVIRLQCDSDVPCYDITIENVNLWANDSNYVVWQCENAYGDGACLSSAEGTKDLKTFTSKQTITATPSYAAPTMAADFTSNLPSTSPFTIPPMPTSFYPGATPISTL

SEQ ID NO: 1072 - protein, 410 aa, Aspergillus niger
MKTLSLAAVLLVQAWTANSSPRAKRSSGFQWFGSNESGAEFGSGNIPGTLGTDYIWPDATAIATLHSAGMNIFRVPFLMERLVPDELTGAADATYMADLKATVQTITDLGAYAVVDPHNFGRYYGNIITSTSDFAAFWTTVASEFTDNDLVIFDTNNEFHDEDQTLVLDLNQAAITAIRATGATTQYIFVEGNSYTGAWTWTTTNTNLVNLTDPNDHLIYEMHQYLDSDGSGTSSTCVSSTIGAERIADATTWLKENGKQAVLGEFAGGANSVCEEAVTGMLDAMVDASDVWLGGMWWSAGPWWGDYIFSLEPDDGIAYEYYLGVLEGYTPGSSSGSSGGSTTSAVASASSTSSAGSTTSKVTTTTAATATSTAVAAHYAQCGGEGWTGATTCADGYTCTVENEWYSQCL

SEQ ID NO: 1073 - protein, 356 aa, Aspergillus niger
MKTTTYSLLALAAASKLASAHTTVQAVWINGEDQGLGNSADGYIRSPPSNSPVTDVTSTDMTCNVNGDQAASKTLSVKAGDVVTFEWHHSDRSDSDDIIASSHKGPVQVYMAPTAKGSNGNNWVKIAEDGYHKSSDEWATDILIANKGKHNITVPDVPAGNYLFRPEIIALHEGNREGGAQFYMECVQFKVTSDGSSELPSGVSIPGVYTATDPGILFDIYNSFDSYPIPGPDVWDGSSSGSSSGSSSAAAAATTPATQAAVAVSSSAAAVVESTSSAAAAAAATTEAAAPVAVVAPAPTSSVVPAVSASASASAGGVAKKYERCGGISHTGPTTCESGSVCKKWNPYYYQCVESQ

SEQ ID NO: 1074 - protein, 362 aa, Aspergillus niger; identical to SEQ ID NO: 702

SEQ ID NO: 1075 - protein, 378 aa, Aspergillus niger
MVTSSSVIGLTLWAALVSASPVADPLVTPAPKLEDLEKRATSCTFSGSEGASSASKSKTSCSTIVLSDVAVPSGTTLDLTDLNDGTHVIFEGETTFGYEEWSGPLVSVSGTDITVTGADGAYLNGDGSRWWDGEGSNGGKTKPKFFYAHDLTSSTISGIYIQNSPVQVFSIDGSTYLTMEDITIDNTDGDDGEAANTDGFDIGDSTYITITGANVYNQDDCVAVNSGENIYFSGGVCSGGHGLSIGSVGGRSDNTVKNVTFYDSDIKSSQNGVRIKTIYGDTGSVSEVTYKEITLSDITDYGIVVEQNYDDTSESPTDGITIEDFVLDNVQGSVESSGTNIYIVCGSDSCTDWTWTDVDVTGGKTSSDCENVPDDISC

SEQ ID NO: 1076 - protein, 631 aa, Aspergillus niger
SVRICVCGDEGTGKSSLITSLVKGVFVTNKIQPILPQITIPPTIGTPENVTTTTVVDTSALPQERNNLAREIRKSNVILLVYSDHYSYERVALFWLPYFRSLGVNVPVVLCANKSDLAADHTEAQVIEEEMLPLMAEFKEIDSCIRTSAREHRNVNEAFFLCQKAVTHPIAPLFDSKESSLKPAAIAALQRIFYLCDKDRDGYLSDKEIKDFQMRCFEKPLSEEDLVHIKETIQRTHPHSVTPSGIDCRGFLQLNKMYAEKGRHETVWIILRAFQYTDNLSLQENFLHPRFDVPPYASAELSPEGYRFFVNLFLLSDKDNDGGLNDAELASLFAPTPGLPASWADGSFPSSTVRNEAGHVTLQGWLAQWSMTTFTSPKTTLEYLAYLGFESSDRSNPSTTAALKVTRPRKRRKRPGRVGRNVVLGHVLGAAGSGKSALLDAFLSRGFSTTYRPTIQPRTAVNTVELPGGKQCYLILDELGELEPALLENQVKLLDQCDVIVYTYDSSDPDSFAYIPALRAKYPHLEELPSVFIALKADLDRTTQRAEYQPHEYTAMLNMPSPPLHVSATWSSIQEVFVHIAEAAMEPSTAFPRSEEDVEGKWMAWGIALGAVVCAGAAAVMIWRRVSGSGV

SEQ ID NO: 1077 - protein, 271 aa, Aspergillus niger
MKLPYFLLGLAGLAAASPMGLAERQLSDGNELREGSCKPIIFIFARASTEPGLLGISTGPAVCNDLKMAKAGQVLCQGVGPAYTADLMSNALPDNTSPAAISESESLFKLAASKCPNSQILAGGYSQGTAVMDDSIKQLPDDVKDKIKGVVLFGYTRNAQEGGQIGNFPKDKVKIYCAMGDLVCDGTLIVTAAHFTYVMNTGEASQWLESKLSDTTTSSLTGSSSSDTSSSTSTGDSSSESSSAAGLGGLSGLTGLGSSTSGGFPSLASLF

SEQ ID NO: 1078 - protein, 354 aa, Aspergillus niger
MHSYQLLGLAAVGSLVSAAPAPSRVSEFAKKASTCTFTSASEASESISSCSDVVLSSIEVPAGETLDLSDAADGSTITFEGTTSFGYKEWKGPLIRFGGKDLTVTMADGAVIDGDGSRWWDSKGTNGGKTKPKFMYIHDVEDSTFKGINIKNTPVQAISVQATNVHLNDFTIDNSDGDDNGGHNTDGFDISESTGVYISGATSISFTGGTCSGGHGLSIGSVGGRDDNTVKNVTISDSTVSNSANGVRIKTIYKETGDVSEITYSNIQLSGITDYGIVIEQDYENGSPTGTPSTGIPITDVTVDGVTGTLEDDATQVYILCGDGSCSDWTWSGVDLSGGKTSDKCENVPSGASC

SEQ ID NO: 1079 - protein, 384 aa, Aspergillus niger; identical to SEQ ID NO: 725

SEQ ID NO: 1080 - protein, 341 aa, Aspergillus niger
MRQAQSASLLAALLSATQVAAHGHVTNLVVDGVYYEGFDISVFPYESDPPKVAAWTTPNTGNGFISPDEYRNPNIICHENATNAQAHVVVGAGEKINIQWTAWPDSHHGPVLDYLARCDGSCETVDKTDLEFFKIDGVGLVSDTEVPGTWGTDQLINNNNSWMVEIPPSIAAGNYVLRHELIALHGAEEQDGAQNYPQCFNLQVTGTGTATPSGVKGTELYTATEGGILVNIYSSLSTYTMPGPTAYSGDVSITQTTSAVTSTGTAVVGSASAPTTSVQPEPAQSTITPAPAVSSAASGSSGSQSLYGQCGGINWTGATQCASGSSCHSYNPYYYQCIASA

SEQ ID NO: 1081 - protein, 436 aa, Aspergillus niger
MLVTPLIALLPAIAAAQVSGTVGPRTSASAKAAEKVCNVLDYGASANSTNDIGPPLKEAFQDCQTGGLVYIPEGNYLLSSWVSLVYGSGWALQLDGIIYRDKNVTDGGNMIFIEHTNDIEIFSNNSAGAIQGYGYLFHEQDEYGPRILRLNNVTDFSVHDLILVDSPAYFLNLVESYNGEVYNMVIRGASMGGLDGIDISGANYWIHDVEVTNGDECVTVKSPSANVRVENVFCNHSGGCAMGSLGTDTNISNIEYENIYTYNSTQMYMIKSNGGNGTVTNCSFKNFIGYSNAYMLDLDTYWGDQSDGDGIKYENIGFENWKGTSSNGIQRSPIRILCPDENPCTNITLTAVELWTDECSSAYGEGECLRQQNGTLASYSFTTTITSVPVTAYSPTTTMPGLISTSMDTTTSIPIPTIPTSFFPGASAYSTLMANM

SEQ ID NO: 1082 - protein, 488 aa, Aspergillus niger
MRISNLIVAASAASMVSALPSRQMKKRDSGFKWVGTSESGAEFGSALPGTLGTDYTWPETSKIQVLRNKGMNIFRIPFLMERLTPDGLTSSFASTYLSDLKSTVEFVTNSGAYAVLDPHNYGRFDGSIITSTSDFKTWWKNVATEFADNDKVIFDTNNEYHDMEQSLVLDLNQAAINGIRAAGATTQYIFVEGNAYTGAWDWTTYNDNLSGLTDSEDKIIYEMHQYLDSDSSGTSETCVSSTIGQERLEKATEWLKTNNKQGIVGEFAGGVNSVCEEAVEGMLAYMSENSDVWVGASWWSAGPWWGTYMYSLEPTDGTAYSTYLPILEKYFPSGDASASSSASVSVAAATSTASTTTAAFEQTTTPATQVEIASSSSSSSANAASQTTLSKVKSKSKSPCKLSSATSSAVAATTPVVVATTPAVAPTSSSVAFVTTSVYVPTTTAAVAPSQVNQYYQCGGINWTGPTVCASPYTCKVQNDYYYQCVAE

SEQ ID NO: 1083 - protein, 454 aa, Aspergillus niger
MSWSSPAAQYIYVLVIQLHLWFILKTAFSPSNQAMAPIALKILLFTSLIVPSISLSDQARNGHARTICEVKPGGSSEIDDVPAIVDALTTCGSGGRVIFSNNTYHINSVMNTIWLDDVEIDLQGTLLWSTNISYWLNHSLPVGYQNQSTAWILGGKDITFEGHGYGTFNGSGQTWYKYVGSTSNYPRRPNQLTVSGAMGAVFKGLRFVQSQMWTMSIIHTSNSWFDSIYVNNLYDDGDSARYKNITFTNWEVVNGDDSISTKANSTDITIANCTFTSGLGIAIGSIGQYNGAFETVERLKISNITYEKTTHAVYFKTWTGDQVGYPPNGGGGGLGYASDIVATNLKTNNLKGAPFTISQCTTFSGASGNCTNSKFQIRDLVFTDISGTTDSSDVASFQCSAVAPCEDITIENVSLRIAGNTTHAEEYLCGNVDGTVGFNCTGDVCVGSSATGGC

SEQ ID NO: 1084 - protein, 493 aa, Aspergillus niger
MSSFQIYRAALLLSILATANAQQVGTYTTETHPSLTWQTCTSDGSCTTNDGEVVIDANWRWVHSTSSATNCYTGNEWDTSICTDDVTCAANCALDGATYEATYGVTTSGSELRLNFVTQGSSKNIGSRLYLMSDDSNYELFKLLGGTGYCDSQCPRDLKFINGEANCDGWEPSSNNVNTGVGDHGSCCAEMDVWEANSISNAFTAHPCDSVSQTMCDGDSCGGTYSASGDRYSGTCDPDGCDYNPYRLGNTDFYGPGLTVDTNSPFTVVTQFITDDGTSSGTLTEIKRLYVQNGEVIANGASTYSSVNGSSITSAFCESEKTLFGDENVFDKHGGLEGMGEAMAKGMVLVLSLWDDYAADMLWLDSDYPVNSSASTPGVARGTCSTDSGVPATVEAESPNAYVTYSNIKFGPIGSTYSSGSSSGSGSSSSSSSTTTKATSTTLKTTSTTSSGSSSTSAAQAYGQCGGQGWTGPTTCVSGYTCTYENAYYSQCL

SEQ ID NO: 1085 - protein, 440 aa, Aspergillus niger
MSVFKASFLFLLSSSLVHGVPHSSRASRSQQCVVPSKYQASNGTADDSAAVSQAFAQCATDSVIIFEEGVNYNIFQPITATNLSNVEIRMHGNLHLPQNITAVQNIVSDGTSTWFTLEGPKVDWIGPEDVNNGWIDSYGQPWWDANPAGSSGIDNRPHLMSFKSSQATMKYFRSRKPIAWNVKLHGQDITVSHAIIDATSTGSFPFNTDGFDVEGTNIQITDSIMYNGDDAIAVGADSHDILFTRNTIGYQTHGMSIGSLGKDPTDFANISNIRFDDVTVVDGLYAARFKSWSGGTGLVKNVTWNNIRVFNVTFPIFVTQSYSDQGASRSGTVNASSAVMMEDFTWSDFAGSINTYQPGDGSCVSDPCWYNVGLPNLKHTEALIIECHTAQSCKNFVTDNIQLYPQVLEPASVICMNATAALNPDLGFTCKNGTYSPLSN

SEQ ID NO: 1086 - protein, 436 aa, Aspergillus niger
MPSAISIGVFAGLSLAASAVPSLRKNGTTCTVIPLGNGQDDVPNILSAVDECGQTSGGRVVLPAPYTYRINQRMTTHLTDSRLEIGGTLLFSDDIDYWVNNSYRVDFQNQSSAWRITGHDYVVDGGPHRGGVDGNGQLWYTWAKGGSNVFGRPMPVHVFESTRATLRNLAIRQPQFWAVLVDSSSHINLDNFYVNATNHDSSVSPEGEWVQNTDGIDTYRSDHITITNWVYQGGDDAVAFKGNSTNIHVENVTVYGGPGIAFGSLGQYPDRTDIVENVTVRNVRVQPSFQRAMNSGVYFKSWIGVNYGVPPNGGGGGHGYVRNVSVENLRLKDVQLPVYIDTCLSYLFSENITQYCDTSTYEFEDLHFRNISGNGLATVTDYPGKNISFAVALLCSEKAPCTDLTFQDISITLPGNYTGKHVLCENAEVEGLPCNS

SEQ ID NO: 1087 - protein, 496 aa, Aspergillus niger
MMKRSALLASFLPLALGCDSAETHSCASAFSVSSAAAASFCATFTASTVTATTGVPDVFLSNCDYKTKHLSSACSCLGTADGSAPASTPAAPAVSSSSKVGKAPAVAATRTSAIPTTFHTTAVRVPLSTSAAAAVTSQAVLPAQSSVAGNGGTTCTVTEYASISSAVASCSNILLSNINAPASSTIDLTGLQTGAAVIFAGETTFGDTYDSDFDPIVISGTDVTITGEEGHVINGNGEAYWDGEGSNGGQDKPDHFIVVKDMYNSKIENLNILNWPVHCFEIENTEYLTISGLILNNTAGDAANSKSDGDPAAHNTDGFDIKQSDFLTLSNSWVHNQDDCVAVTSGSSIVVDNLYCYGGHGLSIGSIGGKSNNTVDGVTFSNSQVINSENGCRIKSNADTTGEVYNVKYENITLSGISDYGIDIQQDYENGGATGDPTNGVKIENISFVNVKGTMSDGKDYYILCGDGSCSNFVFTDVDITGGSDDSCNYPSSGCP

SEQ ID NO: 1088 - protein, 435 aa, Aspergillus niger
MRLTHVLSHTLGLLALGATAEAFSRSREAACSPKKPFRPLPTSSSRDKTCHVRSHGDGSDDSDYILSALHQCNHGGKVVFDEDKEYIIGTALNMTFLKNIDLEVLGTILFTNDTDYWQANSFKQGFQNATTFFQLGGEDVNMYGGGTINGNGQVWYDLYAEDDLILRPILMGIIGLNGGTIGPLKLRYSPQYYHFVANSSNVLFDGIDISGYSKSDNEAKNTDGWDTYRSNNIVIQNSVINNGDDCVSFKPNSTNILVQNLHCNGSHGISVGSLGQYKDEVDIVENVYVYNISMFNASDMARIKVWPGTPSALSADLQGGGGSGSVKNITYDTALIDNVDWAIEITQCYGQKNTTLCNEYPSSLTISDVHIKNFRGTTSGSEDPYVGTIVCSSPDTCSDIYTSNINVTSPDGTNDFVCDNVDESLLSVNCTATSN

SEQ ID NO: 1089 - protein, 434 aa, Aspergillus niger
MKLPILVTLFITLPALCVSSKTPSPPTISAYPKSLGNFKPASGRQNSTSNVCEVKPNQTDAAPGILAAAHTCNNGGTVFLPPGDFVVATALDLTFLNNIDFAIWGNITFKEDLDLWTTQAFQYTFQTASLFWRFGGNNVNIYGDGKGVIDGAGQYWWSAMAEDSSVVRPCLLGTDGLHHATISGLKMLNSPNWFNLIANSTDILISNMTMLVKSEISDAPAKNTDGWDIYRSSNIVIQDSRIVNTDDCVSFKPNSTQIVIQNLECTGSHGISVGSLGQYQGETDIVEDLYIYNISMTDASDVARIKVWPGVPPDTSGSTSGGGLGRVRNVTYEYMQSENNDHVISVSQCYESKNQTMCDSYPSKLVIEDVLFKDFKGTTSKKYDPEIGELTCSSPDVCHNITVQDISVTPPSGNSPTFTCNNMGNSNLEDITCA

SEQ ID NO: 1090 - protein, 340 aa, Aspergillus niger; identical to SEQ ID NO: 1002

SEQ ID NO: 1091 - protein, 406 aa, Aspergillus niger
MTLYRNLLLLASLGLSYAAPSKVQRAPDSSLHARAVCTPTAGGDSSTDDVPAITEALSSCGNGGTIVFPEGSTYYLNSVLDLGNCSNCDIQVEGLLKFASDTDYWSGRTAMISVSDVDGLKLRSLTGSGVIDGNGQDAWDLFASDSSYSRPTLLYITGGSNLEISGLRQKNPPNVFNSVKGGATNVVFSNLKMDANSKSDNPPKNTDGFDIGESTYVTITEVTVVNDDDCVAFKPSSNYVTVDTISCTGSHGISVGSLGKSSDDSVKNIYVTGATMINSTKAAGIKTYPSGGDHGTSTVSNVTFTDFTVDNSDYAFQIQSCYGEDDDYCEENPGNAKLTDIVVSSFSGTTSDKYDPVVANIDCGADGTCDISISGFDVKAPSGKSEVLCANTPSDLGVTCTSGASG

SEQ ID NO: 1092 - protein, 370 aa, Aspergillus niger; identical to SEQ ID NO: 710

SEQ ID NO: 1093 - protein, 303 aa, Aspergillus niger
MLSTHLLFLATTLLTSLFHPIAAHVAKRSGSLQQITDFGDNPTGVGMYIYVPNNLASNPGIVVAIHYCTGTGPGYYSNSPYATLSEQYGFIVIYPSSPYSGGCWDVSSQATLTHNGGGNSNSIANMVTWTISEYGADSKKVFVTGSSSGAMMTNVMAATYPELFAAGTVYSGVSAGCFYSDTNQVDGWNSTCAQGDVITTPEHWASIAEAMYPGYSGSRPKMQIYHGSVDTTLYPQNYYETCKQWAGVFGYDYSAPESTEANTPQTNYETTIWGDNLQGIFATGVGHTVPIHGDKDMEWFGFA

SEQ ID NO: 1094 - protein, 88 aa, Aspergillus niger
MRFTYQALAVFISSLLVNSAAAHACESSAVWPDPADCHHFYQCNPGTEPAHKVCGAGTAFNPKISACDYEQNVPSCFKDPHHPRPFHA

SEQ ID NO: 1095 - protein, 267 aa, Aspergillus niger
MAPLKSLLLGASLATLALSTPLATDAENLYARQFGTGSTANELEQGSCKDVTLIFARGSTELGNMGTVIGPPLCDNLKSKLGSDKVACQGVGGQYSAGLVQNALPQNTDPGSISAAKQMFEEANSKCPNTKIVAGGYRCWGNSQGSAVIDNAVQELSTTVKDQVKGVVLFGFTRNVQDHGQIPNYPKDDVKVYCAVGDLVCDDTLVVTAMHLTYGMDAGDAASFLAEKVQSSSSSTTSSSSDAASSSSAAGTSSSGLSGLSSFFGGL

SEQ ID NO: 1096 - protein, 629 aa, Aspergillus niger
MHGLRLVCSIGALPLAILAYPAASLHTNPVSADLDSLRLTSNSEYVNSVHVNMNLSVAVSAEEHYTDTAARLLQNIVPGASFRLIDDHFVGDNGVAHVYLRQTLHGNDIDNADFNIGKDGLVLSFGHSFFTGALPSSYLDNPNVLGPGAALRGARDALQLPLTIDNVSTEAADGRNEYIFREVVGAVSDPKAKLVYLVKPEGTLALTWRIETDMYEHWLLTYIDAENTTVHGVVDYVADATYQVYPWGINDPAEGHRTIVTDPWDLSASAYTWISDGRDNYTTTRGNNAIAHWNPTGGGSYLYNLRPSDPNLNFQWPYSPNMSPPRSYINASIVQLFYTANTYHDLLYTLGFTESAGNFQWNNSAHGGRDKDYVILNAQDGSGFSNANFATPPDGIPGRMRMYIWIESTPSRDGSFDAGIVIHEYTHGVSNRLTGGSHNAGCLSTLESGGMGEGWGDFMATAIRIKPNDTRTTSYTMGAWADNDKRGVRDYPYSTSFAENPLNYTSVNTMNGVHAIGTVWATMMYEVLWNLIDKYGKNDGSRPVFRNGVPTDGKYLMMKLVMDGMALQPCNPNFVQARDAILDADIVLTGGKNRCEIWRGFAKRGLGQGAAHSSLNWMRRGSTLLPKGC

SEQ ID NO: 1097 - protein, 300 aa, Aspergillus niger
MRYSLALGALCAAGALANNVDKRSYVTDWTIVTLTTTITEYPTPTVYENVAAQEASAASSSSAAAASTSSVVTPVVETTAAATTAAAATTAAAEEVATSWTSAWTSAWTSSWSSAAAPTTTLATSTSSSASSTATNAYQSAVLYNHNVHRSNHSASSLEWSSDLESSAYTLAAKCVYEHDTSIDGGGYGQNIGYGVESSEIGVMITNLMYNDEMGYYTDLYGEADPDMTYFDNWGHFSQIVWAATTHVGCATVTCDSLGNVDASEALPFTVCNYSPAGNYEGEYGTNVKRPLGQAVYVAS

SEQ ID NO: 1098 - protein, 128 aa, Aspergillus niger
QQPKSTVIITIIAPPTTTQQPPSYTSPALFQSSILDVSNTYRKAHNASNLIWNTTLTQYALDWAQGCKWQHSNGPYGENLAFGYPNVSSAVAAWGDEVQKYNFQEPTGFTEETGHFTQLVWRETREVG

SEQ ID NO: 1099 - protein, 423 aa, Aspergillus niger; identical to SEQ ID NO: 852

SEQ ID NO: 1100 - protein, 300 aa, Aspergillus niger
MKSFITLSLLATALGAPTATHQARQFDLSSLTSGLSALTSGSAASSGSTGSTGSETTTGSSGLSALASLFPSSSTSSTTGSTSGSGSSSSSSDGLSSLMSMFSSSGSGMPPITPLRLRSSTENGVTQHSGSCKKLTFIFARGTTEIGNMGTVVGPEVASELATLTGNQVTVQGVNYPADWEGNVSLGSSGGPTMASYVKEALQQCPNTKVVLGGYSQGSMVVHYAANQLSADQLSGAVLFGDPLKMEGVGKLSSSKVKEFCASGDPVCENGMNVMAHLTYGSDAKEAAQFLVQAAGVSSS

SEQ ID NO: 1101 - protein, 857 aa, Aspergillus niger
MRRTFAALVAGYLLDSVHAAASQAYTWKNVVTGGGGGFTPGIVFNPSAKGVAYARTDIGGAYRLNSDDTWTPLMDWANNSNWHDWGIDAIATDPVDTDRVYVAVGMYTNDWDPNDGSILRSTDQGDTWEETKLPFKVGGNMPGRGVGERLAVDPNDNSILYFGARSGNGLWKSTDYGETWSNVTAFKWTGTYFQDSSSTYTSDPVGIAWVTFDSTSGSSGSPTPRIFVGVVDTGESVFVSEDAGETWTWVSGEPMYGFLPHKGILSPSEHTLYISYSNGAGPYDGTNGTVHKYNITSGVWTDISPTSMTDTYYGYGGLAVDLQVPGTVMVAALNCWWPDELIWRSTDSGATWSPIWAWNGYPSINYYYSYDISNAPWLQDDTSTDEFPVRVGWMVEALAIDPFDSDHWLYGTGETIYGGHDLQNWDSEHNVTIESLAVGIEEMAVLGLITPPGGPALLSAVGDDGGFYHTSLTTAPSQYYHTPTYSSTNGIDYAGNKPANIVRSGSSDSDPTLALSSSFGESWYADYAASSSTATGQVALSADADTILLMNSDGAYRSANSATLSAVSSLPSGAVIASDKANNTYFYGASGSSFYLSSDTAATFTVTTTLGSSTTANAIRAHPSLAGDVWVSTDTGLFHSTNYGKSFTQIGSGCTEGWSFGFGKPSSDGDYPVLFGFFTVDGVTGLFKTEDQGVNWQIISDAEHGFGSASANVVNGDLQNYGRVFVGTNGRGIFYGDPSGTLPSATATASSASSTAVKSSTSTSTSKVGSSTTVSSSTATTITTSSIKSTTLTTTTKSSSSTTSTSSTATGTASAYGQCGGSGFTGPTQCPSGWTCTYENEYYSQCKSIPGIATDRG

SEQ ID NO: 1102 - protein, 477 aa, Neosartorya fumigata; identical to SEQ ID NO: 976

SEQ ID NO: 1103 - protein, 397 aa, Neosartorya fumigata
MVHLSSLAAALAALPLVYGAGLNTAAKAKGLKYFGSATDNPELTDSAYVAQLSNTDDFGQITPGNSMKWDATEPSQNSFSFANGDAVVNLANKNGQLMRCHTLVWHSQLPNWVSSGSWTNATLLAAMKNHITNVVTHYKGKCYAWDVVNEALNEDGTFRNSVFYQIIGPAYIPIAFATAAAADPDVKLYYNDYNIEYSGAKATAAQNIVKMIKAYGAKIDGVGLQAHFIVGSTPSQSDLTTVLKGYTALGVEVAYTELDIRMQLPSTAAKLAQQSTDFQGVAAACVSTTGCVGVTIWDWTDKYSWVPSVFQGYGAPLPWDENYVKKPAYDGLMAGLGASGSGTTTTTTTTSTTTGGTDPTGVAQKWGQCGGIGWTGPTTCVSGTTCQKLNDWYSQCL

SEQ ID NO: 1104 - protein, 397 aa, Neosartorya fumigata; identical to SEQ ID NO: 977

SEQ ID NO: 1105 - protein, 330 aa, Neosartorya fumigata
MKLTASILFSLASVTPLVSGHYVFSKLIVDGKPTQDFEYIRRNTNNYMPTLPSEILSNDFRCNKGSMQSAANTKVYKVAPGTELGFQLAYGAEMKHPGPLQIYMSKAPGDVRSYDGSGDWFKVHQEGLCADTSKGIKDEDWCTWGKDTASFKIPQDTPAGQYLVRVEHIGLHRGFLGEAEFYFTCAQIEVTGSGSGSPSPTVKIPGVYKPDDPNVHFNIWYPTPTAYSLPGPSVWTGGSAGGASPTAPAVNNNAVQAAPTTMTTVSSPANPTAGAEAEADCGSSESSSAVAPEGTLKKWEQCGGLNWTGSGSCEARTTCHQYNPYYYQCI

SEQ ID NO: 1106 - protein, 396 aa, Neosartorya fumigata
MKAIGATLLGLALIVQAQQPLYAQCGGNGWTGSTQCIAGACCSSINDWYYQCLSGNCMPSTTMTTTTATHTTSTSTSGATGSLPTSFRWGSTNALVGPKNDGRNLAGIKDPSIIEVDGTYHVFASTAQASGYNLVYFNFTDFNQAGNAPFFYLDQSGIGTGYRAAPQVFYFQPHQLWYLIFQNGNAAYSTNKDISNPAGWSAPKNFFSSVPSIITENIGKGYWVDMWVICDSSNCYLFSSDDNGHLYRSQTTLSNFPNGMGNTVIALSDSNPNNLFEASNVYRVGNEYLLLVEAIGSDGNRYFRSWTAPSLTGTWTGLANTEANPFARSNNVVFSGTAWTKSISHGEMVRSQVDQTMTISPCKLRYLYQGLSPTATGDYNSLPWRLALLTQTNSAC

SEQ ID NO: 1107 - protein, 143 aa, Neosartorya fumigata
MVLIIEIIKIGQIGPIGQRGQSGQRGQSGQRGQSGQIGQSGQSGQSGQIGQIGQIGQIGQIGQIGQIGQIGQIGQIGQIGQIGQIGQIGQIGQIGQARRTGRTGRTVHRRMLQASSSFNISPDISICRRATRNMGEEERPLGC

SEQ ID NO: 1108 - protein, 320 aa, Neosartorya fumigata
MRYSWLIGAVCAAGALAKPVDKRSYVTDWTIVTVTETITLPYQPPPTSTPAYSPIQAVQLTQTVTTVDPAPAPAPVEPETSSASPIPTTEAVNTAPVGVVEELPGAAAWASAWTSAWTSAWTSAWTSSAPEAAQPTTLATSTSTTAPASVPTAAGSNAYQSAVLYNHNIHRSNHSASSMTWNTTLESSAYELASRCVYQHDTDIGGGGYGQNIGYGVSADEIGVMITNLMYNDEFGYYDGLYGQANPDMTYFEKWGHFSQIVWKSSVSVGCATVVCNSLGNVDSSQPSPFTVCNYYPPGNFAGEYADNVLAPLGHAFYSA

SEQ ID NO: 1109 - protein, 292 aa, Neosartorya fumigata
MLFTAVTLALLGQALAGPVELEERQSSCPNIHVFGARETTAPTGYGSSSTAVNLILNAYPGSTSEAINYPACGGQSSCGGVSYANSVVAGINAVVSAVNSFNQRCPNTQLVLVGYSQGGQIMDNALCGGGDPNQGYTNTAVPLSSSAVNMIKAAIFMGDPRYVAGLPYNVGTCKAGGFDPRPPGFSCPSASKIQSYCDAADPYCCNGNDANTHQGYGTEYGQAALTFVKSKLSSSGSGGGSGGGSGGSGGSGGSGGTVAHYGQCGGQGWTGATSCQSPYTCTVISQWYSQCL

SEQ ID NO: 1110 - protein, 88 aa, Neosartorya fumigata
MHFIYQALSALAASLLFSSATAGIAHCKVGEAWPDSSDCHNFYECASEGAPVLKTCGPGTAYCPTTGVCVHEENVPSCFHRGHHSEDE

SEQ ID NO: 1111 - protein, 342 aa, Neosartorya fumigata
MRHVQSTQLLAALLLTTRVTAHGHVTNIVINGVSYRGWNIDSDPYNPDPPVVVAWQTPNTANGFISPDAYGTNDIICHLNATNARGHAVVAAGDKISIQWTAWPDSHHGPVIDYLARCGSSCETVDKTTLEFFKIDGVGLVDGSNPPGVWGDDQLIADNNSWLVEIPPTIAPGYYVLRHELIALHGAGSQNGAQNYPQCFNLQITGSGTAQPSGVKGTELYSPTDPGILVNIYNALSTYIVPGPTLIPGAVSVVQSSSTITASGTPVTGSGSAPTTSATTTLSTTTRATTTTTTTTAGSSTSVQSVYGQCGGSGWSGPTACVTGATCTSYNSYYSQCIPTAS

SEQ ID NO: 1112 - protein, 262 aa, Neosartorya fumigata
MIPTTYLLLAVSIFLWLQLLPSIHASNTAGTTVIVTVTPTIPHPASYTSLEIFKDTVLSTSNAYRREHNASHLTWNETLTKYAKRWAEGCKWKHSGGPYGENLAFGYQDPAAAVAAWGDEGQKYDYKLPTGFSEETGHFTQLVWRATREVGCAAFNCGYQNGNDAKNKEGRYTRAQGWYVVCEYSPAGNVVGNQNAFFRVNVQPTSTYSGPETAGSATGTSASASGSATATATSGVEELYDGRLRDQYQNAFVGLIVFINLV

SEQ ID NO: 1113 - protein, 454 aa, Neosartorya fumigata
MRGVWRYMPVYYYKCMLIPLLTFTKISIISKPQESRISLIICRTMPTVATFLGLAISGAAMASGAALGAYNVDPNSISVSGLSSGGFMSAQLGVAYSDTFKVGFGVFAGGPYDCARGQSYTTCMYNQNPSITTPVANMKSWSGNKINPVSNLQSRKIYMWTGTADTTVGPNVMSQLKTQLANFASAANVSYITTSGAAHTFPTDFDAAGDNSCSSSVSPYISNCQCDGAGAVLQWMYGPLNARNPGTLSGSIVSFSQTGEYGASGMDTTGYLYVPRACQPGSSTVCKLHVALHGCKQSYSMIGSKFVSNTGYNMWADTNDIIILYPQAVADNTMHTIWTGMPLPNPNGCWDWVGWYGANADQVGGVQMAAIVNQVARVVSGYGAGSSSSTTAATPTTTTGSITTTTTTTATVTTTAVAPLYGQCGGIGWTGPTACATGVCTAYSPYYAQCLLIV

SEQ ID NO: 1114 - protein, 385 aa, Neosartorya fumigata
MLHISIVAVTASLALVLSANAQAALYAQCGGEGYSGPTSCVAGAVCTVWNPWYSLRSMRPWNKHCTRHCAKYDNNDNNDNNDNNHNNHNNEHRYTHRAKVLHHFVSYPKLPIERSWAHPASGDSYSQTGFDISSTKPSASNPLGNPTLPGWTTSGGLNWVGFLVSKYNTSLTLSYNFAYGGATTNASLVAPYTSTVLSFIDQVTEFTNSIASKPSYAPWTSGNTLVGVWMGVNDVGNSYWLSNIDELLLKIMDSYFGQLQILYDAGVRNYVLLGVPPINRSPLMLAQGTDVTTAEAAVIAKYNNLIATYLAQFKSKNSGVTATVVDTQAPFNQALDNPTAYGAPDATCYNSDGTSCLWFNDYHPGIAIQDLTAQAVASALKELFF

SEQ ID NO: 1115 - protein, 460 aa, Neosartorya fumigata
MDSKRGVVAAVLALLPLVSAQQPAASSAGNPKLTTYKCTTAGGCVAQDTSVVLDWGYHWIHTVDGYTSCTTSSGVDSTLCPDAATCAKNCVIEPANYTSAGVTTSGDSLTMYQYVQSNGVYTNASPRLYLLGPDKNYVMLKLLGQELTFDVDLSTLPCGENGALYLSEMSATGGRNEYNTGGAEYGSGYCDAQCPVIAWKNGTLNTSGASYCCNEMDILEANSRANSYTPHPCSATDCDKGGCGFNPYALGQKSYWGPGGTVDTSKPFTITTQFITNDGTTTGTLSEIRRQYMQNGKVIANAVSSTGVNSITEDWCTSVDGSAATFGGLTTMGKALGRGMVLIFSIWNDASGFMNWLDSGNAGPCSSTEGNPDLIKAQNPTTHVVFSNIRWGDIGSTFKGSDGSVTTTTSTTSTKTTTSTAPGPTQTHYGQCGGQGWTGPTACASPYTCQVLNPWYSQCL

SEQ ID NO: 1116 - protein, 237 aa, Neosartorya fumigata
MLYFTLLHSMTDQRGSDTMTDRKELVAVEHRLLGISNGVYTAAGSQALFDTAGASWCGAGCGKCYNLTSTGSAPCTGCGTGGAAGESIIVMVTNLCPYNGNQQWCPQVGATNNYGYSYHFDIMAQSEVFGDNVVVNFEPVACPGQATSDWETCVCYGQTETDETPVGMTPGGSNPSPLTSTTTTKTTTTETTITTTTSGATQTLYGQCGGSGWTGPTACASGATCKVLNPYYSQCLS

SEQ ID NO: 1117 - protein, 375 aa, Neosartorya fumigata
MKISATAVVLLAGLAAGAPTKTIQSKFEKRQFGTGTDGLGALASLFPTLGGGGSSTSSGLGALASLIPGLGGSSSGSGFSLPGFTLPTSIPGLGSLGSLGSSGSSGASGLSGLSGLSGLSGLSGLGGLSGLNGLGSSTTGSSAEASTSGTAATSSNSNSGGALFGLLGGEFPLFPRQPSRLLRYSDHVAKRGLLGSMTENGVKNKDACQPLTFIFARGTSELGNMGSVVGPPVATKLRSLLNNKVVVQGVDYPASVEGNALLGAAGGPTMASMVKQALSQCPDTKVVVGGYSQGAMVVHNAANSLSQGQIAAAVLFGDPFKSQAVGKVDKANVKEYCAAGDPVCLNGANVIAHLSYGSDAAEAAQFLVTASGVKA

SEQ ID NO: 1118 - protein, 259 aa, Neosartorya fumigata
MNILQCLFTLLLLPCTLADVDFTVPTIGTNFKGGDVVTVHWCESGQPPRISELSQYDLSLYAGGDKADTQYEVAVLIKNGLFTRGNSVSIRIDPGVGGNEANAYFLKMVASGPEAFAINFSNRFTLSNMTGSFPPHLVDDIRSLSNSDGYAVKEELRKRGVGAAYAAYTVPYPLQSGPTKYAPMAKEPGSTIPVKTKAPAPQFTASVYTIATTRLPPATVQATLSASATYSIVSVENTASPAPHPHDAAMKRLMERWKD

SEQ ID NO: 1119 - protein, 500 aa, Neosartorya fumigata
MTLLFGIFLARLAVAAAQSSCVSAWGQCGGISYTGSTCCQSGNTCAEINSYYYQCIPATAVSTSTTTVTSPSSSGSSSANTSGYTTTTVLPSPTATQNPYPPANASSCGSWALVDNVCCPYYCLSDNESESCTSSCTGGCGSPDSSMCKSGTMWGEQHTVTSNEDWHYSRSTHFGLTSGGACGFGLYGLCTKNSVTASWTDPMLGSTCDAFCTAYPLLCKDPANVTLRGNFAAPNGDYYTQFWPSLAASGNPDNYLSCGECFEVIRTKPDGTDYAVGESGYTDPIVLEVVDSCPCNANSKWCCKRPPPPPFFSPPSNGQNLTRPGGSGADHCGEIDFKYGCPLPEGSHHMDLSDIAMGRLQGNGSLADGVIPIRYRRVPCPKPGNIYIWLHDGAGPYYFALSAVNTNGPGSVISIEVQAGGSGPWVALEHDPNYTSSRPQERYGSWVLPQGKGPITVPVSMRLTAPNGQQVVKEGAITSYTPPATAVEGFWYIDLGVQFT

SEQ ID NO: 1120 - protein, 466 aa, Neosartorya fumigata
MPQRIQLDILASICEHHTCTFSSLYPLGSGSGPAHRPFDCNILSYGAVADNTTDISTSLESAFNWCVRPNPSSRLVVPEGQYLISRGVVLSNATNWAFQLDGLITVAYGGNWTIDRALILEGLAGTDVLNTTINGEGDQKFLLDVLVIVNAVDFEFYSSNGLGAFQGQGYLYRNLNNTDRPRLVRLISPINASVHDLILVDSPKFHIVLDFAINVEAYHLTIRGANLGSYDGIDVIGTNYHIHDNEVTNRDECVSVKSPSHHALIENLVCNQAGSGISIGSLNVSAEISNILAQNISIIQGNNIAFIKTYPGGSGYVTNVTFSNFRSKASLYGLNINQYWQNTFEPDTGSVTLSNLVFRNFSGSVANGVQRPPLYLIVNDLTYATNVTVEDFTVWTESGSSIVNKISNVFGHGDDSYGPNNGLVSLGAAEQPHTYTSTNIITASPTGWVPPKSPTWAAPSTGYGSK

SEQ ID NO: 1121 - protein, 515 aa, Aspergillus niger
QQVGTYTTETHPSLTWQTCTSSGSCTTNDGAVVIDANWRWVHSTSSSTNCYTGNEWDTSICTDDVTCAANCALDGATYEATYGVTTSGDELRLNFVTQGSSKNIGSRLYLMSDDSTYEMFKLLGQEFTFDVDVSNLPCGLNGALYFVAMDADGGTSEYSGNKAGAKYGTGYCDSQCPRDLKFINGEANCDGWEPSSNNVNTGVGDHGSCCPEMDIWEANSISNAFTAHPCDSVSQTMCDGDSCGGTYSASGDRYSGTCDPDGCDYNPYRLGNTDFYGPGLTVDTNSPFTVVTQFITDDGTSSGTLTEIKRLYVQNGEVIANGASTYSSVNGSSITSDFCESEKTLFGDENVFDTHGGLAGMGEAMANGMVLVLSLWDDYAANMLWLDSDYPVNSSASTPGVARGTCSTDSGVPATVEADSPNAYVTYSNIKFGPIGSTYSSGSSSGSGSSSSSSSTTTKATSTTLKTTTTTSSGSSSTSAAQAYGQCGGQSWTGPTTCVSGYTCTYQNAYYSQCL

SEQ ID NO: 1122 - protein, 367 aa, Aspergillus niger
MHSYRLHGLAAVGSLVSAAFAPSRVSEFAMKASTCTFTSASEASESISSCSDVVLSSIEVPAGETLDLSDAADGSTITFEGTTSCGYKEWKGPLIRFGGKNLTVTMADGAVIDGDGSRWWDSKGTNGGKTKPKFMYIHDVEDSTFKGINIKNTPVQAISVQATKVHLNDFTIDNSDGDDNGGHRSDGVDISESTGVYISGATVKNQDDCIAINSGESISFTGGTCSGGHGLSIGSVGGRDDNTVKNVTISDSTVSNSANGVRIKTIYKETDDVSEITYSNIQLSGITDYGIVIEQDYENGSRTGTPSTGIPITDVTVDGVTGTLEDDATQVYILWVDGSCSDWTWSGVDLSGGKTSDKCENVPSGAS

SEQ ID NO: 1123 - protein, 857 aa, Aspergillus niger
MRRTFAALVAGYLLDSVHAAASQAYTWKNVVTGGGGGFTPGIVFNPSAKGVAYARTDIGGAYRLNSDDTWTPLMDWANNSNWHDWGIDAIATDPVDTDRVYVAVGMYTNDWDPNDGSILRSTDQGDTWEETKLPFKVGGNMPGRGVGERLAVDPNDNSILYFGARSGNGLWKSTDYGETWSNVTAFKWTGTYFQDSSSTYTSDPVGIAWVTFDSTSGSSGSPTPRIFVGVVDTGESVFVSEDAGETWTWVSGEPMYGFLPHKGILSPSEHTLYISYSNGAGPYDGTNGTVHKYNITSGVWTDISPTSMTDTYYGYGGLAVDLQVPGTVMVAALNCWWPDELIWRSTDSGGTWSPIWAWNGYPSINYYYSYDISNAPWLQDDTSTDEFPVRVGWMVEALAIDPFDSDHWLYGTGETIYGGHDLQNWDSEHNVTIESLAVGIEEMAVLGLITPPGGPALLSAVGDDGGFYHTSLTTAPSQYYHTPTYSSTNGIDYAGNKPANIVRSGSSDSDPTLALSSSFGESWYADYAASSSTATGQVALSADADTILLMNSDGAYRSANSATLSAVSSLPSGAVIASDKANNTYFYGASGSSFYLSSDTAATFTVTTTLGSSTTANAIRAQPSLAGDVWVSTDTGLFHSTNYGKSFTQIGSGCTEGWSFGFGKPSSDGDYPVLFGFFTVDGVTGLFKTEDQGVNWQIISDAEHGFGSASANVVNGDLQNYGRVFVGTNGRGIFYGDPSGTLPSATATASSASSTAVKSSTSTSTSKVGSSTTVSSSTATTITTSSIKSTTLTTTTKSSSSTTSTSSTATGTASAYGQCGGSGFTGPTQCPSGWTCTYENEYYSQCKSIPGIATDRG

SEQ ID NO: 1124 - protein, 455 aa, Aspergillus niger
MRSILFILFSVFAGLAAGQLIGPVGPTTQLEDKDIECNILDYGGVADNETDVATSIETTFTECVLNNPKSRLVIPEGDYLIKRSVVLSNGTNWAFQLDGLITAAYGGNWTVDPVDFEFYSSNGLGAFQGQGYIYRNLANTDRPRLVRLISPTNASVHDLILVDSPKFHIVFDFAVNLEAYHLTIRGANLGSYDGIDAIGTNYYIHDNEVTNRDECVSVKSPSHHALVENLVCNQAGSGVSIGSLNVSAEISNIEARNISIIQGNNIAFIKTYPGGSGYVKDVTFENFRSLNSLYGLDINQYWQNTWEPDTGSVTLSNLVFKNFSGSVADGALRPPLYLFASDLTFATNVTVEEFSVWTETGTTVVNKISNIFGTGDDSYGENDGIESLQSGESPYTYTSTYTITASPTNWQAPSTPTWALPSTGYGTASPIPVYTPAPLWRPGGIDYNLHYWGSF

SEQ ID NO: 1125 - protein, 455 aa, Aspergillus niger
MRSILFILFSLFAGLAAGQLIGPVGPTTQLEDKDIECNILDYGGVADNETDVATSIETTFTECVLNNPKSRLVIPEGDYLIKRSVVLSNGTNWAFQLDGLITAAYGGNWTVDPVDFEFYSSNGLGAFQGQGYIYRNLANTDRPRLVRLISPTNASVHDLILVDSPKFHIVFDFAVNLEAYHLTIRGANLGSYDGIDAIGTNYYIHDNEVTNRDECVSVKSPSHHALVENLVCNQAGSGVSIGSLNVSAEISNIEARNISIIQGNNIAFIKTYPGGSGYVKDVTFENFRSLNSLYGLDINQYWQNTWEPDTGSVTLSNLVFKNFSGSVADGALRPPLYLFASDLTFATNVTVEEFSVWTETGTTVVNKISNIFGTGDDSYEENDGIESLQSGESPYTYTSTYTITASPTNWQAPSTPTWALPSTGYGTASPIPVYTPAPLWRPGGIDYNLHYWGSF

SEQ ID NO: 1126 - protein, 536 aa, Aspergillus niger
MSSFQVYRAALLLSILATANAQQVGTYTTETHPSLTWQTCTSDGSCTTNDGAVVIDANWRWVHSTSSSTNCYTGNEWDTSICTDDVTCAANCALDGATYEATYGVTTSGDELRLNFVTQGSSKNIGSRLYLMSDDSTYEMFKLLGQEFTFDVDVSNLPCGLNGALYFVAMDADGGTSEYSGNKAGAKYGTGYCDSQCPRDLKFINGEANCDGWEPSSNNVNTGVGDHGSCCPEMDIWEANSISNAFTAHPCDSVSQTMCDGDSCGRTYSASGDRYSGTCDPDGCDYNPYRLGNTDFYGPGLTVDTNSPFTVVTQFITDDGTSSGTLTEIKRLYVQNGEVIANGASTYSSVNGSSITSDFCESEKTLFGDENVFDTHGGLAGMGEAMANGMVLVLSLWDDYAANMLWLDSDYPVNSSASTPGVARGTCSTDSGVPATVEADSPNAYVTYSNIKFGPIGSTYSSGSSSGSGSSSSSSSTTTKATSTTLKTTTTTSSGSSSTSAAQAYGQCGGQSWTGPTTCVSGYTCTYQNAYYSQCL

SEQ ID NO: 1127 - protein, 404 aa, Aspergillus terreus
MKLSLLAVLALPLALAAPNKRASSFVWFGSNESGAEFGQGNIPGVLGKDYIWPDASAIATLHSAGMNIFRVAFMMERLVPSTMTGTADATYMGDLKATVKAITDMGAYAVIDPHNFGRYYGNIISSTSDFAAFWTTVAKEFASNDKVIFDTNNEYHDMDQTLVLNLNQAAINAIRSAGATSQYIFVEGNSYSGAWTWATVNDNLKALTDPSDKIVYEMHQYLDSDGSGTSETCVSGTIGQERVAAATTWLKNNGKKGFLGEFAGGANSVCKAAVTGMLDALAQNADVWMGASWWAAGPWWGTYMFNMEPPSGTGYTNYLSVLKPYFVGGSGGTTTTTTTTKTSSTTATTTTTKGTTTTTTTTSSTATSGAQHWGQCGGNGWTGPTTCVSPYTCQKQNDWYSQCL

SEQ ID NO: 1128 - protein, 540 aa, Aspergillus terreus
MPSTYDIYKKLLLLASFLSASQAQQVGTSKAEVHPSLTWQTCTSGGSCTTVNGKVVIDANWRWVHNVDGYNNCYTGNTWDTTLCPDDKTCASNCALEGADYSGTYGVTTSGNSLRLNFVTQASQKNIGSRLYLMEDDSTYKMFKLLNQEFTFDVDVSNLPCGLNGAVYFVSMDADGGMAKYPANKAGAKYGTGYCDSQCPRDLKFINGMANVEGWEPSANDANAGTGNHGSCCAEMDIWEANSISTAYTPHPCDTPGQVMCTGDSCGGTYSSDRYGGTCDPDGCDFNSYRQGNKTFYGPGMTVDTKSKITVVTQFLTNDGTASGTLSEIKRFYVQNGKVIPNSQSTWSGVSGNSITTAYCNAQKTLFGDTDVFSKHGGMEGMGAALAEGMVLVMSLWDDHNSNMLWLDSNYPTDKPSTTPGVARGSCDISSGDPKDVETNDANAYVVYSNIKVGPIGSTFSGSTGGGSSSSTTATSKTTTTSATKTTTTTTKTTTTSASSTSTGGAQHWAQCGGIGYTGPTTCVAPYTCQKQNDYYSQCL

SEQ ID NO: 1129 - protein, 471 aa, Aspergillus terreus
MMSLFKSIIAAGLVFHPLVQAQQPSSSSPGDPSLTTWKCTTGGGCLQQDTSVVLDWGVHWIHTSNSQSCTTSSGVNSALCPDEATCAKNCVIDPANYATAGVATSGDTLTMHQYYQNNGVITNASPRLYLLGSDGNYVMLKLLGQELSFNVDLSTLPCGENGASYLSEMSATGGRNEYNTGGAQYGSGYCDAQSPVMAWRNGTLNTSGQGFGCNEMDILEANSRANSFTPHSCNGNDCDKGGCGFNPYALGQQNYWGPGGTVDTSKPFTITTQFITDDGSKTGTLKEIRRQYIQNGKIIANAKSSAGVDSITEPRCESVDGAAATYGGLKRMGEALGRGMVLIFRIWNDAGGFMNWLDSGSAGPCSSTEGNPSLIQSAHPDTHVVFSNIRWGDIGSTYTNPGGSGSSSSSTTTTTKTTSTTATTKITTTTSAGGATQTHWGQCGGQGSTGPTACASPYTCQKQNEWYSECL

SEQ ID NO: 1130 - protein, 397 aa, Neosartorya fumigata; identical to SEQ ID NO: 1103

SEQ ID NO: 1131 - protein, 477 aa, Neosartorya fumigata; identical to SEQ ID NO: 976

SEQ ID NO: 1132 - protein, 397 aa, Neosartorya fumigata; identical to SEQ ID NO: 977

SEQ ID NO: 1133 - protein, 259 aa, Neosartorya fumigata; identical to SEQ ID NO: 1118

SEQ ID NO: 1134 - protein, 342 aa, Neosartorya fumigata; identical to SEQ ID NO: 1111

SEQ ID NO: 1135 - protein, 262 aa, Neosartorya fumigata; identical to SEQ ID NO: 1112

SEQ ID NO: 1136 - protein, 478 aa, Neosartorya fumigata
MTLLLGIFLARLAVAAAQSSCVSAWGQCGGISYTGSTCCQSGNTCAEINSYYYQCIPATAVSTSTTTVTSPSSSGSSSANTSGYTTTTVLPSPTATQNPYPPANASSCGSWALVDNVCCPYYCLSDNESESCTSSCTGGCGSPDSSMCKSGTMWGEQHTVTSNEDWHYSRSTHFGLTSGGACGFGLYGLCTKNSVTASWTDPMLGSTCDAFCTAYPLLCKDPANVTLRGNFAAPNGDYYTQFWPSLAASGNPDNYLSCGECFEVIRTKPDGTDYAVGESGYTDPIVLEVVDSCPCNANSKWCCGSGADHCGEIDFKYGCPLPEGSHHMDLSDIAMGRLQGNGSLADGVIPIRYRRVPCPKPGNIYIWLHDGAGPYYFALSAVNTNGPGSVISIEVQAGGSGPWVALEHDPNYTSSRPQERYGSWVLPQGKGPITVPVSMRLTAPNGQQVVKEGAITSYTPPATAVEGFWYIDLGVQFT

SEQ ID NO: 1137 - protein, 366 aa, Neosartorya fumigata
MKISATAVVLLAGLAAGAPTKTIQSKFEKRQFGTGTDGLGALASLFPTLGGGGSSTSSGLGALASLIPGLGGSSSGSGFSLPGFTLPTSIPGLGSLGSLGSSGSSGASGLSGLSGLGGLSGLNGLGSSTTGSSAEASTSGTAATSSNSNSGGALFGLLGGEFPLFPRQPSRLLRYSDHVAKRGLLGSMTENGVKNKDACQPLTFIFARGTSELGNMGSVVGPPVATKLRSLLNNKVVVQGVDYPASVEGNALLGAAGGPTMASMVKQALSQCPDTKVVVGGYSQGAMVVHNAANSLSQGQIAAAVLFGDPFKSQAVGKVDKANVKEYCAAGDPVCLNGANVIAHLSYGSDAAEAAQFLVTASGVKA

SEQ ID NO: 1138 - protein, 292 aa, Neosartorya fumigata; identical to SEQ ID NO: 1109

SEQ ID NO: 1139 - protein, 320 aa, Neosartorya fumigata; identical to SEQ ID NO: 1108

SEQ ID NO: 1140 - protein, 466 aa, Neosartorya fumigata
MPQRIQLDILASICEHHACTFSSLYPLGSGSGPAHRPFDCNILSYGAVADNTTDISTSLESAFNWCVRPNPGSRLVVPEGQYLISRGVVLSNATNWAFQLDGLITVAYGGNWTIDRALILEGLAGTDVLNTTINGEGDQKFLLDVLVIVNAVDFEFYSSNGLGAFQGQGYLYRNLNNTDRPRLVRLISPINASVHDLILVDSPKFHIVLDFAINVEAYHLTIRGANLGSYDGIDVIGTNYHIHDNEVTNRDECVSVKSPSHHALIENLVCNQAGSGISIGSLNVSAEISNILAQNISIIQGNNIAFIKTYPGGSGYVTNVTFSNFRSKASLYGLNINQYWQNTFEPDTGSVTLSNLVFRNFSGSVANGVQRPPLYLIANDLTYATNVTVEDFTVWTESGSSIVNKISNVFGHGDDSYGPNNGLVSLGAAEQPHTYTSTNIITASPTGWVPPKSPTWAAPSTGYGSK

SEQ ID NO: 1141 - protein, 330 aa, Neosartorya fumigata; identical to SEQ ID NO: 1105

SEQ ID NO: 1142 - protein, 460 aa, Neosartorya fumigata
MDSKRGVVAAVLALLPLVSAQQPAASSAGNPKLTTYKCTTAGGCVAQDTSVVLDWGYHWIHTVDGYTSCTTSSGVDSTLCPDAATCAKNCVIEPANYTSAGVTTSGDSLTMYQYVQSNGVYTNASPRLYLLGPDKNYVMLKLLGQELTFDVDLSTLPCGENGALYLSEMSATGGRNEYNTGGAEYGSGYCDAQCPVIAWKNGTLNTSGASYCCNEMDILEANSRANSYTPHPCSATDCDKGGCGFNPYALGQKSYWGPGGTVDTSKPFTITTQFITDDGTTTGTLSEIRRQYMQNGKVIANAVSSTGVNSITEDWCTSVDGSAATFGGLTTMGKALGRGMVLIFSIWNDASGFMNWLDSGNAGPCSSTEGNPDLIKAQNPTTHVVFSNIRWGDIGSTFKGSDGSVTTTTSTTSTKTTTSTAPGPTQTHYGQCGGQGWTGPTACASPYTCQVLNPWYSQCL

SEQ ID NO: 1143 - protein, 632 aa, Neosartorya fumigata; identical to SEQ ID NO: 472

SEQ ID NO: 1144 - protein, 237 aa, Neosartorya fumigata
MLYFTLLHSMTDQRGSDTMTDRKELVAVEHRLLGISNGVYTAAGSQALFDTAGASWCGAGCGKCYNLTSTGSAPCTGCGTGGAAGESIIVMVTNLCPYNGNQQWCPQVGATNNYGYSYHFDIMAQSEVFGDNVVVNFEPVACPGQATSDWETCVCYGQTETDETPVGMTPGGSNPSPLTSTTTTKTTTTETTITTTTGGATQTLYGQCGGSGWTGPTACASGATCKVLNPYYSQCLS

SEQ ID NO: 1145 - protein, 88 aa, Neosartorya fumigata; identical to SEQ ID NO: 1110

SEQ ID NO: 1146 - protein, 454 aa, Neosartorya fumigata
MRGVWRYMPVYYYKCMLIPLLTFTKISIISKPQESRISLIICRTMPTVATFLGLAISGAAMASGAALGAYNVDPNSISVSGLSSGGFMSAQLGVAYSDTFKVGFGVFAGGPYDCARGQSYTTCMYNQNPSITTPVANMKSWSGNKINPVSNLQSRKIYMWTGTADTTVGPNVMSQLKTQLANFASAANVSYITTSGAAHTFPTDFDAAGDNSCSSSVSPYISNCQYDGAGAVLQWMYGPLNARNPGTLSGSIVSFSQTGEYGASGMDTTGYLYVPRACQPGSSTVCKLHVALHGCKQSYSMIGSKFVSNTGYNMWADTNDIIILYPQAVADNTMHTIWTGMPLPNPNGCWDWVGWYGANADQVGGVQMAAIVNQVARVVSGYGAGSSSSTTAATPTTTTGSITTTTTTTATVTTTAVAPLYGQCGGIGWTGPTACATGVCTAYSPYYAQCLLIV

SEQ ID NO: 1147 - protein, 396 aa, Neosartorya fumigata
MKAIGATLLGLALVVQAQQPFYAQCGGNGWTGSTQCVAGACCSSINDWYYQCLSGNCMPSTTMTTTTATHTTSTSTSGATGSLPTSFRWSSTNALVGPKNDGRNLAGIKDPSIIEVDGTYHVFASTAQASGYNLVYFNFTDFNQAGNAPFFYLDQSGIGTGYRAAPQVFYFQPHQLWYLIFQNGNAAYSTNKDISNPAGWSAPKNFFSSVPSIITENIGKGYWVDMWVICDSSNCYLFSSDDNGHLYRSQTTLSNFPNGMGNTVIALSDSNPNNLFEASNVYRVGNEYLLLVEAIGSDGNRYFRSWTAPSLTGTWTGLANTEANPFARSNNVVFSGTAWTKSISHGEMVRSQVDQTMTISPCKLRYLYQGLSPTATGDYNSLPWRLALLTQTNSAC

SEQ ID NO: 1148 - protein, 361 aa, Neosartorya fumigata
MRALSVFVALFSFLALSSASPGQDVAKRVTSGSLQQVTNFGSNPSGTLMYIYVPNNLATKPGIVVAIHYCTGTAQAYYTGSPYAQLAEKYGFIVIYPQSPYSGTCWDVSSQSALTHNGGGDSNSIANMVTWTISQYNADTSKVFVTGSSSGAMMTNVMAATYPELFAAATSTPASPPAVSTPPPTKSTAGTAAAPRATSSAPQRSGAVSPKQCTRGIPGHGPACRSTTAAWIPLSTRRITTKPASSGRVSSGTTITRRSRPRATPRRRTTRLPSGARICRASLQRASDIRFLFMGSRTWSGLGLPGVRRRRRLLLQRLRRRARRHRRGGRRPALVLQSTGVNVAVMGGRGRRRVRAGIPAP

SEQ ID NO: 1149 - protein, 125 aa, Neosartorya fumigata
MVLIIEIIKIGQIGPIGQRGQSGQRGQSGQRGQSGQIGQSGQSGQSGQSGQSGQIGQIGQIGQIGQIGQIGQIGQIGQARRTGRTGRTVHRRMLQASSSFNISPDISICRRATRNMGEEERPLGC

SEQ ID NO: 1150 - protein, 382 aa, Neosartorya fumigata
MLHISIVAVTASLALVLSANAQAALYAQCGGEGYSGPTSCVAGAVCTVWNPWYSLRSMRPWNKHCTRHCAKYDNNDNNHNNHNNHNNEHRYTHRAKVLHHFVSYPKLPTERSWAHPASGDSYSQTGFDISSTKPSASNPLGNPTLPGWTTSGGLNWVGFLVSKYNTSLTLSYNFAYGGATTNASLVAPYTSTVLSFIDQVTEFTNSIASKPSYAPWTSGNTLVGVWMGVNDVGNSYWLSNIDELLLKIMDSYFGQLQILYDAGVRNYVLLGVPPINRSPLMLAQGTDVTTAEAAVIAKYNNLIATYLAQFKSKNSGVTATVVDTQAPFNQALDNPTAYGAPDATCYNSDGTSCLWFNDYHPGIAIQDLTAQAVASALKELFF

SEQ ID NO: 1151 - protein, 328 aa, Aspergillus flavus
MRFQHLTTALAVGVSAHLAQAAGLHDAAVAKGLLYFGTATDNPELTNTSYVTQLNNTGDFGQITPGNSQKWDSTEPSQNEFSFTNGDVIADLADANDQKLRCHNLVWHQQLPNWVSSGSWTNETLTAVLQNHITNVVKHYKGRCYAWDVVNEALADDGSYRDSIWYKTIGEAYIPIAFAAAAAADKDVKLYYNDYSIEWGGSKSTAAQNIVKLIQSYGGKIDGVGLQAHFTVGQTPARKDLASNLKAFTDLGVEVAYTEVDVRMETPATDANLQQQSTEFANIPSSTATGRVKVYYQCGGINYQGSTECEEGLTCKKWNPYYSQCIQA

SEQ ID NO: 1152 - protein, 303 aa, Aspergillus flavus
MKAATLLSLLSVTGLVAAAPAGNGPAGGIIDRDLPVPVPGLPTKGLPIVDGLTGGNKGGEKPGSKVTPREDPTGSAPDGKGNDGPDGDLTGRPGQGGLDSPFDLPTSELPPVKLPGGLDGGKGGLGLRRRGSPVDGLPVVGPVVGGVLGGGGAGSGAGAKGGAGSGTVGRRGSPVDGLPVVGPVVGGVLGGGGAGSGAGAKGGAGSGTPKRRDGPVDGVPVVGELAEGATGGLLGGDAGSADAAGADAGAGAGAGKVGGGEGANAGGGVTDKTRFLRGKRKRTNLWDCLFKREVFNSASPAIP

SEQ ID NO: 1153 - protein, 451 aa, Aspergillus flavus
MNLWLLTLWVTLVTAWVDNQGTTCTLYPESLTHQGQEVDDSPSIQQAFDMCGTNGTVIFSENVFHVNTVLNTTNLLNCDVHLRGELRFSANVPYWRTHAISVVLQDQVTAWLFGGHNVSFYGEGGFYNGNGQAWYNANRNESNQAGRPMSFTVYNSTDLRVDGLRVIQPQFWATFVWASKNVSFTNLFVNATSDSEWGTMNTDGFDSWQSDNLLVENATIIMGDDCIAAKGNTTNLLAKNIYCEGGTGVTIGSIGQYPEMPDYNLNITFENVTIKDAMDGAYIKTWQGTRIFTPSNGDWGGGGTGLVKNVTFRDFVMDNVGLPIQVAQCVYSAGSNKSCNTSTLQIEDVKWENIRGTSRFNIASSIYCSDEVPCPNMSFENVNITSLNATRGQAYYDTDIQYELFQCTNVVGQNSSGIPCNQAAPSNFSQWIYGNVDSSGLATALSDHLGN

SEQ ID NO: 1154 - protein, 140 aa, Aspergillus flavus
MLATVFLIVASALTANAKLGINCRGSAKCSVLWGPSDAAQQLTNVIQHIDTNRWYMNGEHIACVGNQAGNGGGYCAFLQKTGGTNGGVIKNLAHYITDHGCKQCGSVPYYFPQGNNNVDDGELTYNYVDDPCATAGTQLC

SEQ ID NO: 1155 - protein, 201 aa, Aspergillus flavus
MDARNIRLTNFVYQGGDDCIAIKPRSYDINIHNVTCRGGNGIAIGSLGQYKEDSSIIRYNDDMHGSAYIKTWTGVPTPQDSYDSAGLPRGGGRGNVSNLIFSNFEAQGANIGPTINQNQGDNGSYSGTSLMTVSDITFANCTGYVTNEGEVTSTVTCSENHPCYDIYYDNVVLYQGKNASEPGIGSCKWTTDNGVHGLEGC

SEQ ID NO: 1156 - protein, 279 aa, Aspergillus flavus
MFIIPSFKHTNPIRCSTPCLQLMLILILANLANTQQTIQTTILVTATPTSPHPPSYTSPEVFRDTILSSSNTYRKEHNASDLVWNETLTRYAKDWAEGCKWKHSVRPTFLLYLSHGPYGENLAFGYQNASAAVFAWGDERRMYDFKKPTGFTEETGHFTQLVWRATTDVGCAAIDCGYGNGTDENEKRGDTGSYTRAQGWYVVCEYSPPGNVMGTSRTAGGENGLFRVNVQSASTYSGPYPTDSGSPPASTGASGADRTFMACGWIWVWVGVLILMVMG

SEQ ID NO: 1157 - protein, 633 aa, Aspergillus flavus; identical to SEQ ID NO: 473

SEQ ID NO: 1158 - protein, 143 aa, Aspergillus flavus
MQFTSFKALAIFAASFFAFSAAAHPRCETGAVWADPHDCHSFFECAAGGIPVRKTCGPGTAYNSRFGICDYEEKVRSCHGHGPVGHDESSEGHGHQWKDHGNGQSEGHGQEGKKDSKGQSSEGHGQGTQEHGSGEQEHSEGSH

SEQ ID NO: 1159 - protein, 490 aa, Aspergillus flavus
MRIGNLIVAASAASLVHAYPTRDIKKRGSGFTWVGVSESGAEFGSSIPGTLGTDYTWPDTSKIQVLRDDGMNVFRIPFLMERLAPNQMTGSLDATYLKDLKSTVQAVTDSGAYAVLDPHNYGRYSGSIISSTSDFKTFWKTVAGEFASNEKVIFDTNNEYHDMEQSLVLSLNQAAIDGIRAAGATTQYIFVEGNSYSGAWKWADTNDNLSQLTDPQDKIVYEMHQYLDSDGSGTSETCASSTIGKERLQTATEWLKTNNKKGFLGEFAGGVNEQCEQAVEGLLSYMSDNSDVWMGAEWWSAGPWWGSYMYSMEPTDGTAYSTYLPILKKYFVDGTGASTSSSATSAAPSTAAASTSTSVSASTSSASSTTISAVESSSTSSVAEAPSTTSGVVTATPTPSHPAPQPTSNSSSASSGAPTSSAPTTLATSPACGYQTTVTVTASRSTAAPSSSAGAVAHYYQCGGINYSGPTTCESGYTCVKQNPYYSQCL

SEQ ID NO: 1160 - protein, 328 aa, Aspergillus flavus
MKLNLASLSFLASIAPLVSGHYVFSKLIVDGQTTKDFEYIRENSNGYQPTLASEIVNNDFRCNKGSMDSAAKTKVYTVAPGAEIGFQLAYGASMKHPGPLQIYMSKAPGDVKTYDGSGDWFKVYQEGVCEDISDGLKDTDWCTWGKDTASFKIPKDTPPGQYLVRVEHIGLHRGFSGNSEFYFTCAQIEVTGSGSGVPGPLVKIPGMYKPEDPNIHFDIYYPVPTSYDLPGPSVWSGGASSGSSSSISAPPVNNAAAASSVTPTTLVTLSKTSSTPAATSTAAPTLPAPSNGTIKKYYQCGGQGWTGSGSCEAGTTCRDWNPWYSQCV

SEQ ID NO: 1161 - protein, 414 aa, Aspergillus flavus
MFLSRVFCVLAALACVSAARETCVVPAGGSNATDDAPAIVHAFKKCGRGGKVVFKPTTYHIGSVMNITWLEDVDIDLGGTLLWGTNIQYWLNHSLPVGYQNQSTAFILGGNNVRIDGHGIGTLDGNGDTWYQWIKEQPNTSNYPGRPHAITFNGLTNSVVRGLRFLRSQMCHHVEFDSILVNNTGNVVSSSNTDGADTIRSSHITFNNWTVYNGDDSISLKGNSTDITITNSNLYNGLGIALGSIGQYKDQFETIERLKVSNVNFHNTLHAIYVKTWTADQNGYPPNGGGGGLGYISDVTAKDLKATSLRGAAFAISQCTRFSGAPGEGNCTNSEFQVRDISVLNLSGTTESNRVASLQCSAVAPCTDIALSGINLELKNGTAASEYLCGNVENQKGFECTGAVCEGGSATGEC

SEQ ID NO: 1162 - protein, 670 aa, Aspergillus flavus
MINIRSASVAILLAPLCHAILASGQQNVLSPPRRKYTLDDIKPLTHAGSGEVKCCPEGTLFDGQSCVLGVPKCPVNTVFQDGKCVSVSKPTCPPGEEFNGRVCVTEASPYCPPPTVFQDKACVSKEPPTCPTGFELHGQVCVSKLHPTCPNDDRFNGQDCVSSQGPTCPQDTTELSNGVCVSKKQPSCPTGSQFDSTVKRCVSEQKPVCPEGTVRKGQNCVSVQGPACPEDTTFNPKTQTCTLTQDPTCPPEQEFENGQCYSTIQAECDSGTQLSVDRLSNTARCCPVGLTWNGEVCLIPVDVDGNCPPGLIKIGNRCEKQTVTIPICPPTFKPQGSRCVSVEPPECPPDYTRDGSVCSSLESPQCPEGYQLKGSDCVSTETLACPEDTKLEGEHCVSIDAPTCEGDARFDGTNCIVTTPECETGKYFNGKDCVTINQPSCTSGTIFDGHRCVSSNRPECPVGSLPSHGTCITNSRPSCKSGSVLVGDDCVTGPPQCDKGLIFDGTQCVTIDHPTCPPSYKWVNEECVNTEVKGCEPGYTLRNGKCVSDVRPECEPGTSFNGTACVGDAPECPPDTVFDGTECASEEIPGCPTGLKFNGKKCVAETDPSCPTNTKWDAASKECIGDKPPQCPPGQEFTGEHCALVDGECMEFEYCPARSLGVVLFDGAKM

SEQ ID NO: 1163 - protein, 374 aa, Aspergillus flavus
MLNIMTLRVLSATLFILQCASALPALNSSIETYHFPEGLDRAHSYGIQVKQSTGGVHTVESYSAIVSEANTTSGKGIEHNTSFALFDFEGSADLIVTYNNGPVKSAVIRPYSYGIKPTVKGNTVSFSLDRPRNVVLQVNNDIFDTLQLFTNAIETDIPSQRDPNVVYFGPGIDNGPSSKNGTLVIPSGKVVYLAPGAVVTSRLAFQNATSGSIQGRGVINPRSSGGILIEWSSNILVKDILILGAKGFSVTTGTSKNITMSGIRSMSSTGNGDGIDFFCSEDVLIDGVFLRNSDDNIALYQHRWNYYGNSKNITVQNSSLWADWAHPINIGTHGNTDKLRQWTVLPSAILTSWITASRKCGIRGALRSIPEIVT

SEQ ID NO: 1164 - protein, 253 aa, Aspergillus flavus
MRLICSLPVVLPLFSTALADVEFIAPARGTIMKAGDVVTAHWKDSGESPRISELVQYDLYLCAGGDTLGSQENLAILIKDGVFARGNSVSFKIDPAVGGNEPNAYFLKMVASGPDAHVINFSDRFTLTDMAGAFSSNLEDGIGLLSEGHGQQELRRRQAAGAYTIPYQLQTGPTRYAPMAKKPGSTIPADKSPTPQFPTSAYEIATAYLSAPTIQTTVSASLTYSVSSIENTASPAPHPHDKKMKRFLERWKD

SEQ ID NO: 1165 - protein, 331 aa, Aspergillus flavus
MKAIAALALVGGAIAAPTKTVESRQLPGMGSLPGLGSSGSSTGSGLGSLASMLPGLGGSSSGGSLPGLGSSTGSGLGSLASLIPGLGGSSSGSSLPGLGGSSLIPGLGGSSSSGSGIPGLGSSTGNIPDLSSLLGGSSSGGLPGLTKRASITENGVTQNAGCQELTFIFARGTSEMGNMGSVVGPPVAKQLASLTGNKVTVQGVDYPADAARGNQGNANMGASGGPKMAELIQQAKKQCPNTKVVVGGYSQGAMVVHNAASKVGADAISGAVLFGDPFKTQGVGQLASNKVKEFCASGDPVCLNGMNFMAHLSYGSNAQEAAQFLVQAAGL

SEQ ID NO: 1166 - protein, 242 aa, Aspergillus flavus
MLPKAVLLSLLASMALGASEFPIPESAGTETFSEPQEIAAGETFDGGLKTYGRGVECTGQDEGGDSDAVFILQEGATLKNAIIGADQIEGVHCEGACTIENVWWEKVCEDALSLKKGSGPYKVIGGGAQGAEDKVIQHNAEGEVSIDGFVVSDFGKLFRSCGNCDSQSQRSVTITNVKAYNGKKLAGVNENYGDVATITDTCATSVEDICTTYEATEGSGEPSEIGSGPSDSCVYTDPLPAC

SEQ ID NO: 1167 - protein, 254 aa, Aspergillus flavus
MHLAIKSLFISLLGASVLASPLPSNALVERNAPLNEFLSALLSHLPAIDGTIDAVSGVITDFDQLLADLTGARTTQNGYIGVCTDYTVLFARGTSEPGNVGVLVGPPLSEAFEQAVGAKALSFQGVNGYNADVAGYLAGGDAAGSKSMASLASEVLSKCPDTKLVMSGYSQGCQIVHNAVEQLPAADASKISSVLLFGDPYAGKAFPNVDASRVHTVCHAGDTICNNSVVILPPHLTYAVDVTNAVQFAVAAAN

SEQ ID NO: 1168 - protein, 315 aa, Aspergillus flavus
MRSSLLMGALCAAGAMANPLDKRAYTTDWTVVTVTTTITAPVPPAATTSSSTYVPVQEPVASVEPAPAPVEQSSSAVFVEVPATSSAPAPAEPTAEVQPTTAAAAADQGSAWTSAWTSAWTSSWTSSAAQPTTLASTTSSASGATATNAYQSTVLYNHNVHRSNHSASSLEWDASLEASAQTLAARCVYQHDTFSSTINGGGYGQNIGYGVSSEKIGEMITNLMYNNEMGYFEALYGEANPSMDNFDAWGHFSQIVWKGTTHVGCATVTCNSLGNVDSSVAVPFTVCNYSPAGNYAGEYADNVLRPLGQAMYVVS

SEQ ID NO: 1169 - protein, 405 aa, Aspergillus flavus
MQLGHAKLFLFFLSLFTPALSRRIGHKHTHVAERQAPACTPTAGGSPTVDDVPAIESAMAACPSGTIMIPAKSTYHINSELSFAKCSGCTLQVEGTLLVSDDTKAWSGKDAVLNLEDVNDVSIVSKTGKGVIDGNGQAAWDLLNKDKNYSRVKCLLYLTGKTSGVTISGLTMRNPPNVFSSVKQSVTNVTYSNLILTAVSKSDALPKNTDGFDLGGTGIRMDNIKVQNGDDCIAIQNGAEDITVMNIQCTGSHGLSIGSIGKTPGEVDTVKNIHFKNAKMTKCSKAAGIKIYSGGYGTAEVSNVTWENVMVDGTSYAFQVQTCYGSDEKECASQPSTAKLTDIVVKGFSGKTDKDEPVASINCPAKGTCGLSLTEMKVQSATGGEEYQCSNAGAIGVKCAPGASG

SEQ ID NO: 1170 - protein, 146 aa, Aspergillus flavus
MYTPSIIQGLLLAITLVSSSSAKLGINCRGSANCNTFGNTQMAFQLKRAIDGIDPNRWYNNGEHIACVGSGARITGNGGFCAFLQNTGGTNGAVIKSLAHYIPEHGCKVCGSVPYFYPQGNNNVDDGELTFNYVDNACTKDEAKLC

SEQ ID NO: 1171 - protein, 491 aa, Neosartorya fischeri
MRISNLIMAASAAGLVSALPVREMAKKRSSGFTWVGINESGAEFGSSIPGNLGTDYTWPDTSKIQTLRDAGMNIFRVPFLMERLVPSSMTGKPDATYLSDLKKTVEFITDSGAYAVLDPHNYGRYSGSIISSTSDFQAFWKTVASEFASNDKVIFDTNNEYHDMDQTLVLNLNQAAINGIRAAGATTQYIFVEGNHYSGAWTWTDNNDNLKGLKDPEDKIVFEMHQYLDSDGSGTSESCVSSTIGQERVKSATQWLKDNSLKGFLGEFAGGVNSQCETAVEGLLSYMSENSDVWLGAEWWSAGPWWGTYMYSLEPTSGPAYSTYLPILKKYFVSGTGSSSSSSSSTTGSTTSVNKPTTSAPTQAQVVDTSSPSSTPTPSSVPAAEAPAPTPIEAAKPSSAASTTPTTTAASTSDSHSDSDSACDASEPADEAALPSATPTTPATAAASSSASASGVAKHWYQCGGINWTGPTNCESGYTCVKQNPYYHQCV

SEQ ID NO: 1172 - protein, 393 aa, Neosartorya fischeri
MVHLSSFAAALAALPLVYGAGLNTAAKAKGLKYFGSATDNPELTDSAYVAQLSNTDDFGQITPGNSMKWDATEPSQNSFSFANGDAVVNLANKNGQLMRCHTLVWHSQLPNWVSSGSWTNATLLAAMKNHITNVVTHYKGKCYAWDVVNEALNEDGTFRNSVFYQIIGPAYIPIAFATAAAADPDVKLYYNDYNIEYSGAKATAAQNIVKMIKAYGAKIDGVGLQAHFIVGSTPSQSDLTTVLKGYTALGVEVAYTELDIRMQMPSTAAKLAQQSTDFQGVAAACVSTTGCVGVTIWDWTDKYSWVPSVFQGYGAPLPWDENYVKKPAYNGLMAGLGATGSGTTTTTTTTGGAEPTGVAQKWGQCGGIGWNGPTTCVSGSICQKVNDWYSQCL

SEQ ID NO: 1173 - protein, 412 aa, Neosartorya fischeri
MKASTIICALLPLALAVPNARRASGFVCMFPFLLFIAEADGEIGFGSNESGAEFGETKLPGVLGTDYIWPDASTIKTLHDAGMNIFRVAFRMERLIPDKMTGTPDATYMNDLKATVNAITSLGAYAVIDPHNYGRYYGNIISSTDDFAAFWKTVAAQFASNDHVIFDTNNEYHDMDQTLVLNLNQAAINAIRAAGATSQYIFVEGNSWSGAWTWTNVNDNLKALTDPQDKIVYEMHQYLDSDGSGTSATCVSSTIGQERVQSATQWLKTNGKKGIIGEFAGGPNSVCQSAVTGMLDYLSANSDVWMGAAWWAAGPWWADYMFSMEPPSGTGYQNYLSLLKPYFVGGSGGNPPTTTTTTTSKPTTTTTTAGNPGGTGVAQHWGQCGGIGWKGPTACATPYTCQKLNDYYSQCL

SEQ ID NO: 1174 - protein, 405 aa, Neosartorya fischeri
MRFTQLFIAVSTASLALAAPPKSKTKRTSAFQWFGCNESGAEFGSGNIPGVLGTDYIWPNTTAIGILREAGMNIFRVPFLMERLVPNNMTGSPDATYMADLVSTINYITSTGAHAIVDPHNFGRYYGNIITSTSDFAAFWTTVATQFKDNDLVIFDTNNEFNAEDQTTVLDLNQAAINAIRAAGATSQYIFVEGNSWSGAWTWDSVNDNLKTLTDPVADSNKLIYEMHQYLDSDGSGTSESCVSATIGQERLASATAWLIANAKKAFLGEFAAGANSVCASAVTGMLEYMEANANVWLGAEWWAAGPWWGDYIYSMEPTAGMAYEYYLEVLEPYFPGGSYTATSTGTGTATATATSTSSTTAVTGTSTAVAQHWGQCGGQGWTGPTGCESPYTCQVQNAYYSQCL

SEQ ID NO: 1175 - protein, 110 aa, Neosartorya fischeri
MQFTLKALSVFAASLFFSAVSAVPQCKPGDAWPDVHDCHNFFECAAGGIPVLKTCGPGTAYCPTTGVCDYEFKIPSCHPRGAIPKGPEHGKAPQGWGFPGGHGRPGGMGH

SEQ ID NO: 1176 - protein, 264 aa, Neosartorya fischeri
MIPTTYRLLAVPIFLWLQLLPSIHASNAAGNTVIVTVTPTIPHPASYTSPEIFKDAVLSTSNAYRREHNASQLTWNETLTKYAKHWAEGCKWKHSGGPYGENLAFGYQDPAAAVAAWGDEGQKYDYKLPTGFSEETGHFTQLVWRATREVGCAAFNCGDQDGNDAKDKEGRYTRAQGWYVVCEYSPAGNVVGNQNAFFRVNVQPASTYSGPETTGSATGTSTSASASGSATATATGGVEELYDGRLRDQYQNAFIGLIVFMNLV

SEQ ID NO: 1177 - protein, 395 aa, Neosartorya fischeri
MKAIGATLLGLALAVQAQQPLYAQCGGNGWTGSTQCVAGACCSSINAWYYQCLSGNCMPSTTMTTTATRTTSTSTSGPTGSLPPSFKWSSTNALVGPKNDGRNLAGIKDPSIIEVDGTYHVFASTAQASGYNLVYFNFTDFNQAGNAPFFYLDQSGIGTGYRAAPQVFYFQPQQLWYLIFQNGNAAYSTNKDISNPAGWSAPKNFFSSVPSIITQNIGNGYWVDMWVICDSSNCYLFSSDDNGHLYRSQTTLSNFPNGMGNTVIALSDSNPNNLFEASNVYRVGNEYLLIVEAIGSDGNRYFRSWTAPSLTGTWTGLANTEANPFARWNNVVFSGTAWTKSISHGEMVRSQVDQTMTISPCKLRYLYQGLSPTATGDYNSLPWKLALLTQTNSAC

SEQ ID NO: 1178 - protein, 292 aa, Neosartorya fischeri
MLFTAVTLALLGQALAGPVDLEERQNSCPNIHVFGARETTAPPGYGSSSTVVNLILNAYPGSTSEAINYPACGGQSSCGGVSYGNSVVAGINAVASAVNSFNQRCPSTQLVLVGYSQGGQIMDNALCGGGDPNQGYPNTAVPLSSSAVNMIKAAIFMGDPRYIAGLPYNVGTCRAGGFDPRPAGFSCPSASKIQSYCDAADPYCCNGNDANTHQGYGTEYGQAALTFVKSKLSSSGSGGGSGGGSGGSGGSGGSGGTVAHYGQCGGQGWTGATSCQSPYTCKVVSQWYSQCL

SEQ ID NO: 1179 - protein, 342 aa, Neosartorya fischeri
MKVSATTVVLLAGLAAGAPTKTIHSELEKRQFGTGTDGLGALASIFPILGGGGSSTSSGLGALASLIPGLGGSSSSGSGFSLPGFTLPTSIPGLGSLGSLGSSGSSSGASGLSGLSGLGGLSGLNGLSASTTDSSAEASTSGTAATSSDSNSGVALSGLLGGSITENGVKNKDACQPLTFIFARGTSELGNMGSIAGPPVATKLRSLLNNKVVVQGVDYPASIEGNAMLGAAGGPTMASLVKQALSQCPDTKVVVGGYSQGAMVVHNAANSLSEGQIAAAVLFGDPFKSQAVGKVDKADVKEYCAAGDPVCLNGVNVLAHLSYGDDAAEAAQFLVTASGVKA

SEQ ID NO: 1180 - protein, 259 aa, Neosartorya fischeri
MNILQSLSILLLLPCTLADVDFTVPTIGTIFKGGDVVTAHWCESGQRPRISELSQYDLYLYAGGDTADTQHEVAVLIKDGLFTRGNSVSVKIDPGVGGNEANAYFLKMVASGPEAFAINFSNRFTLSNMTGSFPPHLVDEIRSLSDSDGSAVKEDLRKRVVGAAYAAYTVPYPLQSGPTKYAPMAKEPGSTIPVKTKAPAPQFTASVYTIATTWLPPATVQATLSASATYSIVSVENTASPAPHPHDAAMKRLMERWKD

SEQ ID NO: 1181 - protein, 407 aa, Neosartorya fischeri
MPTVATLLGMAMSGAAIASAAALGAYNVDPNSISVSGLSSGGFMSAQLGVAYSDTFKVGFGVFAGGPYDCARGQSYTTCMYNQNPSITTPIANMKTWSGNKINPVSNLQSRKIYMWTGTADTTVGPNVMSQLKTQLANFDTAANVSYITTSGAVHTFPTDFDASGDNSCSSSVSPYISNCQYDGAGAVLKWMYGSLNARNTGTLSGSIVSFSQTGEYGASGMDTTGYLYVPKACQPGSSTVCKLHVALHGCLQSYSMIGSKFVSNTGYNMWADTNNIIILYPQAVADNTMHTIWTGMPLPNPNGCWDWVGWYGANADQVGGVQMAAIVNQVARVVSGYGAGSSSSTTTATPTTTTGSQTTTTTTVTTTAVAPLYGQCGGIGWTGPTACATGVCTAYSPYYAQCLLVV

SEQ ID NO: 1182 - protein, 216 aa, Neosartorya fischeri
MTDRKELVAVEHHLVPTLGSNGVYTAAGSQALFDTAGASWCGAGCGKCYNLTSTGNPPCTGCGTGGAAGESIIVMVTNLCPYNGNQQWCPQVGATNNYGYSYHFDIMAQSEVFGDNVVVNFEPIACPGQATSDWETCVCYGKTATDETPVGMTPGGSNPSPPTSTTTTETTTTITTSGATQTLYGQCGGSGWTGPTACASGATCKVLNSYYSQCLS

SEQ ID NO: 1183 - protein, 535 aa, Neosartorya fischeri
MASAISFQVYRSALILSAFLPSITQAQQIGTYTTETHPSMTWETCTSGGSCATNQGSVVMDANWRWVHQVGSTTNCYTGNTWDTSICDTDETCATECAVDGADYESTYGVTTSGSQIRLNFVTQNSNGANVGSRLYMMADNTHYQMFKLLNQEFTFDVDVSNLPCGLNGALYFVTMDEDGGVSKYPNNKAGAQYGVGYCDSQCPRDLKFIQGQANVEGWTPSSNNENTGLGNYGSCCAELDIWESNSISQALTPHPCDTATNTMCTGDACGGTYSSDRYAGTCDPDGCDFNPYRMGNTTFYGPGKTIDTNSPFTVVTQFITDDGTDTGTLSEIRRYYVQNGVTYAQPDSDISGITGNAINADYCTAENTVFDGPGTFAKHGGFSAMSEAMSTGMVLVMSLWDDYYADMLWLDSTYPTNASSSTPGAVRGSCSTDSGVPATIESESPDSYVTYSNIKVGPIGSTFSSGSGSGSSGSGSSGSASTSTTSTKTTAATSTSTAVAQHYSQCGGQDWTGPTTCVSPYTCQVQNAYYSQCL

SEQ ID NO: 1184 - protein, 561 aa, Neosartorya fischeri
MAAALGANFNQPVLWEDLADLDIFRVNDTFYYSASTMHYSPGAPILQSYDLVNWEFVGHSVPTLDWGSIYNLDGGQAYVKGIWASTLRYRKSNGLWYWIGCIQFSTTYIYTAPSVTGPWTKSGVINTCYYDCSLLIDDDDTMYVAYGGTTISVAQLSSNGLSQTKSQQVFKSTIGAIEGSRFYKVNGEYYIFNTLPANAEYVLKASSPWGPYTQKLLLKDIATPITGGGVPHQGGIVDTPAGNWYYMAFVDSYPGGRVPVLAPITWGSDGFPVITTVNGGWGAQYPYPLTPRPLSPPTGKDTFQGTTLGPQWEWNHNPDTSHYSVNNGLTLKTATVTTNLYAARNTLTHRILGPDSAATIELTISNIKPGDRSGLAMLRDSSAYVAVINNSGIFRVSMVAGLTMDANWNTLSTGSEVAGVNLSGSPSKIWLRAYANIQPGSGRTASFYYSTDGSSFHSIGTPYTLNNTWQFFMGYRYGIFNYATVSLGGSVLVSSFEMESGAPSSGTSTTTASQPSATTVPTAGATQSKWGQCGGSGWTGPTACASGSTCSSANPWYSQCL

SEQ ID NO: 1185 - protein, 332 aa, Neosartorya fischeri
MLHTSIVSVTASLALVLNANAQAALYAQCGGEGYSGPTSPMPPWNKHCTKYYNNHNDHNNDHRYTHRAKVLHHFTGFNINSTKPSASNPLGNPTLPGWTTSGGLNWVGFLVSKYNTSLTLSYNFAYGGATTNASLVAPYTSTVLSFIDQVTEFTNSIASKPSYAPWTSENSLVGVWMGVNDVGNSYWLSNIDELLIKIMDSYFGQLQILYDAGVRNYVLLGVPPINRSPLMLSQGTDATTAEAAVIAKYNNLIATYLAKFKSKNSGVTATIVDTQAPFNKALDNPTAYGAPNATCFNSDGTSCLWFNDYHPGIAIQNLTAQAVASALKGSFF

SEQ ID NO: 1186 - protein, 348 aa, Neosartorya fischeri
MRHVQSTQLLAALLFTTHVTAHGHVTNIVVNGVSYRGWNIDSDPYNPNPPVVVAWQTPNTANGFISPDAYGTNDIICHLNATNARGHAVVAAGDKISIQWTTWPDSHHGPVIDYLARCGSSCETVDKTTLEFFKIDGVGLVDGSTPPGVWGDDQLIADNNSWLVEIPPTIAPGYYVLRHELIALHGAGSQNGAQNYPQCFNLQITGSGTAQPSGVKGTKLYSPTDPGILVNIYNSLSTYIVPGPTLIPGAVSVVQSSSTITASGTPVTGSGSAPTTSAPTTTKATTTLSTTTTATTTKATTTAGGSTSVQSAYGQCGGSGWSGPTACATGATCSSYNSYYSQCIPTAS

SEQ ID NO: 1187 - protein, 479 aa, Neosartorya fischeri
MMLLLGIFLAWLAVAAAQSSCVSAWGQCGGISYTGSTCCQSGNTCAEINSYYYQCTPATAVSTSTITGTSPSSPGSSSANTSGYTTTTVFPSPTATQNPYPPANASSCGSWALVDNVCCPYYCLSNNESESCTSSCTGGCGSPDSSMCKSGTMWGEQGTVTSNEDWHYSRSTHFGLTSGGACGFGLYGLCTKNSVTASWTDPMLGSTCDAFCTAYPLLCKDPANVTLRGNFAAPNGDYYTQFWPSLAASGNPDNYLSCGECFELIRTKPDGTDYAVGESGYTDPIVLEVVDSCPCDANSKWCCGSGADHCGEIDFKYGCPLPEGSHHMDLSDIAMGRLQGNGSLTDGVIPIRYRRVPCPKPGNIYIWLHDGAGQYYFALSAVNTNGPGSVISIEVQAGGSGPWIALEHDPNYTSSRPQERYGSWVLPQGKGPITAPVAMRLTAPDGQQVVKEGAITSFTPPATAVKGFWYIDLGVQFTR

SEQ ID NO: 1188 - protein, 321 aa, Neosartorya fischeri
MRYSWLIGTVCAAGALAKPVDKRSYVTDWTIVTVTETITLPYQPPPTSAPAYSPIQAVQLTQTVASVDPAPAPAPVEPEASSASPIPTPEAVNAAPVGVVEELPGASAWASAWTSAWTSAWTSAWTSSAPEAAQPTTLATSTSTTASAPSAPAAGGSNAYQSAVLYNHNIHRSNHSASSMTWNTTLESSAHELASRCVYQHDTDIGGGGYGQNIGYGVSADEIGVMITNLMYNDEFGYYDGLYGQANPDMTYFEKWGHFSQIVWKGSVSVGCATVVCNSLGNVDSSQPSPFTVCNYYPPGNFAGEYSDNVLAPLGHAYYSA

SEQ ID NO: 1189 - protein, 846 aa, Neosartorya fischeri
MMHTLNVVLLAAGLLFDVAHAAASQAYTWKNVVTGGGGGFVPGIVFNPSAKGVAYARTDIGGAYRLNSDDTWTPLQDSVGNSNWHDWGVDALATDPVDTSRLYLAVGMYTNEWDPNVGSIMRSTDKGNTWSETKLPFKVGGNMPGRGMGERLAVDPNKNSILYFGARSGHGLWRSTDYGATWSNVTSFIWTGTYFQDASSTYTSDPVGIAWVTFDSTSGSNGSPTPRIFVGVADTSKSVFVSEDAGSTWSWVTGEPQYGFLPHKGVLSPAEKTLYISYSNGAGPYDGTNGTVHKYNITSKVWTDISPTPMASTYYGYGGLSVDLQVPGTLMVAALNCWWPDELIFRSVDSGATWSPIWAWNGYPNLNYYYSYDISNAPWLQDDTSTAQFPVRVGWTVEALAIDPFDSNHWLYGTGATIYGGHDLKQWDTVHNVTLKSLAVGIEEMAVLGLISPPGGPPLLSAVGDVGGFYHSDLDKAPAQSFHNPTYGTTNGIDYAGNKPSNLVRSGASDTLPTVAMSTDFGKTWSANYAASSTTPTGQVALSADADTVLLMNSNGVMVSKYSSTFSAVSSLPSGAAIASDKSNNTVFYGGSAGAFYVSTDGATSFTKTASLGSSTAVNAIRAHPSIAGDVWATTDTGLWHSTDYGKTFTKIDGGCTAGWSFGLGKASPTGSYAVIYGFFTVDGTTALFKTEDMGMNWQMISDSTHGFGAASANVVNGDMSNYGRVFVGTNGRGIFYGQPSGSLPSPTATATTTKTTSTSTKTSGTTTSSTTLSTTTKTSTTTTSTTKTTTSPTSTGTSTPYGQCGGTGYTGPTACPSGWKCTYQNAYYSQCEFEHLKKTGKHLDR

SEQ ID NO: 1190 - protein, 632 aa, Neosartorya fischeri
MATVRICVCGDEGTGKSSLITSLVKGVFVTNKIQPVLPQITIPPTIGTPENVTTTTVVDTSALPQERSNLAREIRKSNVILLVYSDHYSYERVALFWLPYFRSLGVNVPVVLCANKSDLAADHIEAQVIEEEMLPVMAEFKEIDSCIRTSAREHRNVNEAFFLCQKAVTHPIAPLFDSKESALKPAAVAALQRIFYLSDKDRDGYLSDKEIEDFQMRCFDKPLSKEDLVHIKETIQKTHPDSVTPFGIDCRGFIHLNKMYAEKGRHETVWIILRAFQYTDNLSLQESFLHPRFEVPPFASAELSPEGYRFFVNLFLLSDKDNDGGLNDAELASLFAPTPGLPASWADGSFPSSTVRNEAGHVTLQGWLAQWSMTTFQSPKTTLEYLAYLGFESSDRSNPSTTAALKVTRPRKKRKRPGRVGRNVVLGHVVGAPGSGKSALLDAFLARGFSHTYRPTIQPRTAVNTVELPGGKQCYLILDELGELEPAILENQAKLLDQCDVIVYTYDSSDPDSFAYIPQLRSKYPHIEELPSVFIALKADLDRTTQRAEHQPHEYTAMLNMPSPPLHVSATWSSIQEVFVHIAEAAMEPSTAFPRSEEDVEGKWMAWGIALGAVVCAGAAAVMIWRRVSGSG

SEQ ID NO: 1191 - protein, 382 aa, Neosartorya fischeri
MSQTKSLSLLAVLLSATRVAAHGHVTNVVVNGVSYAGFDINSYPYMSDPPKVAAWTTPNTGNGFIAPSAYNSPDIICHQNATNAQAYIEIAAGDRIQLQWTAWPESHHGPVIDMLASCGESCTTVDKTSLKFFKIDGVGLVDNSAVPGTWGDDQLIANSNSWMVEIPKSIAPGNYVLRHELIALHGAFEEGGAQNYPQCFNLKVTGSGTDSPAGTLGTELYTESDPGLLVDIYKSIASYAVPGPAMYSGAVSITQTTSAITSTGTATVGSGADSTPVPSSAASSKYSTIAVQVPTTKAQYTPVPSSSPSTFVTSPAPSTPVPSSSSVPVTSSTAAPQPTPAPGGTQTAYGQCGGRNWTGPTACASGSTCKTWNPYYSQCVPN

SEQ ID NO: 1192 - protein, 434 aa, Neosartorya fischeri
MFGQSILLAAVCQFLTLTAALQEEFDSLSPRPSIAITPQGAFKPFPFSPARHKTCHVKSHGDGTDDSKYILRAFRKCSPGGRVVFDKGKVYTIGKAMDIRFLKRVDVDIQGKIVMTNDIDYWLANSFKYAFQDSSSFVQIGGTDINIYGGGEIDGNGQAWWDARMNNKTIQRPILVTYMDLHGGSVSNITLRNSPNWFQLVFNSSNIVFDSMYLNASSSNSNPTANSGEDTYRSDNIVIQNSRIFNSDDCVSFKPNSTNILVQNLYCNGSHGISVGSLGQYVGQVDIVENILVYNTSLNNASDGARIKIWPGAIGNSTNTGGGSGWVRNVTYDGMHNYNNDWAIEMTQCYFAPNQTACNEHPASLIVEDILFKNFDGTTSKKRAPFIATLVCSSPDVCKNIRAENINVLSPSGTDEAICTNMDRSLLDLHCTKG

SEQ ID NO: 1193 - protein, 469 aa, Neosartorya fischeri
MDSKRGIVAAVLALLSVVSAQQPATSSAGNPKLTTYKCTTAGGCVAQDTSVVLDWGSHWIHTVNGYTSCTTSSGVDSTLCPDEATCAKNCVIEPANYTSAGVATSGDSLTMYQYVQNNGVYTNASPRLYLLGPDKDYVMLKLLGQELSFDVDLSTLPCGENGALYLSEMSASGGRNEYNTGGAEYGSGYCDAQCPVIAWKNGTLNTSGASYCCNEMDILEANSRANSYTPHPCSATDCDKGGCGFNPYALGQKSYWGPGGTVDTSKPFTITTQFITNDGTTTGTLSEIRRQYIQNGKVIANAVSSAGVSSITEDWCTSVDSSAATFGGLTTMGKALGRGMVLIFSIWNDASGFMNWLDSGNSGPCSSTEGNPDLIKAQNPTTHVVFSNIRWGDIGSTFKGSDDSGTTTTKTTTTKTSTSTTSTKTTTSTAPGATQTHYGQCGGQGWTGPTACASPYTCKAQNQWYSQCL

SEQ ID NO: 1194 - protein, 335 aa, Neosartorya fischeri
MKLTSSILFSLASVTPLVSGHYVFSKLIVDGKPTQDFEYIRKNTNGYMPTLPSDILSNDFRCNKGSMQSAASTKVYTVAPGTELGFQLAYGAEMKHPGPLQIYMSKAPGDVKSYDGSGDWFKVHQEGLCADTSKGIVDEDWCTWGKDTASFKIPEDTPAGQYLVRVEHIGLHRGFLGESEFYFTCAQIEVTGSGSGSPSPVVKIPGVYKPEDPNIHFNIWYPTPTAYNLPGPSVWTGGSVGGASPTAPAVNNNAVPAAPTTMTTLSKSPAKPTAGAEAGAGAGAVCGGSVSSSAVAPGGTLQKWAQCGGLNWTGSGSCETGTTCHQYNPYYYQCI

SEQ ID NO: 1195 - protein, 88 aa, Neosartorya fischeri
MHFIYQALSALAASLLFSSVTAGIAHCKVGEAWPDTSNCHNFYECASGGAPVLKTCGPGTAYCPTTGVCVHEETVASCFHRGHHSEKE

SEQ ID NO: 1196 - protein, 424 aa, Emericella nidulans
MYLFRILAILTAFTCASAGRLPSRTCVVPASGTNETDDAPAIISAFERCGRGGKVVFKPTTYYVNSVMNISWLQDVDIDLRGNLLWSTDIQYWLNNSLEVGYQNQSTAWILGGDNVRIDGHGIGTLDGNGDYWYEWISQQENTSNYPGRPIALTLSELTNSVVKGVNFLRSQMWTLAIIYSHHVEFDSILVNNTGNRVDSSNTDGADTIRSSHISFNNLTVYNGDDSISFKANSTDITLTNSHFYNGLGVAIGSIGQLKDQFETVERVKVENIVYENTLHAVYFKTWTDDQNGYPPNGGGGGLGYASNMLFKDLDTTSLRGSAVAISQCTRFSGAPGEGNCTNSQFQIRDITVANLHGTTKSERVTSFQCSAVAPCTNIGVFGVDLEFANGTKAEEYLCGNVKNPRGFVCTGAVCEGGSATGEC

SEQ ID NO: 1197 - protein, 223 aa, Emericella nidulans
MPLPLLPPLLLPLEALLDLALHLVDSTGVAYSARQVTPTAPLPRLRGSSTSNDVTDNSGCKELTFIFARGTTEIGNMGTVVGPKVGEALKSLTGNKAAIQGVDYPADAAGNAALGGSGGPKMASLVETALKQCPDTKIVLGGYSQGAMVVHNAASKLSSGQVVGAVTFGDPFKSQKPDNIDQFKTFCASGDPVCLNGANVMAHLSYGNDAQTAAQFLVSAAGL

SEQ ID NO: 1198 - protein, 98 aa, Emericella nidulans
MDVNNLTMHNFTFTGGDDCIAIKPRSYNINISDVICNGVNGIAIGSLGQYLEDSSVKNVTISHARVPSTRYGTYIKTWMGELVPQPDSYESDYKPQGG

SEQ ID NO: 1199 - protein, 152 aa, Emericella nidulans
MRLNYIYTATLTLALALSVLASTGGFSSTNTAIETRNIGTAEWMEYDSLSPDLNSGVDHGAGDHLRPQKRKLVADPYKVPYPLQTGPTRYAPLAKKPGTATATTLPTPQFPASPYKIATKYLNPGTVQTTLSATETLSVTMMENTAAPAPHP

SEQ ID NO: 1200 - protein, 303 aa, Emericella nidulans
MREISFGQRKIHLIDPRLLPGGMHTSINRHQHRQPTHLQTILFSRVLKIIIYFLLLLLPNAISATETTVIVTVTESATATTTATTTTTPKVPQDPSYTSPRQFRSSILRTTNAYRAAHNASNLSWNETLADYAKDWAKGCKWKHSSGPYGENLAYGYKKASSAVTAWGDEAALYDFSKPTGFTEETGHFTQLVWKSTREVGCAAVDCGLTDLDDDEKERAQGWYVVCEYMPAGNVVGADDGLEYFRVNVQEGSEDSDSSSEDDSEHGDGGEGSDVSDFGNRASRGLVEWSKERVACPRRPPPN

SEQ ID NO: 1201 - protein, 1084 aa, Emericella nidulans
MYLFRILAILTAFTCASAGRLPSRTCVVPASGTNETDDAPAIISAFERCGRGGKVVFKPTTYYVNSVMNISWLQDVDIDLRGNLLWSTDIQYWLNNSLEVGYQNQSTAWILGGDNVRIDGHGIGTLDGNGDYWYEWISQQENTSNYPGRPIALTLSELTNSVVKGVNFLRSQMWTLAIIYSHHVEFDSILVNNTGNRVDSSNTDGADTIRSSHISFNNLTVYNGDDSISFKANSTDITLTNSHFYNGLGVAIGSIGQLKDQFETVERVKVENIVYENTLHAVYFKTWTDDQNGYPPNGGGGGLGYASNMLFKDLDTTSLRGSAVAISQCTRFSGAPGEGNCTNSQFQIRDITVANLHGTTKSERVTSFQCSAVAPCTNIGVFGVDLEFANGTKAEEYLCGNVKNPRGFPWATYTQKDPSNNSSMISLPLLALATGAVASASCWRNTSCTGPSKPSFPGPWDSNNFAPGSRLIQPKSILSLPDGTYISDYTSDSHPSITTEDAGLVFDFGLEVGGIVTIDYSSSVPNTTLGLAFTEAKDYIGRTSDNSNGGTGADGALATLLTEGEGSYTMPDSQLRGGFRYLALFIPSSSSSNASLTIQSITLELAFQPTWSNLRAYQGYFHSSDPVLNKAWYAGAYTLQTNSVPRTTCRVSVSSATGWNNNAVCGPGETLLLDGAKRDRWVWIGDMGVAVPSASVSTGDTESTKNALLAIWDNQTPSGLLPKAGPPYLRADSDTYHLWTIIGTYNYFLFTEDYDFLAGIWQKYVKALDYSLAKITPLGIMNATQTADWGRWNYGTLASSANMLLYRSLTTAAFLAPYAGDNPENYTDLASTLRSAIVTHLYDSAVGAFRDSPNSTLYPQDANSMALAFSFFSQSPLNCSSSFNLAEAARVSSYLESNWTPIGPEVPELPNNISPFISSIELEGHFASGHADRAIELIRMLWGWYLAHPNGTQSTVPEGYLVDGSWGYRGDRGYRNDPRYVSHAHGWSSGPTSTLTEYAVGLKITKPKGSEWSLRPASFGIQGFEEAQAGFTTGLGKFKAAFRVQGKRATVTWDTPAGTKGWVQLPGEEGSWVEGGMGSLTVKL

SEQ ID NO: 1202 - protein, 1206 aa, Emericella nidulans
MSKARNGPRTGTKPRRDVLASLKMASMEEISRASLPAEIMASILDHLSPIDLIRAARASKLLREMAYDDSRWVQRLKRIGCWDEAEARKNAEEKFGTIANRASVELQDSTVAQQVPSQPKIDVTPISDGFDQINLSASAANDVVDLDTDPVLGALKLARSIRGEARQEYGKIHAALAPFYDDIATLGPSPENLLFQRYTEPQQQAQILSQLQAFARCDTTTGCENRHENLRAAVSMFETAALKEFRHGYETDDIDGRMKNYAHVLYTLNGGGSASELFTHHNHIITRKAELGQTNDCIDTLTQKVKLHQTQAFFTRLSVAFNEEVSIINRAFPPALQLAQPFVEKVGRDVLYPFLTAIFDELHRSNKEEYLVSVSSTFAQCMNLCDNLLPIQNSLDTFEDLLHQTIAQVYEPHMDLYLAEELDFFRKGSEASVAEWDRQLSEQAASTESFLLSNVNRQADKRDFLTSFKKVIMAPVNILPSFSNKSSEQQKPDRDSLAGDSGSTPRANRFSTISSPGTPPIQEAPTTELAAKAAIMKSKLEGIRSLFSIEVALGLVHAAKSSLERAARFMAIGGETGAAVKQQCEAIFVALLRILGHGHLIKGFDKAVDHLSDYRPREQGDRDQSGVEPLVTFLELVNVGDLILQMIDVFYEQEMIGSNITDRNDFLDPAVKEKKKFEQNLDERVAAGLNKGIDVLMEEVDYILATRQLATDFNPDVSTDPHRKTMDVSVTEAAAAVVDVVSSHTQMLVGSTDKSTLDVFNQEVGLRLFTALCKHLKRQRISIEGSLKLISDMNHYFKFIQRLKNNELLIYFKAFRELSQIYLIDSSDAKELANFIADAGRFSGIWRVEEVYEFAERRADWYQIKRDVERAMYGIGCNKYLDAPLPKRTNITEEQESYPLKAEMREISFGQRKIHLIDPRLLPGGMHTSINRHQHRQPTHLQTILFSRVLKIIIYFLLLLLPNAISATETTVIVTVTESATATTTATTTTTPKVPQDPSYTSPRQFRSSILRTTNAYRAAHNASNLSWNETLADYAKDWAKGCKWKHSSGPYGENLAYGYKKASSAVTAWGDEAALYDFSKPTGFTEETGHFTQLVWKSTREVGCAAVDCGLTDLDDDEKERAQGWYVVCEYMPAGNVVGADDGLEYFRVNVQEGSEDSDSSSEDDSEHGDGGEGSDVSDFGNRASRGLVEWSKERVACPRRPPPN

SEQ ID NO: 1203 - protein, 686 aa, Emericella nidulans
MKVAVALTLVAGVLSAPTPTFWGPGWGDGSASAEGSAGLSGSAGLSGSAGIGGSAGLGGSAGLGGSAGASGSASGSADASASGSADAEGSGDAEGSAGLGGSAGLGGHAGLGGSAGIGGSGSATGEAGASASGAAGLGGHAGLGGSAGIGGSGSATGEADASASGSAGLGGHAGLGGSAGIGGSAGIGGSGSAGLGGSAGVGGSGSASASAGLGGHAGLGGSAGLGGSAGIGGSGSATGEAGASASGAAGLGGSAGGSAGLGGSGSGSAGIGGSAGGSAGLSGSASGSAGGSASGSAEGSAGLGGSGSAEGFTSGSASGSASGSASGSASGSASGSASGSASGSASGSGSLGGSGSFDGLFPSATPIWSTSFSTSFSTAGIPTPTGASPVAGEDCGCEEQEAVPTDVSPFANGGSKSELIPTGLGGFDLSSLGSLFGSGDASASATPSATATGSTTGSGSALGGFNWGSLFGSSSDSDSSSSSSSSSSGLGSFGSLLGKLPRALGKSRSGSSTSNDVTDNSGCKELTFIFARGTTEIGNMGTVVGPKVGEALKSLTGNKAAIQGVDYPADAAGNAALGGSGGPKMASLVETALKQCPDTKIVLGGYSQGAMVVHNAASKLSSGQVVGAVTFGDPFKSQKPDNIDQFKTFCASGDPVCLNGANVMAHLSYGNDAQTAAQFLVSAAGL

SEQ ID NO: 1204 - protein, 166 aa, Emericella nidulans
MRLNYIYTATLTLALALSVLASTGGFSSTNTAIETRNIGTAEWMEYDSLSPDLNSGVDHGAGDHLRPQKRKLVADPYKVPYPLQTGPTRYAPLAKKPGTATATTLPTPQFPASPYKIATKYLNPGTVQTTLSATETLSVTMMENTRGRELGMTLTRTGRYDAFAAQ

SEQ ID NO: 1205 - protein, 521 aa, Aspergillus kawachii; identical to SEQ ID NO: 1018

SEQ ID NO: 1206 - protein, 254 aa, Aspergillus oryzae
MHLAIKSLFVSLLGASVLASPLPSNALVERNAPLNEFLSALLSHLPAIDGTIDAVSGVITDFDQLLADLTGARTTQNGYIGVCTDYTVLFARGTSEPGNVGVLVGPPLSEAFEQAVGAKALSFQGVNGYNADVAGYLAGGDAAGSKSMASLASEVLSKCPDTKLVMSGYSQGCQIVHNAVEQLPAADASKISSVLLFGDPYAGKAFPNVDASRVHTVCHAGDTICNNSVVILPPHLTYAVDVTNAVQFAVAAAN

SEQ ID NO: 1207 - protein, 261 aa, Aspergillus oryzae
GGGNDYVILNAQDGSGTNNANFATPPDGQPGRMRMYIWTESQPYRDGSFEAGIVIHEYTHGLSNRLTGGPANSRCLNALESGGMGEGWGDFMATAIRLKAGDTHPTDYTMGEWAANKKGGIRAYPFSTSLETNPLTYTSLNELDEVHAIGAVWANVLYELLWNLIDKHGKNDGPKPEFKDGVPTDGKYLAMKLVIDGMALQPCNPNCVQARDAILDADKALTDGANKCEIWKAFAKRGLGEGAEYHASRRVGSDKVPSDAC

SEQ ID NO: 1208 - protein, 242 aa, Aspergillus oryzae; identical to SEQ ID NO: 1166

SEQ ID NO: 1209 - protein, 1375 aa, Aspergillus oryzae
MLNIMTRRVLSATLFILQCASALPALNSSIETYHFPEGLDRAHSYGIQVKQSTGGVHTVESYSAIVSEANTTSGKGIEHNTSFALFDFEGSVDLIVTYNNGPVKSAVIRPYSYGIKPTVKGNTVSFSLDRPRNVVLQVNDDIFDTLQLFTNAIETDIPSQRDPNVVYFGPGIDNGPSSKNGTLVIPSGKAVYLAPGAVVTSRLAFQNATSGSIQGRGVINPRSSGGILIEWSSNILVKDILILGAKGFSVTTGTSKNITMSGIRSMSSTGNGDGIDFFCSEDVLIDGVFLRNSDDNIALYQHRWNYYGNSKNITVQNSSLWADWAHPINIGTHGNTDKPETMDGVTIRNIDILDHREPQMWYQGCIAINPGDSNLIQNVHIEDVRVEDFRLGQLLNFRVMYNSKYNTSPGRGIRNVYVKDLVYNGSHANPSLFLGYDKDRNISNVTFVNLQVNGKLIDDNMAKPSWYYTADFVPMVDWFHSLLNPKLRRFFPMYRDLSWQEPLFFESTMEAPSRRVGILPKREIVNKSSHWCYAMIFTWTPPDEAFGETPPLLPALLFSFHAGVKQTPQSCNGCPVGNWHSMRQHGRNGRSAQDQPPQQQQGQDTSKPEDDIPACQSCRKKKARCSREQPCSQCERFGVACVYDDRRLKPGLRAGAVDQLYRRIDTLENMFLGQSILWKQVWEALHPNSAFPSAPDENLHNEESTGRQLAGARDAMKKSMLQLAETKDTEGPSIESEHNGDGDCRSPKRRKVDLMSTPQQPSRNATDFDILNSDLVHPLVEFYFTNIHHWIPILHVRRFREQIQFYKGRQKATYILHAIVALCSRFSDDSRLGSDAEKAELAEKCRQKVILSSMESFSVENLQALVIIAFDTIGRGRGPSSWSIVGGMARTVEQLQLSVEEEHLSSHSQSGETLIRRMAFLKPSTSWREAEERRRVFWTVFLMDRFCSVSTGWNISLTSADVKRRLPCEGALWEQETEVRPPYFGISDARAASPHRPLLTESRMAADPKEQDCIGGFAYCIEATESLALVTNFFLHHALDIRDADKAQLWLMRFKELDLRMVQWKLFLPPKWRDASVLNADGIMDPNLTLAHTTHNTAVILLHQGIAYPPLHWQSCPVKLPSTSSAETCLEAASEISTIGQQFLLCSSILTNPQFSFCLFIAGRMLLTHSKYYGTPIPNSLDSLIASLFEISRRWAGPQNVHDNLKDNLASGFAKRLVSAKDSFPTLSKPSLDIRQTAYSENTDHRAPPKRVETISTPSVLERSSVVPNNTYAEQEPPLPIPDNHSDTSSFTDVDPFGISLTDRDQFNSQPSHVSIWNNATSPLYASAPIALDCASPEHPPTTLSPGQRISRYGAVEVDRAVVMGENHAHLNHNS

SEQ ID NO: 1210 - protein, 414 aa, Aspergillus oryzae
MFLSRVFCVLAALACVSAARETCVVPAGGSNATDDAPAIVHAFKKCGRGGKVVFKPTTYHIGSVMNITWLEDVDIDLGGTLLWGTNIQYWLNHSLPVGYQNQSTAFILGGNNVRIDGHGIGTLDGNGDTWYQWIKEQPNTSNYPGRPHAITFNGLTNSVVRGLRFLRSQMCHHVEFDSILVNNTGNVVSSSNTDGADTIRSSHITFNNWTVYNGDDSISLKGNSTDITITNSNLYNGLGIALGSIGQYKDQFETIERLKVSNVNFHSTLHAIYVKTWTADQNGYPPNGGGGGLGYISDVTAKDLKATSLRGAAFAISQCTRFSGAPGEGNCTNSEFQVRDISVLNLSGTTESNRVANLQCSAVAPCTDIALSGINLELKNGTAASEYLCGNVENQKGFECTGAVCEGGSATGEC

SEQ ID NO: 1211 - protein, 490 aa, Aspergillus oryzae
MRIGNLIVAASAASLVHAYPTRDIKKRGSGFTWVGVSESGAEFGSSIPGTLGTDYTWPDTSKIQVLRDDGMNVFRIPFLMERLAPNQMTGSLDATYLKDLKSTVQAVTDSGAYVVLDPHNYGRYSGSIISSTSDFKTFWKTVAGEFASNEKVIFDTNNEYHDMEQSLVLSLNQAAIDGIRAAGATTQYIFVEGNSYSGAWKWADTNDNLSQLTDPQDKIVYEMHQYLDSDGSGTSETCASSTIGKERLQTATEWLKTNNKKGFLGEFAGGVNEQCEQAVEGLLSYMSDNSDVWMGAEWWSAGPWWGSYMYSMEPTDGTAYSTYLPILKKYFVDGAGASTSSSATSAAPSTAAASTSTSVSASTSSASSTTISAVESSSTSSVAEAPSTTSGVVTATPTPSHPAPQPTSNSSSASSGAPTSSAPTTLATSPACGYQTTVTVTASRSTAAPSSSAGAVAHYYQCGGINYSGPTTCESGYTCVKQNPYYSQCL

SEQ ID NO: 1212 - protein, 461 aa, Aspergillus flavus
MRSLSSIALLSVVGAASAQAGPWAQCGGKSFSGSSACPSGWTCEELNEWFSQCVPGAASTTAAVSSIPTPSVTPSVSITASVSTGINKSISTVSKSTPLPSSSSASPTPRPTGSGSFAKADGAQFSIDGETKYFAGTNAYWLPFQMNDADIDAVFDHLEQTGLKILRVWGFNDVNTAPSPGTVYFQLHDKAKGTSTINTGKDGLQRLDYVVAAAEKHGVKLIIPFVNSWDDYGGFNAYVTAYGGSKTEWFTNEKIQSVYQAYIKAVVSRYRNSPAIFAWELGNEPRCNGCSPDVIHGWATKTSAYIKSLDPNHMVALGDEGMGLTIGSDQSYPYSTTEGNDFEKNLAIPDIDFGTLHLYTTDWGIKDNAWGNGWVENHAKACKAAGKPCLFEEYGMKGNHCTDELKWQKTSLSSGTAADLFWQYGQKLSTGESPNDQYTIYYGTDDWKCAVMDHMENVNKN

SEQ ID NO: 1213 - protein, 160 aa, Aspergillus oryzae
MDSNGLFPFITTVSAKLHYVELYSPLTMDTQDRSSVTPSASNMKPIEWDEGLATAAQQLADSCKFEHNRAGQNLYEGSDPADLVKQAIDAWHNEHKDYNYDSNTCGPNAICGHYTQVVWADSSKVGMAVSSRKCESGMYIVVANYDPVGNYAGEKPYKQQ

SEQ ID NO: 1214 - protein, 160 aa, Aspergillus oryzae
MGRDTIPDDLRNHSASSLEWDASLEASAQTLAARCVYQHDTTINGGGYGQNIGYGVSSEKIGEMITNLMYNNEMGYFEALYGEANPSMDNFDAWGHFSQIVWKGTTHVGCATVTCNSLGNVDSSVAVPFTVCNYSPAGNYAGEYADNVLRPLGQAMYVVS

SEQ ID NO: 1215 - protein, 181 aa, Aspergillus oryzae
MAGKAYWYSGDDPGMHFLCTPCKSRTCIEPRIYKSRIKMQFTSFKALAIFAASFFAFSAAAHPSCETGAVWADPHDCHSFFECAAGGIPVRKTCGPGTAYNSRFGICDYEEKVRSCHGHGPVGHDESSEGHGHQWKDHGNGQSEGHGQEGKKDSKGQSSEGHGQGTQEHGSGEQEHSEGSH

SEQ ID NO: 1216 - protein, 228 aa, Aspergillus oryzae
MFSRIALLPAFLPVALACLGYEGGVPTPTAHYSNSAVIEIAAGEVFDAGWAKYDRGSGACGGQTEGDWKDDVFYLHSGATLKNVIIGADQSEGVHCDGACTLEFVWFEDVCEDAISIVRPKSTTRLTSPLTIHPEKRQRRRRNLDHRRWSLSRRRQGRPAQRLRYCEPSASATCMSRVPLPVMVVRLLASTRALETLLLWSMSALMRIILVFCMTDVRVIGLLLGELQ

SEQ ID NO: 1217 - protein, 215 aa, Aspergillus oryzae
MNRDTYRSSNIVIQNSVINNGDDCVSFKPNSTEILVQNLHCNGSHGISVGSLGQYQGEVDIVQNVLVHNISMYNASRKKDMARIKVWPGISSAMSEDLQGGGGLGSVQNITYDKMYIENVDWAIEVTQCYGQKNQTLCNENPSNLTISDVYFNDLTGVTSGKNDPNVGTIICSSPDVCSGIHATNIDVKSPDGDSGFVCTNVDEEFLDVECASSS

SEQ ID NO: 1218 - protein, 328 aa, Aspergillus oryzae; identical to SEQ ID NO: 1160

SEQ ID NO: 1219 - protein, 100 aa, Aspergillus oryzae
MLATVFLIVASALTANAKLGINCRGSAKCSVLWGPSDAAQQLTNVIQHIDTNRWYMNGEHIACVGNQAGNGGGYCAFLQKTGGTNGGVIKNLAHYITDHG

SEQ ID NO: 1220 - protein, 416 aa, Aspergillus oryzae
MNLWLLTLWVTLVTAWVDNQGTTCTLYPESLTHQGQEVDDSPSIQQAFDMCGTNGTVIFSENVFHVNTVLNTTNLLNCDVHLRGELRFSANVPYWRTHAISVVLQDQVTAWLFGGHNVSFYGEGGFYNGNGQAWYNANRNESNQAGRPMSFTVYNSTDLRVDGLRVIQPQFWATFVWASKNVSFTNLFVNATSDSEWGTMNTDGFDSWQSDNLLVENATIIMGDDCIAAKGNTTNLLAKNIYCEGGTGVTIGSIGQYPEMPDYNLNITFENVTIKDAMDGAYIKTWQGTRIFTPSNGDWGGGGTGLVKNVTFRDFVMDNVGLPIQVAQCVYSAGSNKSCNTSTLQIEDVKWENIRGTSRFNIASSIYCSDEVPCPNMSFENVNITSLNATRGQAYYDTDIQYELFQCTNVVDHLGN

SEQ ID NO: 1221 - protein, 146 aa, Aspergillus oryzae; identical to SEQ ID NO: 1170

SEQ ID NO: 1222 - protein, 487 aa, Aspergillus oryzae
MHPLLLLLYSTLALGQLIGPVGPTTPLSEKTTECNILSYGAVADNSTDISTALETTFNDCVRPNPGSRLVVPEGQYLLNRGVVLSNATNWAFQLDGLVTAAYGGNWEIERSLILQGFAGVDLLNETINGEGDHKFLLDVLVIVNAVDFEFYSSNGLGAFQGQGYLYRNLNNTDRPRLVRLISPTNASVHDLILVDSPKFHIILDFAVNVEAYHLTIRGANLGSYDGIDAIGTNYYIHDNEVTNRDECVSIKSPSHHALVENLVCNQAGSGLSIGSLNVSAEISNIVARNISILQGNNIAFIKTYPGGSGYVSNITFENFRSKASLYGLNINQYWQNTFTPDTGSVALSNIVYRNVTGSVADGAKRPPLYLIANDLTFATNVTVEDVSVWTETGDSVVNKISNVFGIGDGTYGVNDGIEELGVGEVPTAYTRTVTVTETPTGWVEPGLPAWAAPSTGFGTASPIPVYTPTPLWRPGGVDYDLHYWGSF

SEQ ID NO: 1223 - protein, 405 aa, Aspergillus oryzae
MQLGHAKLFLFFLSLFTPALSRRIGHKHTHVAEREAPACTPTAGGSPTVDDVPAIESAMAACPSGTIMIPAKSTYHINSELSFAKCSGCTLQVEGTLLVSDDTKAWSGKDAVLNLEDVNDVSIVSKTGKGVIDGNGQAAWDLLNKDKNYSRVKCLLYLTGKTSGVTISGLTMRNPPNVFSSVKQSVTNVTYSNLILTAVSKSDALPKNTDGFDLGGTGIRMDNIKVQNGDDCIAIQNGAEDITVMNIQCTGSHGLSIGSIGKTPGEVDTVKNIHFKNAKMTKCSKAAGIKIYSGGYGTAEVSNITWENVMVDGTSYAFQVQTCYGSDEKECASQPSTAKLTDIVVKGFSGKTDKDEPVASINCPAKGTCGLSLTEMKVQSATGGEEYQCSNAGTIGVKCAPGASG

SEQ ID NO: 1224 - protein, 254 aa, Aspergillus oryzae; identical to SEQ ID NO: 1206

SEQ ID NO: 1225 - protein, 210 aa, Aspergillus oryzae
MKAIAALALVGGAIAAPTKTVESRQLPGMGSLPGLENGVTQNAGCQELTFIFARGTSEMGNMGSVVGPPVAKQLASLTGNKVTVQGVDYPADAAGNANMGASGGPKMAELIQQAKKQCPNTKVVVGGYSQGAMVVHNAASKVGADAISGAVLFGDPFKTQGVGQLASNKVKEFCASGDPVCLNGMNFMAHLSYGSNAQEAAQFLVQAAGL

SEQ ID NO: 1226 - protein, 222 aa, Aspergillus oryzae
MKAGDVVTAHWKDSGESPRISELVQYDLYLCAGGDTLGSQENLAILIKDGVFARGNSVSFKIDPAVGGNEPNAYFLKMVASGPDAHVINFSDRFTLTDMAGAFSSNLEDGIGLLSEGHGQQELRRRQAAGAYTIPYQLQTGPTRYAPMAKKPGSTIPADKSPTPQFPTSAYEIATAYLSAPTIQTTVSASLTYSVSSIENTASPAPHPHDKKMKRFLERWKD

SEQ ID NO: 1227 - protein, 323 aa, Bacillus subtilis
MKKKKTWKRFLHFSSAALAAGLIFTSAAPAEAAFWGASNELLHDPTMIKEGSSWYALGTGLTEERGLRVLKSSDAKNWTVQKSIFTTPLSWWSNYVPNYGQNQWAPDIQYYNGKYWLYYSVSSFGSNTSAIGLASSTSISSGGWKDEGLVIRSTSSNNYNAIDPELTFDKDGNPWLAFGSFWSGIKLTKLDKSTMKPTGSLYSIAARPNNGGALEAPTLTYQNGYYYLMVSFDKCCDGVNSTYKIAYGRSKSITGPYLDKSGKSMLEGGGTILDSGNDQWKGPGGQDIVNGNILVRHAYDANDNGIPKLLINDLNWSSGWPSY

SEQ ID NO: 1228 - protein, 659 aa, Bacillus subtilis
MFAKRFKTSLLPLFAGFLLLFHLVLAGPAAASAETANKSNELTAPSIKSGTILHAWNWSFNTLKHNMKDIHDAGYTAIQTSPINQVKEGNQGDKSMSNWYWLYQPTSYQIGNRYLGTEQEFKEMCAAAEEYGIKVIVDAVINHTTSDYAAISNEVKSIPNWTHGNTQIKNWSDRWDVTQNSLLGLYDWNTQNTQVQSYLKRFLDRALNDGADGFRFDAAKHIELPDDGSYGSQFWPNITNTSAEFQYGEILQDSASRDAAYANYMDVTASNYGHSIRSALKNRNLGVSNISHYASDVSADKLVTWVESHDTYANDDEESTWMSDDDIRLGWAVIASRSGSTPLFFSRPEGGGNGVRFPGKSQIGDRGSALFEDQAITAVNRFHNVMAGQPEELSNPNGNNQIFMNQRGSHGVVLANAGSSSVSINTATKLPDGRYDNKAGAGSFQVNDGKLTGTINARSVAVLYPDDIAKAPHVFLENYKTGVTHSFNDQLTITLRADANTTKAVYQINNGPETAFKDGDQFTIGKGDPFGKTYTIMLKGTNSDGVTRTEKYSFVKRDPASAKTIGYQNPNHWSQVNAYIYKHDGSRVIELTGSWPGKPMTKNADGIYTLTLPADTDTTNAKVIFNNGSAQVPGQNQPGFDYVLNGLYNDSGLSGSLPH

SEQ ID NO: 1229 - protein, 137 aa, Bacillus subtilis
MKKWIVLFLVLIAAAISIFVYVSTGSEKPFYNDINLTQYQKEVDSKKPKFIYVYETSCPPCQEIKPELNEVIKKEKLKVQALNIEEKENYNTEFLDKYNLNKTPTILYYKDGKEKDRLEGYRSASQIEKFFDKNGDR

SEQ ID NO: 1230 - protein, 306 aa, Bacillus subtilis
MKLKTKASIKFGICVGLLCLSITGFTPFFNSTHAEAKSIEDTNMASCITNKKFVQLEKKFDARLGVYAIDIGSNKTIAYRPNERFAYASTYKVLAAAAVLKKNSIEKLNEVIHYSKDDLVTYSPITEKHLDTGMSLKEISEAAIRYSDNTAGNILLQQLGGPKGFEKSLKQIGDHVTKAKRFETDLNSAIPGDIRDTSTAKALATDLKAFTLDNTLTTDKRMILTDWMRGNATGDELIRAGAPIGWEVGDKSGAGSYGTRNDIAIVWPPNRAPIVVAILSNRFTKDANYDNALIAEAAKVVLNDLK

SEQ ID NO: 1231 - protein, 47 aa, Bacillus subtilis
AIKLVQSPNGNFAASFVLDGTKWIFKSKYYDSSKGYWVGIYEVWDRK

SEQ ID NO: 1232 - protein, 367 aa, Bacillus subtilis
MSVFTNSYIPVNKYTRPGLKLQGVKKCVLHYTANPGAGADNHRRYFSNAQVYASAHIFVDKAEAICIIPLNEVAYHANDIQQRDSAGNPYRGVAALKPNANFLSIGVEMCLEKDGSFHSDTVERTEDVFVELCNKFGLDPIDDIVRHYDITHKNCPAPWVSNSQKFVDFKNRVKAKMSGKSVSKASPTKPTTSSPSSSSAVSGSLKSKVDGLRFYSKPSWEDKDVVGTVNKGIGFPTVVEKVKVGSAYQYKVKNSKGTTYYITASDKYVDVTGSVKTSSSAPKTTSTSSSSSSIKSVGKIKIVGVSSAAIVMDKPDRNSSKNIGTVKLGSTISISGSVKGKNNSNGYWEVIYKGKRGYISGQFGSTI

SEQ ID NO: 1233 - protein, 87 aa, Bacillus subtilis
MEPIFIIGIILGLVILLFLSGSAAKPLKWIGITAVKFVAGALLLVCVNMFGGSLGIHVPINLVTTAISGILGIPGIAALVVIKQFII

SEQ ID NO: 1234 - protein, 455 aa, Bacillus subtilis
MKKLLTVMTMAVLTAGTLLLPAQSVTPAAHAVQISNSERELPFKAKHAYSTISQLSEAIGPRIAGTAAEKKSALLIASSMRKLKLDVKVQRFNIPDRLEGTLSSAGRDILLQAASGSAPTEEQGLTAPLYNAGLGYQKDFTADAKGKIALISRGDLTYYEKAKNAEAAGAKAVIIYNNKESLVPMTPNLSGNKVGIPVVGIKKEDGEALTQQKEATLKLKAFTNQTSQNIIGIKKPKNIKHPDIVYVTAHYDSVPFSPGANDNGSGTSVMLEMARVLKSVPSDKEIRFIAFGAEELGLLGSSHYVDHLSEKELKRSEVNFNLDMVGTSWEKASELYVNTLDGQSNYVWESSRTAAEKIGFDSLSLTQGGSSDHVPFHEAGIDSANFIWGDPETEEVEPWYHTPEDSIEHISKERLQQAGDLVTAAVYEAVKKEKKPKTIKKQMKAKASDIFEDIK

SEQ ID NO: 1235 - protein, 288 aa, Bacillus subtilis
MTKKAWFLPLVCVLLISGWLAPAASASAQTTLSLNDRLASSPSGTGSLLSLAAPAAPYADTDTYYEGAEGKTGDSLKSTLHRIISGHTMLSYSEVWNALKETDEDPRNPNNVILLYTNESRSKNLNGGNVGDWNREHVWAKSHGDFGTSKGPGTDIHHLRPADVQVNSARGNMDFDNGGTEYAKAPGNYYDGDSWEPRDDVKGDVARMLFYMAVRYEGDDGYPDLELNDKTGNGSAPYHGKQSVLLEWNKQDPVDDRERKRNEIIYEKYQHNRNPFIDHPEWADEIWP

SEQ ID NO: 1236 - protein, 277 aa, Bacillus subtilis
MKISMQKADFWKKAAISLLVFTMFFTLMMSETVFAAGLNKDQKRRAEQLTSIFENGTTEIQYGYVERLDDGRGYTCGRAGFTTATGDALEVVEVYTKAVPNNKLKKYLPELRRLAKEESDDTSNLKGFASAWKSLANDKEFRAAQDKVNDHLYYQPAMKRSDNAGLKTALARAVMYDTVIQHGDGDDPDSFYALIKRTNKKAGGSPKDGIDEKKWLNKFLDVRYDDLMNPANHDTRDEWRESVARVDVLRSIAKENNYNLNGPIHVRSNEYGNFVIK

SEQ ID NO: 1237 - protein, 124 aa, Bacillus subtilis
MYRTRGFIYPAVLFVSALVLLIVNFVAAQYISRCMFEKETKELYIGENLLQNGVLLSIRHVLEERKGQEGTQQFLYGRVSYYIHDTSIKEQKEINLRVSTDSGTERTAQIVFDQKQKKLLRWTE

SEQ ID NO: 1238 - protein, 58 aa, Bacillus subtilis
MKQDMIDYLMKNPQVLTKLENGEASLIGIPDKLIPSIVDIFNKKMTLSKKCKGIFWEQ

SEQ ID NO: 1239 - protein, 58 aa, Bacillus subtilis; identical to SEQ ID NO: 1238

SEQ ID NO: 1240 - protein, 55 aa, Bacillus subtilis
MQDLINYFLNYPEALKKLKNKEACLIGFDVQETETIIKAYNDYYLADPITRQWGD

SEQ ID NO: 1241 - protein, 261 aa, Bacillus subtilis
MGMKKKLSLGVASAALGLALVGGGTWAAFNDIKSKDATFASGTLDLSAKENSASVNLSNLKPGDKLTKDFQFENNGSLAIKEVLMALNYGDFKANGGSNTSPEDFLSQFEVTLLTVGKEGGNGYPKNIILDDANLKDLYLMSAKNDAAAAEKIKKQIDPKFLNASGKVNVATIDGKTAPEYDGVPKTPTDFDQVQMEIQFKDDKTKDEKGLMVQNKYQGNSIKLQFSFEATQWNGLTIKKDHTDKDGYVKENEKAHSEDKN

SEQ ID NO: 1242 - protein, 705 aa, Bacillus subtilis
MKSCKQLIVCSLAAILLLIPSVSFAADSNISVKLLNYIGNKSSISLSPTGFYKVTGDNVAVTDRFAGASRYETATLASNSQWKNPNTVILVNRDIFIDALPVIPLAKKLNAPVLFTQPDTLTKTTERQIAKFNPDNILIIGGARSISKDVENKLKSYGAVKRISGKNRYVLSENIAKQMGSYDKAIVVTGRVFQDALAIAPYAAAHGYPILLTEKDKLPDYDLPKQVIIIGSSFSVSDSVENQIKKTSTVQRIPGSTRYELTANIIKQLKLKADKVVMTNGTKYADVLIGASLASKKNSQILFVKQDSVPAAAKSITKDKATYAYDFIGSTSSISAEVENSLADEFYLADGGTYNLKINSGKLNLENIKTYGNSLRIKPENYSTSNRISLDGKQYLGTVNFSIESTKYIRPVNENIPFEDYLKGVIPNEMPASWSLEALKAQTVAARTYSITKTGTTVPDTTAFQVYGGYSWNSNTNKAVEQTKGKVLKYNGSLITAAYSSSNGGYTEASNEVWSSSVPYLIAKKDTKDPQIGWTLTLSKQQLDTKSLDLTKPSSWWSSATETDSARLSGVKNWILKNKETSADSVKIASIDDLSFSGTTQGQRAKTASMKVKYFVKSSTGSYNLSKITTISVPTSELRTMIGATVFKSTYVTVKKDTSKYTISGKGYGHGIGMSQYGAKARAEAGDSYSSILKFYYPGTTLTSY

SEQ ID NO: 1243 - protein, 272 aa, Bacillus subtilis
MAIKVVKNLVSKSKYGLKCPNPMKAEYITIHNTANDASAANEISYMKNNSSSTSFHFAVDDKQVIQGIPTNRNAWHTGDGTNGTGNRKSIGVEICYSKSGGVRYKAAEKLAIKFVAQLLKERGWGIDRVRKHQDWNGKYCPHRILSEGRWIQVKTAIEAELKKLGGKTNSSKASVAKKKTTNTSSKKTSYALPSGIFKVKSPMMRGEKVTQIQKALAALYFYPDKGAKNNGIDGVYGPKTADAIRRFQSMYGLTQDGIYGPKTKAKLEALLK

SEQ ID NO: 1244 - protein, 255 aa, Bacillus subtilis
MVKIFIDPGHGGSDPGATGNGLQEKTLTLQIALALRTILTNEYEGVSLLLSRTSDQYVSLNDRTNAANNWGADFFLSIHVNSGGGTGFESYIYPDVGAPTTTYQSTIHSEVIQAVDFADRGKKTANFHVLRESAMPALLTENGFIDTVSDANKLKTSSFIQSLARGHANGLEQAFNLKKTSSSGLYKVQIGAFKVKANADSLASNAEAKGFDSIVLLKDGLYKVQIGAFSSKDNADTLAARAKNAGFDAIVILES

SEQ ID NO: 1245 - protein, 237 aa, Bacillus subtilis
MRKKLKWLSFLLGFIILLFLFKYQFSNNDSWKPWSLPLSGKIIYLDPGHGGPDGGAVGGKLLEKDVTLEVAFRVRDYLQEQGALVIMTRESDTDLAPEGTKGYSRRKAEDLRQRVKLINHSEAELYISIHLNAIPSQKWSGAQSFYYGKYAENEKVAKYIQDELRRNLENTTRKAKRIHGIYLMQNVTKPGALIEVGFLSNPSEATLLGKPKYQDKVASSIYKGILRYFTEKGDPPE

SEQ ID NO: 1246 - protein, 250 aa, Bacillus subtilis
MVTIKKDFIPVSNDNRPGYAMAPAYITVHNTANTAKGADAKMHAKFVKNPNTSESWHFTVDDSVIYQHLPIDENGWHAGDGTNGTGNRKSIGIEICENADGDFEKATSNAQWLIRKLMKENNIPLNRVVPHKKWSGKECPRKLLDHWNSFLNGISSSDTPPKETSPSYPLPSGVIKLTSPYRKGTNILQLQKALAVLHFYPDKGAKNNGIDGVYGPKTANAVKRFQLMNGLTADGIYGPKTKAKLKSKLK

SEQ ID NO: 1247 - protein, 142 aa, Bacillus subtilis
MAVVRATSADVDLMARLLRAEAEGEGKQGMLLVGNVGINRLRANCSDFKGLRTIRQMIYQPHAFEAVTHGYFYQRARDSERALARRSINGERRWPAKFSLWYFRPQGDCPAQWYNQPFVARFKSHCFYQPTAETCENVYNTF

SEQ ID NO: 1248 - protein, 473 aa, Bacillus subtilis
MRKSLITLGLASVIGTSSFLIPFTSKTASAETLDEKKQKIESKQSEVASSIEAKEKELTELQENQSKIEKELKDINDKALDTSNKIEDKKEENDKTKEEIKKLKKEIKETEARIEKRNEILKKRVRSLQESGGSQGYIDVLLGSTSFGDFISRATAVSSIVDADKDLIKQQEQDKAKLEDSEADLNDKLKEVQAALAKLETMQKDLDKQLNEKDKLFDEAKASQKKTAKAISELKSEASELANQKANTEAEQARIKKEQEAAAALIKKQEEAQKASDETQTDDSQTATTESSKASSSDDSSDNSSDNSSNGSSNSSSNGSSSKKSSGSNSNSGGTVISNSGGIEGAISVGSSIVGQSPYKFGGGRTQSDINNRIFDCSSFVRWAYASAGVNLGPVGGTTTDTLVGRGQAVSASEMKRGDLVFFDTYKTNGHVGIYLGNGTFLNDNTSHGVSVDSMSNPYWKAAFKGVVRRVVQ

SEQ ID NO: 1249 - protein, 443 aa, Bacillus subtilis
MNIKKCKQLLMSLVVLTLAVTCLAPMSKAKAASDPIDINASAAIMIEASSGKILYSKNADKRLPIASMTKMMTEYLLLEAIDQGKVKWDQTYTPDDYVYEISQDNSLSNVPLRKDGKYTVKELYQATAIYSANAAAIAIAEIVAGSETKFVEKMNAKAKELGLTDYKFVNATGLENKDLHGHQPEGTSVNEESEVSAKDMAVLADHLITDYPEILETSSIAKTKFREGTDDEMDMPNWNFMLKGLVSEYKKATVDGLKTGSTDSAGSCFTGTAERNGMRVITVVLNAKGNLHTGRFDETKKMFDYAFDNFSMKEIYAEGDQVKGHKTISVDKGKEKEVGIVTNKAFSLPVKNGEEKNYKAKVTLNKDNLTAPVKKGTKVGKLTAEYTGDEKDYGFLNSDLAGVDLVTKENVEKANWFVLTMRSIGGFFAGIWGSIVDTVTGWF

SEQ ID NO: 1250 - protein, 382 aa, Bacillus subtilis
MRIFKKAVFVIMISFLIATVNVNTAHAAIDVSAKSAIIIDGASGRVLYAKDEHQKRRIASITKIMTAVLAIESGKMDQTVTVSANAVRTEGSAIYLTEGQKVKLKDLVYGLMLRSGNDAAVAIAEHVGGSLDGFVYMMNQKAEQLGMKNTRFQNPHGLDDHENHYSTAYDMAILTKYAMKLKDYQKISGTKIYKAETMESVWKNKNKLLTMLYPYSTGGKTGYTKLAKRTLVSTASKDGIDLIAVTINDPNDWDDHMKMFNYVFEHYQTYLIAKKGDIPKLKGTFYESKAFIKRDITYLLTEEEKENVKINTTLLKPKKAWEKDASKIPDIVGHMEIMFNDATIAKVPIYYENERHQKPKKQFFETFKSIFLNAAGGAKWSI

SEQ ID NO: 1251 - protein, 491 aa, Bacillus subtilis [sequence omitted]

SEQ ID NO: 1252 - protein, 389 aa, Bacillus subtilis
MKRLLSTLLIGIMLLTFAPSAFAKQDGKRTSELAHEAKSAVLIERDTGKVLYNKNSNERLAPASMTKIMTMLLIMEALDKGKIKMSDKVRTSEHAASMGGSQIFLEPGEEMTVKEMLKGIAIASGNDASVAMAEFISGSEEEFVKKMNKKAKELGLKNTSFKNPTGLTEEGHYSSAYDMAIMAKELLKYESITKFTGTYEDYLRENTDKKFWLVNTNRLIKFYPGVDGVKTGYTGEAKYCLTASAKKGNMRAIAVVFGASTPKERNAQVTKMLDFAFSQYETHPLYKRNQTVAKVKVKKGKQKFIELTTSEPISILTKKGEDMNDVKKEIKMKDNISAPIQKGQELGTLVLKKDGEVLAESPVAAKEDMKKAGFITFLKRTMGDWTKFK

SEQ ID NO: 1253 - protein, 350 aa, Bacillus subtilis
MKSLLACLALMIAGIATALFIGFHDHTGNKKIVYDDDQEGLQDQIVFKFSHVVAENTPKGLAANKFADLVNEKSGGKIKIEVFPNGSLYSDIEEIEALQNGDVQFIAPSTSKLGMLSPEWGVLDLPYAFTDYNAVKKGLNGSIGTQLFDSLKKNQLKGLAYWTNGFKQITTNQGPVKTPDDLKGQDLRIMQSDVIEDQFKLLGATPHQESFNSTFQLLENNVVDGEENTISNIYSKKFYNVQDYLTISSHGYLGYAVMTDEHFWKAQTPETRRILTEAMKETTEWNETYAEQMNKEQLEEIKKNSAIHIYELSDKEKQEWMKRLDPVYRQYEPIFGRELIRELLELRKDS

SEQ ID NO: 1254 - protein, 416 aa, Bacillus subtilis
MSDEQKKPEQIHRRDILKWGAMAGAAVAIGASGLGGLAPLVQTAAKPSKKDEKEEEQIVPFYGKHQAGITTAHQTYVYFAALDVTAKDKSDIITLFRNWTSLTQMLTSGKKMSAEQRNQYLPPQDTGESADLSPSNLTVTFGFGPGFFEKDGKDRFGLKSKKPKHLAALPAMPNDNLDEKQGGGDICIQVCADDEQVAFHALRNLLNQAVGTCEVRFVNKGFLSGGKNGETPRNLFGFKDGTGNQSTKDDTLMNSIVWIQSGEPDWMTGGTYMAFRKIKMFLEVWDRSSLKDQEDTFGRRKSSGAPFGQKKETDPVKLNQIPSNSHVSLAKSTGKQILRRAFSYTEGLDPKTGYMDAGLLFISFQKNPDNQFIPMLKALSAKDALNEYTQTIGSALYACPGGCKKGEYIAQRLLES

SEQ ID NO: 1255 - protein, 430 aa, Bacillus subtilis
MPYIVDVYAREVLDSRGNPTVEVEVYTETGAFGRALVPSGASTGEYEAVELRDGDKDRYLGKGVLTAVNNVNEIIAPELLGFDVTEQNAIDQLLIELDGTENKGKLGANAILGVSMACARAAADFLQIPLYQYLGGFNSKTLPVPMMNIVNGGEHADNNVDIQEFMIMPVGAPNFREALRMGAQIFHSLKSVLSAKGLNTAVGDEGGFAPNLGSNEEALQTIVEAIEKAGFKPGEEVKLAMDAASSEFYNKEDGKYHLSGEGVVKTSAEMVDWYEELVSKYPIISIEDGLDENDWEGHKLLTERLGKKVQLVGDDLFVTNTKKLSEGIKNGVGNSILIKVNQIGTLTETFDAIEMAKRAGYTAVISHRSGETEDSTIADIAVATNAGQIKTGAPSRTDRVAKYNQLLRIEDQLAETAQYHGINSFYNLNK

SEQ ID NO: 1256 - protein, 212 aa, Bacillus subtilis [sequence omitted]

SEQ ID NO: 1257 - protein, 210 aa, Bacillus subtilis
MKKVLMAFIICLSLILSVLAAPPSGAKAESVHNPVVLVHGISGASYNFFAIKNYLISQGWQSNKLYAIDFYDKTGNNLNNGPQLASYVDRVLKETGAKKVDIVAHSMGGANTLYYIKYLGGGNKIQNVVTLGGANGLVSSTALPGTDPNQKILYTSIYSLNDQIVINSLSRLQGARNIQLYGIGHIGLLSNSQVNGYIKEGLNGGGLNTN

SEQ ID NO: 1258 - protein, 304 aa, Bacillus subtilis
MRINHNIAALNTLNRLSSNNSASQKNMEKLSSGLRINRAGDDAAGLAISEKMRGQIRGLEMASKNSQDGISLIQTAEGALTETHAILQRVRELVVQAGNTGTQDKATDLQSIQDEISALTDEIDGISNRTEFNGKKLLDGTYKVDTATPANQKNLVFQIGANATQQISVNIEDMGADALGIKEADGSIAALHSVNDLDVTKFADNAADTADIGFDAQLKVVDEAINQVSSQRAKLGAVQNRLEHTINNLSASGENLTAAESRIRDVDMAKEMSEFTKNNILSQASQAMLAQANQQPQNVLQLLR

SEQ ID NO: 1259 - protein, 507 aa, Bacillus subtilis
MTSTFMGLETARRALSAQQAALSTTANNVANANTDGYTRQRVSLEATDYFPAVSKNAEKTAGQMGTGVQGKSVERIRDIFLDYQYRLQNNSAGYYDTKAKALSQMEGVLNETDDSGLNSVLNSFWNSLQELSNNTNEESARSVVARKGQAVAETFNYISESLTNVQSNLKAELNTTVLDVNSLLSQLNSLNKQIAQVEPVGLLPNGLYDQRDLLIDKLSSMVDIKVSYNKSGGNALASAEGTVSIEILDKNKQSLGTVLDGKNYEVSELAANYDNETGLVSSISIGDTAVQAESFSSKGSLLGFIESYGYITADGQEKGVYPEMLSDLDNMALEFAKAFNEVHRNGVTKSGEQGGDFFDFTGGETEPAKGAAGKIKVADSIIDSKGANIAFSLTGAANDNANATKLANVLTGKITINGKETSVLDYYAGLIGELGIEAQEANRLASNTETQLNDADINRQQMSAVSLDEEMTNMIQFQHAYNAAARMVTLQDELLDKVINGMGVGGR

SEQ ID NO: 1260 - protein, 298 aa, Bacillus subtilis
MRVTQGMIQQNSLRYIGSSYSKLDKLQSQISSGKKISKASDDPVVAMKSLKYNTQLSQVQQYKSNASQAFTWLENTETNITEGIDILSKVRELAVEAQNDTNGEPERQAIGVEVKQLKEQLLNIANTQVNGRYIFNGTNSDKPPVTDNGDGTYTISDTADVVVNISNNMSLKVNSDPKSAFGGTSESGQNVFEMLDSFEKALNSGSLDGMDSVLNDIDHFSDGMSAERSDLGARYNRLELVNTRLSAQEETATKVLSDNEDVELEEVITEFIAQQSVHRATLAVNAQIVQPTLIDFLK

SEQ ID NO: 1261 - protein, 498 aa, Bacillus subtilis
MVTRITGLASGMDIDDIVSKLMQTERAPLDKLTQKKQTLEWQRDSYREVNSKIKELQDYMSKNTLTYPSTYQSKTVTSSNESVLTATGSVSAPNSSSTVEVASLATAATYKANNYTGYTQGDYNLAFNVVAPGETTAKTVNISVTSADTIDNVISKLNSSDLGVSAFKDKIWNGTEYVETIAFSSKATGAGGSIQAADSATADFMSGQLGFSLDADNKLTAYKEGTNAKVTINGFEMEKLTNNFTVNGVTYSIKNTTAATGPVTTSVSTDVDGIYNQIKEFVDKYNELVDSLNEKLKEEKYRDYTPLTSEQKEAMSDKEVELWEEKAKSGLLRNDSSISTGTNQMRTDFYTQVNADGKTYQLTEFGITTSSAYQLRGHLEINEEKLKAKIAEDPQGVANLFTSGTNDSNYSDKGIMKRITNTLRSTVKSIEAKAGNSTMGASSYSIGKNLNSISTEITDMQDRLNTIENRYYSKFSAMDSAIQKMNEQASYLSQLLVQ

SEQ ID NO: 1262 - protein, 587 aa, Bacillus subtilis
MKRTWNVCLTALLSVLLVAGSVPFHAEAKKPPKSYDEYKQVDVGKDGMVATAHALASEIGADVLKKGGNAIDAAVAIQFALNVTEPMMSGIGGGGFMMVYDGKTKDTTIIDSRERAPAGATPDMFLDENGKAIPFSERVTKGTAVGVPGTLKGLEEALDKWGTRSMKLLITLTIKLAEKGFPIDSVLADAISDYQEKLSRTAAKDVFLPNGEPLKEGDTLIQKDLAKTFKLIRSKGTDAFYKGKFAKTLSDTVQDFGGSMTEKDLENYDITIDEPIWGDYQGYQIATTPPPSSGGIFLLQMLKILDDFNLSQYDVRSWEKYQLLAETMHLSYADRASYAGDPEFVNVPLKGLLHPDYIKERQQLINLDQVNKKPKAGDPWKYQEGSANYKQVEQPKDKVEGQTTHFTVADRWGNVVSYTTTIEQLFGTGIMVPDYGVILNNELTDFDAIPGGANEVQPNKRPLSSMTPTILFKDDKPVLTVGSPGGATIISSVLQTILYHIEYGMGLKAAVEEPRIYTTSMSSYRYEDGVPKDVLSKLNGMGHRFGTSPVDIGNVQSISIDHENGTFKGVVISGSNDAAIGINLKRK

SEQ ID NO: 1263 - protein, 587 aa, Bacillus subtilis
MKRTWNVCLTALLSVLLVAGSVPFHAEAKKPPKSYDEYKQVDVGKDGMVATAHPLASEIGADVLKKGGNAIDAAVAIQFALNVTEPMMSGIGGGGFMMVYDGKTKDTTIIDSRERAPAGATPDMFLDENGKAIPFSERVTKGTAVGVPGTLKGLEEALDKWGTRSMKQLITPSIKLAEKGFPIDSVLAEAISDYQEKLSRTAAKDVFLPNGEPLKEGDTLIQKDLAKTFKLIRSKGTDAFYKGKFAKTLSDTVQDFGGSMTEKDLENYDITIDEPIWGDYQGYQIATTPPPSSGGIFLLQMLKILDHFNLSQYDVRSWEKYQLLAETMHLSYADRASYAGDPEFVNVPLKGLLHPDYIKERQQLINLDQVNKKPKAGDPWKYQEGSANYKQVEQPKDKVEGQTTHFTVADRWGNVVSYTTTIEQLFGTGIMVPDYGVILNNELTDFDAIPGGANEVQPNKRPLSSMTPTILFKDDKPVLTVGSPGGATIISSVLQTILYHIEYGMELKAAVEEPRIYTNSMSSYRYEDGVPKDVLSKLNGMGHKFGTSPVDIGNVQSISIDHENGTFKGVADSSRNGAAIGINLKRK

SEQ ID NO: 1264 - protein, 242 aa, Bacillus subtilis
MPYLKRVLLLLVTGLFMSLFAVTATASAQTGGSFFDPFNGYNSGFWQKADGYSNGNMFNCTWRANNVSMTSLGEMRLALTSPAYNKFDCGENRSVQTYGYGLYEVRMKPAKNTGIVSSFFTYTGPTDGTPWDEIDIEFLGKDTTKVQFNYYTNGAGNHEKIVDLGFDAANAYHTYAFDWQPNSIKWYVDGQLKHTATNQIPTTPGKIMMNLWNGTGVDEWLGSYNGVNPLYAHYDWVRYTKK

SEQ ID NO: 1265 - protein, 28 aa, Bacillus subtilis
  MOD_RES (8)..(8): Any amino acid
  MOD_RES (16)..(16): Any amino acid
  MOD_RES (21)..(21): Any amino acid
ASGGTVGXYGAWMRSXSLVSXSTITTFS

SEQ ID NO: 1266 - protein, 12 aa, Bacillus subtilis
  MOD_RES (1)..(2): Any amino acid
  MOD_RES (6)..(6): Any amino acid
XXKEIXWIFHDN

SEQ ID NO: 1267 - protein, 12 aa, Bacillus subtilis
  MOD_RES (1)..(2): Any amino acid
  MOD_RES (6)..(6): Any amino acid
XXKEIXHIFHDN

SEQ ID NO: 1268 - protein, 639 aa, Bacillus subtilis
MKKLFSYKLSFFVLAVILFWAKTYLSYKTEFNLGVKGTTQEILLIFNPFSSAVFFLGLALLAKGRKSAIIMLIIDFLMTFVLYANILFYRFFDDFLTFPNIKQSGNVGNMGDGIFSIMAGHDIFYFLDIIILIAVLIWRPELKEYKMKKRFASLVILSGIALFFINLHYAEKDRPQLLTRTFDRNYIVKYLGLYNYTIYDGVQTAQTETQRAYASSDDLTSVENYTTSHYAKPNAEYFGSAKGKNIIKIHLESFQSFLIDYKLNGEEVTPFLNKLAHGGEDVTYFDNFFHQTGQGKTSDAELTMDNSIFGLPEGSAFVTKGENTYQSLPAILDQKEGYTSAVLHGDYKSFWNRDQIYKHIGYDKFFDASTYDMSDENVINMGLKDKPFFTESIPKLESLKQPFYAHLITLTNHYPFNLDEKDASLKKATTGDNTVDSYFQTARYLDEALEQFFKELKEAGLYDNSVIMIYGDHNGISENHNRAMKEILGKEITDYQNAQNQRVPLMIRVPGKKGGVNHTYGGEIDVMPTLLHLEGIDSQKYINFGTDLFSKDHDDTVAFRNGDFVTPKYTSVDNIIYDTKTGEKLKANEETKNLKTRVNQQLSLSDSVLYKDLLRFHKLNDFKAVDPSDYHYGKEKEIK

SEQ ID NO: 1269 - protein, 649 aa, Bacillus subtilis
MKTFIKERGLAFFLIAVVLLWIKTYVGYVLNFNLGIDNTIQKILLFVNPLSSSLFFLGFGLLFKKKLQQTAIIVIHFLMSFLLYANIVYYRFFNDFITIPVIMQAKTNGGQLGDSAFSLMRPTDAFYFIDTIILIILAIKVNKPAETSSKKSFRIIFASSILVFLINLAVAESDRPELLTRSFDRNYLVKYLGTYNFTIYDAVQNIKSNSQRALADSSDVTEVENYMKANYDVPNNVYFGKAEGKNVIYVSLESLQSFIIDYKIDGKEVTPFLNKLAHDNETFYFDNFFHQTGQGKTSDAEFMMENSLYPLAQGSVFVNKAQNTLQSVPAILKSKNYTSATFHGNTQTFWNRNEMYKAEGIDKFFDSAYYDMNEENTKNYGMKDKPFFKESMPLLESLPQPFYTKFITLSNHFPFGMDEGDTDFPAGDFGDSVVDNYFQSAHYLDQSIEQFFNDLKKDGLYDKSIIVMYGDHYGISENHNKAMAKVLGKDEITDYDNAQLQRVPLFIHAAGVKGEKVHKYAGDVDVAPTILHLLGVDTKDYLMSGSDILSKEHREVIPFRNGDFISPKYTKISGKYYDTKTGKELDESEVDKSEDSLVKKELEMSDKIINGDLLRFYEPKGFKKVNPSDYDYTKHDEDSSETSKDNEDK

SEQ ID NO: 1270 - protein, 496 aa, Bacillus subtilis
MRSYIKVLTMCFLGLILFVPTALADNSVKRVGGSNRYGTAVQISKQMYSTASTAVIVGGSSYADAISAAPLAYQKNAPLLYTNSDKLSYETKTRLKEMQTKNVIIVGGTPAVSSNTANQIKSLGISIKRIAGSNRYDTAARVAKAMGATSKAVILNGFLYADAPAVIPYAAKNGYPILFTNKTSINSATTSVIKDKGISSTVVVGGTGSISNTVYNKLPSPTRISGSNRYELAANIVQKLNLSTSTVYVSNGFSYPDSIAGATLAAKKKQSLILTNGENLSTGARKIIGSKNMSNFMIIGNTPAVSTKVANQLKNPVVGETIFIDPGHGDQDSGAIGNGLLEKEVNLDIAKRVNTKLNASGALPVLSRSNDTFYSLQERVNKAASAQADLFLSIHANANDSSSPNGSETYYDTTYQAANSKRLAEQIQPKLAANLGTRDRGVKTAAFYVIKYSKMPSVLVETAFITNASDASKLKQAVYKDKAAQAIHDGTVSYYR

SEQ ID NO: 1271 - protein, 880 aa, Bacillus subtilis
MKKRLIAPMLLSAASLAFFAMSGSAQAAAYTDYSLYKVEPSNTFSTESQASQAVAKLEKDTGWDASYQASGTTTTYQISASGIHSESEAKAILSGLAKQTSITGTSSPVGSKQPYVTISSGAISGEKQANTILAKLKQETGVAGAVKAYGAAQPYMNVMTSDIADETKVKALIQSLAKQTGIKSSYQPITHTVSVTTIQSGTIVGDSRAAQIKNAFQKESGLQASLKETVKGQAYYTFTTAAISGEANAKTLLQQLKQSTGITGSYKSINQKTTVESYNVQSAYFKGLSTVKDAISQIKKNTGVSGSYQQVGKSTSYTVNMKGITKQQLQKIDTFFKKKKWHYTSSSVKKTTTSAAYQITTAKILGEQQANKAAAFFAQKKVKAAKTAAGSTAENQYQLISEETSDQAKVTKGLNILKKNQLSASAKSVKKQIADTFKITTESLLDQTKVNQALTFFKSNHISVASQKTGQTAASSYQITTEAIISQEEIDRVLTFFKQNHIAVTTSKTGQTAYTQYKIVTTQLSSKTALNNGLTYLKSKSVTPSYTTKSNTLYKISVNEQFTGNDTAAAASTKLKQLYGWTSSIVKIKNGPQIMKTNYNLSLRDMVQKQMTVSPQTDGAAYVSLTYINTATSTVTADVLNIRSTPEVSPTNVIGQFKKGDKVKVIGQINGWAKINLGWRNASSDEVVQYVDPNNFSRDSKYYFQFLKLSQTAGLSVTEVNQKVLAGKGILTGRAKAFIDAANQYSINELYLISHALLETGNGTSALANGLTYNGKTVYNMYGIGAYDSNPNYYGAKYAYEQGWFTPEAAIIGGAKFIGSSYIHNTAYNQDTLYKMRWSATATHQYATDIGWAYKQVNRMYSLYSLLDGYTLYFDVPEYR

SEQ ID NO: 1272 - protein, 334 aa, Bacillus subtilis
MKKQIITATTAVVLGSTLFAGAASAQSIKVKKGDTLWDLSRKYDTTISKIKSENHLRSDIIYVGQTLSINGKSTSSKSSSSSSSSSTYKVKSGDSLWKISKKYGMTINELKKLNGLKSDLLRVGQVLKLKGSTSSSSSSSSKVSSSSTSTYKVKSGDSLSKIASKYGTTVSKLKSLNGLKSDVIYVNQVLKVKGTSTSSSKPASSSSSSSSKTSSTSLNVSKLVSDAKALVGTPYKWGGTTTSGFDCSGFIWYVLNKQTSVGRTSTAGYWSSMKSIASPSVGDFVFFTTYKSGPSHMGIYIGNNSFIHAGSDGVQISSLNNSYWKPRYLGAKRF

SEQ ID NO: 1273 - protein, 488 aa, Bacillus subtilis
MKKKLAAGLTASAIVGTTLVVTPAEAATIKVKSGDSLWKLAQTYNTSVAALTSANHLSTTVLSIGQTLTIPGSKSSTSSSTSSSTTKKSGSSVYTVKSGDSLWLIANEFKMTVQELKKLNGLSSDLIRAGQKLKVSGTVSSSSSSSKKSNSNKSSSSSSKSSSNKSSSSSSSTGTYKVQLGDSLWKIANKVNMSIAELKVLNNLKSDTIYVNQVLKTKSSGSDTSSKDNSSKSNQTSATTKYTVKSGDSLWKIANNYNLTVQQIRNINNLKSDVLYVGQVLKLTGKASSGSSSSSSSSSNASSGTTTTYTVKSGDSLWVIAQKFNVTAQQIREKNNLKTDVLQVGQKLVISGKASSSSSSGSSNTTSSTSAKINTMISAAKAQLGVPYRWGGTTPSGFDCSGFIYYVLNKVTSVSRLTAAGYWNTMKSVSQPAVGDFVFFSTYKAGPSHVGIYLGNGEFINANDSGVVISNMNNSYWKQRYLGAKRYF

SEQ ID NO: 1274 - protein, 282 aa, Bacillus subtilis
MARKKLKKRKLLISLFFLVSIPLALFVLATTLSKPIEISKETEEIDEQQVFIDSLSGHAQILYEKYHVLPSITIAQAILESDWGNSELAAKANNLFGVKGNYKGHHVTMETDEVEKGKRKTIRAKFRKYSTFFESMDDHAQLFVRGTSWNKKKYKPVLEAGNYKEAATALQTSGYATDPDYADKISAIVEKYDLDEYDEVNPSLKSVDLNASIKDSAVQDVWSKPSTDDRSIRLTSAQSYVGKDIKVVSKKQKGQSVWYQFQINDKLIGWIDDSAVEIKEAT

SEQ ID NO: 1275 - protein, 362 aa, Bacillus subtilis
MFKKHTISLLIIFLLASAVLAKPIEAHTVSPVNPNAQQTTKTVMNWLAHLPNRTENRVLSGAFGGYSHDTFSMAEADRIRSATGQSPAIYGCDYARGWLETANIEDSIDVSCNGDLMSYWKNGGIPQISLHLANPAFQSGHFKTPITNDQYKKILDSSTVEGKRLNAMLSKIADGLQELENQGVPVLFRPLHEMNGEWFWWGLTSYNQKDNERISLYKQLYKKIYHYMTDTRGLDHLIWVYSPDANRDFKTDFYPGASYVDIVGLDAYFQDAYSINGYDQLTALNKPFAFTEVGPQTANGSFDYSLFINAIKQKYPKTIYFLAWNDEWSAAVNKGASALYHDSWTLNKGEIWNGDSLTPIVE

SEQ ID NO: 1276 - protein, 360 aa, Bacillus subtilis
MLKKLAVCLSIVLLLLGAASPISAHTVYPVNPNAQQTTKDIMNWLAHLPNRSENRVMSGAFGGYSDVTFSMTEENRLKNATGQSPAIYGCDYGRGWLETADITDTIDYCCNSSLISYWKSGGLPQVSLHLANPAFPSGNYKTAISNSQYKNILDPSTVEGKRLEALLSKIADGLTQLKNQGVTVLFRPLHEMNGEWFWWGLTGYNQKDNERISLYKELYKKIYRYMTETRGLDNLLWVYSPDANRDFKTDFYPGSSYVDITGLDAYFTDPYAISGYDEMLSLKKPFAFAETGPSGNIGSFDYAAFINAIRQKYPQTTYFLTWDEQLSPAANQGAQSLYQNSWTLNKGEIWNGGSLTPIAE

SEQ ID NO: 1277 - protein, 313 aa, Bacillus subtilis
MKLVPRFRKQWFAYLTVLCLALAAAVSFGVPAKAAENPQTSVSNTGKEADATKNQTSKADQVSAPYEGTGKTSKSLYGGQTELEKNIQTLQPSSIIGTDERTRISSTTSFPYRATVQLSIKYPNTSSTYGCTGFLVNPNTVVTAGHCVYSQDHGWASTITAAPGRNGSSYPYGTYSGTMFYSVKGWTESKDTNYDYGAIKLNGSPGNTVGWYGYRTTNSSSPVGLSSSVTGFPCDKTFGTMWSDTKPIRSAETYKLTYTTDTYGCQSGSPVYRNYSDTGQTAIAIHTNGGSSYNLGTRVTNDVFNNIQYWANQ

SEQ ID NO: 1278 - protein, 538 aa, Bacillus subtilis
MRNLTKTSLLLAGLCTAAQMVFVTHASAEESIEYDHTYQTPSYIIEKSPQKPVQNTTQKESLFSYLDKHQTQFKLKGNANSHFRVSKTIKDPKTKQTFFKLTEVYKGIPIYGFEQAVAMKENKQVKSFFGKVHPQIKDVSVTPSISEKKAIHTARRELEASIGKIEYLDGEPKGELYIYPHDGEYDLAYLVRLSTSEPEPGYWHYFIDAKNGKVIESFNAIHEAAGTGIGVSGDEKSFDVTEQNGRFYLADETRGKGINTFDAKNLNETLFTLLSQLIGYTGKEIVSGTSVFNEPAAVDAHANAQAVYDYYSKTFGRDSFDQNGARITSTVHVGKQWNNAAWNGVQMVYGDGDGSKFKPLSGSLDIVAHEITHAVTQYSAGLLYQGEPGALNESISDIMGAMADRDDWEIGEDVYTPGIAGDSLRSLEDPSKQGNPDHYSNRYTGTEDYGGVHINSSIHNKAAYLLAEGGVHHGVQVEGIGREASEQIYYRALTYYVTASTDFSMMKQAAIEAANDLYGEGSKQSASVEKAYEAVGIL

SEQ ID NO: 1279 - protein, 521 aa, Bacillus subtilis
MGLGKKLSVAVAASFMSLSISLPGVQAAEGHQLKENQTNFLSKNAIAQSELSAPNDKAVKQFLKKNSNIFKGDPSKRLKLVESTTDALGYKHFRYAPVVNGVPIKDSQVIVHVDKSDNVYAVNGELHNQSAAKTDNSQKVSSEKALALAFKAIGKSPDAVSNGAAKNSNKAELKAIETKDGSYRLAYDVTIRYVEPEPANWEVLVDAETGSILKQQNKVEHAAATGSGTTLKGATVPLNISYEGGKYVLRDLSKPTGTQIITYDLQNRQSRLPGTLVSSTTKTFTSSSQRAAVDAHYNLGKVYDYFYSNFKRNSYDNKGSKIVSSVHYGTQYNNAAWTGDQMIYGDGDGSFFSPLSGSLDVTAHEMTHGVTQETANLIYENQPGALNESFSDVFGYFNDTEDWDIGEDITVSQPALRSLSNPTKYNQPDNYANYRNLPNTDEGDYGGVHTNSGIPNKAAYNTITKLGVSKSQQIYYRALTTYLTPSSTFKDAKAALIQSARDLYGSTDAAKVEAAWNAVGL

SEQ ID NO: 1280 - protein, 521 aa, Bacillus subtilis; identical to SEQ ID NO: 1279

SEQ ID NO: 1281 - protein, 1462 aa, Bacillus subtilis
MRIQKRRTHVENILRILLPPIMILSLILPTPPIHAEESAAPQVHLSILATTDIHANMMDYDYYSDKETADFGLARTAQLIQKHREQNPNTLLVDNGDLIQGNPLGEYAVKYQKDDIISGTKTHPIISVMNALKYDAGTLGNHEFNYGLDFLDGTIKGADFPIVNANVKTTSGENRYTPYVINEKTLIDENGNEQKVKVGYIGFVPPQIMTWDKKNLEGQVQVQDIVESANETIPKMKAEGADVIIALAHTGIEKQAQSSGAENAVFDLATKTKGIDAIISGHQHGLFPSAEYAGVAQFNVEKGTINGIPVVMPSSWGKYLGVIDLKLEKADGSWKVADSKGSIESIAGNVTSRNETVTNTIQQTHQNTLEYVRKPVGKTEADINSFFAQVKDDPSIQIVTDAQKWYAEKEMKDTEYKNLPILSAGAPFKAGGRNGANYYTNIPAGDLAIKNVGDLYLYDNTVQIVKLTGSEVKDWLEMSAGQFNQIDPAKGGDQALLNENFRSYNFDVIDGVTYQVDVTKPAKYNENGKVINADSSRIINLSYEGKPISPSQEFLVVTNNYRASGGGGFPHLTSDKIVHGSAVENRQVLMDYIIEQKTVNPKADNNWSIAPVSGTNLTFESSLLAKPFADKADDVAYVGKSANEGYGVYKLQFDDDSNPDPPKDGLWDLTVMHTNDTHAHLDDAARRMTKINEVRSETNHNILLDAGDVFSGDLYFTKWNGLADLKMMNMMGYDAMTFGNHEFDKGPTVLSDFLSGNSATVDPANRYHFEAPEFPIVSANVDVSNEPKLKSFVKKPQTFTAGEKKEAGIHPYILLDVDGEKVAVFGLTTEDTATTSSPGKSIVFNDAFETAQNTVKAIQEEEKVNKIIALTHIGHNRDLELAKKVKGIDLIIGGHTHTLVDKMEVVNNEEPTIVAQAKEYGQFLGRVDVAFDEKGVVQTDKSNLSVLPIDEHTEENPEAKQELDQFKNELEDVKNEKVGYTDVALDGQREHVRTKETNLGNFIADGMLAKAKEAAGARIAITNGGGIRAGIDKGDITLGEVLNVMPFGNTLYVADLTGKQIKEALEQGLSNVENGGGAFPQVAGIEYTFTLNNKPGHRVLEVKIESPNGDKVAINTDDTYRVATNNFVGAGGDGYSVFTEASHGEDLGYVDYEIFTEQLKKLGNKVSPKVEGRIKEVFLPTKQKDGSWTLDEDKFAIYAKNANTPFVYYGIHEGSQEKPINLKVKKDQVKLLKERESDPSLTMFNYWYSMKMPMANLKTADTAIGIKSTGELDVSLSDVYDFTVKQKGKEIKSFKEPVQLSLRMFDIEEAHNPAIYHVDRKKKAFTKTGHGSVDDDMVTGYTNHFSEYTILNSGSNNKPPAFPSDQPTGGDDGNHGGGSDKPGGKQPTDGNGGNDTPPGTQPTNGSGGNGSGGSGTDGPAGGLLPDTATSMYSILLAGFLISALGTAMYLHQRRKQNRANQA

SEQ ID NO: 1282 - protein, 136 aa, Bacillus subtilis
MKKWMAGLFLAAAVLLCLMVPQQIQGASSYDKVLYFPLSRYPETGSHIRDAIAEGHPDICTIDRDGADKRREESLKGIPTKPGYDRDEWPMAVCEEGGAGADVRYVTPSDNRGAGSWVGNQMSSYPDGTRVLFIVQ

SEQ ID NO: 1283 - protein, 345 aa, Bacillus subtilis
MKRLCLWFTVFSLFLVLLPGKALGAVDFPNTSTNGLLGFAGNAKNEKGISKTGTTGGKNGQIVYIQSVNDLKTHLGGSTPKILVLQNDLSASAKTTVTIGSNKTLVGSYAKKTLKNIYLTTSSAFGNVIFQNLTFEHSPQINGNNDIQLYLDSGMNYWIDHVTFSGHSYNASGSDLDKLVYIGKSADYITISNSKFANHKYGLILGYPDDSQHQYDGYPHMTIANNYFENLYVRGPGLMRYGYFHVKNNYSNNFNQAITIATKAKIYSEYNYFGKGSEKGGILDDKGTGYFKDIGSYPSLNKQTSPLTSWNPGSNYSYRVQTPEYTKEFVTKYAGSQSTTLVFGY

SEQ ID NO: 1284 - protein, 345 aa, Bacillus subtilis
MKRFCLWFAVFSLLLVLLPGKAFGAVDFPNTSTNGLLGFAGNAKNEKGISKASTTGGKNGQIVYIQSVNDLKTHLGGSTPKILVLQNDISASSKTTVTIGSNKTLVGSYAKKTLKNIYLTTSSASGNVIFQNLTFEHSPQINGNNDIQLYLDSGINYWIDHVTFSGHSYSASGSDLDKLLYVGKSADYITISNSKFANHKYGLILGYPDDSQHQYDGYPHMTIANNYFENLYVRGPGLMRYGYFHVKNNYSNNFNQAITIATKAKIYSEYNYFGKGSEKGGILDDKGTGYFKDTGSYPSLNKQTSPLTSWNPGSNYSYRVQTPQYTKDFVTKYAGSQSTTLVFGY

SEQ ID NO: 1285 - protein, 413 aa, Bacillus subtilis
MNTLANWKKFLLVAVIICFLVPIMTKAEIAEADTSSELIVSEAKNLLGYQYKYGGETPKEGFDPSGLIQYVFSKADIHLPRSVNDQYKIGTAVKPENLKPGDILFFKKEGSTGTVPTHDALYIGDGQMVHSTQSKGVIITNYKKSSYWSGTYIGARRIAADPATADVPVVQEAEKYIGVPYVFGGSTPSEGFDCSGLVQYVFQQALGIYLPRSAEQQWAVGEKVAPQNIKPGDVVYFSNTYKTGISHAGIYAGAGRFIQASRSEKVTISYLSEDYWKSKMTGIRRFDNLTIPKENPIVSEATLYVGEVPYKQGGVTPETGFDTAGFVQYVYQKAAGISLPRYATSQYNAGTKIEKADLKPGDIVFFQSTSLNPSIYIGNGQVVHVTLSNGVTITNMNTSTYWKDKYAGSIRVQ

SEQ ID NO: 1286 - protein, 57 aa, Bacillus subtilis
MPIKKKVMMCLAVTLVFGSMSFPTLTNSGGFKESTDRNTTYIDHSPYKLSDQKKALS

SEQ ID NO: 1287 - protein, 383 aa, Bacillus subtilis
MNHSKTLLLTAAAGLMLTCGAVSSQAKHKLSDPYHFTVNAAAETEPVDTAGDAADDPAIWLDPKTPQNSKLITTNKKSGLVVYSLDGKMLHSYNTGKLNNVDIRYDFPLNGKKVDIAAASNRSEGKNTIEIYAIDGKNGTLQSMTDPDHPIATAINEVYGFTLYHSQKTGKYYAMVTGKEGEFEQYELKADKNGYISGKKVRAFKMNSQTEGMAADDEYGRLYIAEEDEAIWKFSAEPDGGSNGTVIDRADGRHLTRDIEGLTIYYAADGKGYLMASSQGNSSYAIYDRQGKNKYVADFRITDGPETDGTSDTDGIDVLGFGLGPEYPFGIFVAQDGENIDHGQKANQNFKIVPWERIADQIGFRPLANEQVDPRKLTDRSGK

SEQ ID NO: 1288 - protein, 382 aa, Bacillus subtilis
MKVPKTMLLSTAAGLLLSLTATSVSAHYVNEEHHFKVTAHTETDPVASGDDAADDPAIWVHEKHPEKSKLITTNKKSGLVVYDLDGKQLHSYEFGKLNNVDLRYDFPLNGEKIDIAAASNRSEGKNTIEVYAIDGDKGKLKSITDPNHPISTNISEVYGFSLYHSQKTGAFYALVTGKQGEFEQYEIVDGGKGYVTGKKVREFKLNSQTEGLVADDEYGNLYIAEEDEAIWKFNAEPGGGSKGQVVDRATGDHLTADIEGLTIYYAPNGKGYLMASSQGNNSYAMYERQGKNRYVANFEITDGEKIDGTSDTDGIDVLGFGLGPKYPYGIFVAQDGENIDNGQAVNQNFKIVSWEQIAQHLGEMPDLHKQVNPRKLKDRSDG

SEQ ID NO: 1289 - protein, 221 aa, Bacillus subtilis
MKKIVSILFMFGLVMGFSQFQPSTVFAADKVVHETIIVPKNTTYDGKGQRFVAGKELGDGSQSENQDPVFRVEDGATLKNVVLGAPAADGVHTYGNVNIQNVKWEDVGEDALTVKKEGKVTIDGGSAQKASDKIFQINKASTFTVKNFTADNGGKFIRQLGGSTFHVDVIIDKCTITNMKEAIFRTDSKTSTVRMTNTRYSNVGQKWIGVQHIYENNNTQF

SEQ ID NO: 1290 - protein, 420 aa, Bacillus subtilis
MKKVMLATALFLGLTPAGANAADLGHQTLGSNDGWGAYSTGTTGGSKASSSNVYTVSNRNQLVSALGKETNTTPKIIYIKGTIDMNVDDNLKPLGLNDYKDPEYDLDKYLKAYDPSTWGKKEPSGTQEEARARSQKNQKARVMVDIPANTTIVGSGTNAKVVGGNFQIKSDNVIIRNIEFQDAYDYFPQWDPTDGSSGNWNSQYDNITINGGTHIWIDHCTFNDGSRPDSTSPKYYGRKYQHHDGQTDASNGANYITMSYNYYHDHDKSSIFGSSDSKTSDDGKLKITLHHNRYKNIVQRAPRVRFGQVHVYNNYYEGSTSSSSYPFSYAWGIGKSSKIYAQNNVIDVPGLSAAKTISVFSGGTALYDSGTLLNGTQINASAANGLSSSVGWTPSLHGSIDASANVKSNVINQAGAGKLN

SEQ ID NO: 1291 - protein, 473 aa, Bacillus subtilis
MNIKKFAKQATVLTFTTALLAGGATQAFAKETNQKPYKETYGISHITRHDMLQIPEQQKNEKYQVPEFDSSTIKNISSAKGLDVWDSWPLQNADGTVANYHGYHIVFALAGDPKNADDTSIYMFYQKVGETSIDSWKNAGRVFKDSDKFDANDSILKDQTQEWSGSATFTSDGKIRLFYTDFSGKHYGKQTLTTAQVNVSASDSSLNINGVEDYKSIFDGDGKTYQNVQQFIDEGNYSSGDNHTLRDPHYVEDKGHKYLVFEANTGTEDGYQGEESLFNKAYYGKSTSFFRQESQKLLQSDKKRTAELANGALGMIELNDDYTLKKVMKPLIASNTVTDEIERANVFKMNGKWYLFTDSRGSKMTIDGITSNDIYMLGYVSNSLTGPYKPLNKTGLVLKMDLDPNDVTFTYSHFAVPQAKGNNVVITSYMTNRGFYADKQSTFAPSFLLNIKGKKTSVVKDSILEQGQLTVNK

SEQ ID NO: 1292 - protein, 677 aa, Bacillus subtilis
MKKRLIQVMIMFTLLLTMAFSADAADSSYYDEDYRPQYHFTPEANWMNDPNGMVYYAGEYHLFYQYHPYGLQWGPMHWGHAVSKDLVTWEHLPVALYPDEKGTIFSGSAVVDKNNTSGFQTGKEKPLVAIYTQDREGHQVQSIAYSNDKGRTWTKYAGNPVIPNPGKKDFRDPKVFWYEKEKKWVMVLAAGDRILIYTSKNLKQWTYASEFGQDQGSHGGVWECPDLFELPVDGNPNQKKWVMQVSVGNGAVSGGSGMQYFVGDFDGTHFKNENPPNKVLWTDYGRDFYAAVSWSDIPSTDSRRLWLGWMSNWQYANDVPTSPWRSATSIPRELKLKAFTEGVRVVQTPVKELETIRGTSKKWKNLTISPASHNVLAGQSGDAYEINAEFKVSPGSAAEFGFKVRTGENQFTKVGYDRRNAKLFVDRSESGNDTFNPAFNTGKETAPLKPVNGKVKLRIFVDRSSVEVFGNDGKQVITDIILPDRSSKGLELYAANGGVKVKSLTIHPLKKVWGTTPFMSNMTGWTTVNGTWADTIEGKQGRSDGDSFILSSASGSDFTYESDITIKDGNGRGAGALMFRSDKDAKNGYLANVDAKHDLVKFFKFENGAASVIAEYKTPIDVNKKYHLKTEAEGDRFKIYLDDRLVIDAHDSVFSEGQFGLNVWDATAVFQNVTKES

SEQ ID NO: 1293 - protein, 43 aa, Bacillus subtilis
MKKAVIVENKGCATCSIGAACLVDGPIPDFEIAGATGLFGLWG

SEQ ID NO: 1294 - protein, 203 aa, Bacillus subtilis
MKSKLLRLLIVSMVTILVFSLVGLSKESSTSAKENHTFSGEDYFRGLLFGQGEVGKLISNDLDPKLVKEANSTEGKKLVNDVVKFIKKDQPQYMDELKQSIDSKDPKKLIENMTKADQLIQKYAKKNENVKYSSNKVTPSCGLYAVCVAAGYLYVVGVNAVALQTAAAVTTAVWKYVAKYSSSASNNSDLEAAAAKTLKLIHQ

SEQ ID NO: 1295 - protein, 55 aa, Bacillus subtilis
MKRNQKEWESVSKKGLMKPGGTSIVKAAGCMGCWASKSIAMTRVCALPHPAMRAI

SEQ ID NO: 1296 - protein, 264 aa, Bacillus subtilis
MSHRADEIRKRLEKRRKQLSGSKRFSTQTVSEKQKPPSWVMVTDQEKHGTLPVYEDNMPTFNGKHPLVKTDSIILKCLLSACLVLVSAIAYKTNIGPVSQIKPAVAKTFETEFQFASASHWFETKFGNPLAFLAPEHKNKEQQIEVGKDLIAPASGKVQQDFQDNGEGIKVETSSDKIDSVKEGYVVEVSKDSQTGLTVKVQHADNTYSIYGELKDVDVALYDFVDKGKKLGSIKLDDHNKGVYYFAMKDGDKFIDPIQVISFE

SEQ ID NO: 1297 - protein, 288 aa, Bacillus subtilis
MNKWLDLILKIHVHPFLWIIAALGLLTGHMKALLCLLLIVLIHELGHAALAVFFSWRIKRVFLLPFGGTVEVEEHGNRPLKEEFAVIIAGPLQHIWLQFAAWMLAEVSVIHQHTFELFTFYNLSILFVNLLPIWPLDGGKLLFLLFSKQLPFQKAHRLNLKTSLCFCLLLGCWVLFVIPLQISAWVLFVFLAVSLFEEYRQRHYIHVRFLLERYYGKNRELEKLLPLTVKAEDKVYHVMAEFKRGCKHPIIIEKSGQKLSQLDENEVLHAYFADKRTNSSMEELLLPY

SEQ ID NO: 1298 - protein, 165 aa, Bacillus subtilis
MLTKRLLTIYIMLLGLIAWFPGAAQAEEKQPAVPAVFLMKTIEGEDISIPNKGQKTILHFWTSWCPPCKKELPQFQSFYDAHPSDSVKLVTVNLVNSEQNQQVVEDFIKANKLTFPIVLDSKGELMKEYHIITIPTSFLLNEKGEIEKTKIGPMTAEQLKEWTEE

SEQ ID NO: 1299 - protein, 645 aa, Bacillus subtilis
MKNMSCKLVVSVTLFFSFLTIGPLAHAQNSSEKEVIVVYKNKAGKETILDSDADVEQQYKHLPAVAVTADQETVKELKQDPDILYVENNVSFTAADSTDFKVLSDGTDTSDNFEQWNLEPIQVKQAWKAGLTGKNIKIAVIDSGISPHDDLSIAGGYSAVSYTSSYKDDNGHGTHVAGIIGAKHNGYGIDGIAPEAQIYAVKALDQNGSGDLQSLLQGIDWSIANRMDIVNMSLGTTSDSKILHDAVNKAYEQGVLLVAASGNDGNGKPVNYPAAYSSVVAVSATNEKNQLASFSTTGDEVEFSAPGTNITSTYLNQYYATGSGTSQATPHAAAMFALLKQRDPAETNVQLREEMRKNIVDLGTAGRDQQFGYGLIQYKAQATDSAYAAAEQAVKKAEQTKAQIDINKARELISQLPNSDAKTALHKRLDKVQSYRNVKDAKDKVAKAEKYKTQQTVDTAQTAINKLPNGTDKKNLQKRLDQVKRYIASKQAKDKVAKAEKSKKKTDVDSAQSAIGKLPASSEKTSLQKRLNKVKSTNLKTAQQSVSAAEKKSTDANAAKAQSAVNQLQAGKDKTALQKRLDKVKKKVAAAEAKKVETAKAKVKKAEKDKTKKSKTSAQSAVNQLKASNEKTKLQKRLNAVKPKK

SEQ ID NO: 1300 - protein, 1433 aa, Bacillus subtilis
MRKKTKNRLISSVLSTVVISSLLFPGAAGASSKVTSPSVKKELQSAESIQNKISSSLKKSFKKKEKTTFLIKFKDLANPEKAAKAAVKKAKSKKLSAAKTEYQKRSAVVSSLKVTADESQQDVLKYLNTQKDKGNADQIHSYYVVNGIAVHASKEVMEKVVQFPEVEKVLPNEKRQLFKSSSPFNMKKAQKAIKATDGVEWNVDQIDAPKAWALGYDGTGTVVASIDTGVEWNHPALKEKYRGYNPENPNEPENEMNWYDAVAGEASPYDDLAHGTHVTGTMVGSEPDGTNQIGVAPGAKWIAVKAFSEDGGTDADILEAGEWVLAPKDAEGNPHPEMAPDVVNNSWGGGSGLDEWYRDMVNAWRAADIFPEFSAGNTDLFIPGGPGSIANPANYPESFATGATDINKKLADFSLQGPSPYDEIKPEISAPGVNIRSSVPGQTYEDGWDGTSMAGPHVSAVAALLKQANASLSVDEMEDILTSTAEPLTDSTFPDSPNNGYGHGLVNAFDAVSAVTDGLGKAEGQVSVEGDDQEPPVYQHEKVTEAYEGGSLPLTLTAEDNVSVTSVKLSYKLDQGEWTEITAKRISGDHLKGTYQAEIPDIKGTKLSYKWMIHDFGGHVVSSDVYDVTVKPSITAGYKQDFETAPGGWVASGTNNNWEWGVPSTGPNTAASGEKVYGTNLTGNYANSANMNLVMPPIKAPDSGSLFLQFKSWHNLEDDFDYGYVFVLPEGEKNWEQAGVYNGKTSSWTDEEIDLSAYKGQNIQVMFNLQSDESIAKEGWYIDDVVLSDKSAGKTVKKNKLGVEKPSGKQKKKPVNPKKAKPSANTAVKHQNKAIQPQVLPLKAQVSVVETGKSTYSDQSTGQYTLKHKAGDYTLMAEAYGYQSKTQKVSLKTDQTTQANFTLEEMKKGTLKGTVINKTTGEPVTGASVYVVEDAAVEPAMTNDKGEYMLEAYEGAYTIKVAAPGYYSDEFSVELKGDVTKETALKPFVGYPGEIAYDDGTAENANSYFAAGNGWAVKMTLADGKDKGMLTGGLFRFWDTEFPDPGGTEFKVEVYDATGKDGAPGKKIAGPFNAEALRNGEWTKVDLSSKGIMVDKDFYLVYIQSKPDPYSPGLAMDETGQNSGRNWQYIDGKWQPGDKADGNYMIRALVDYEAAVPEITSPTDKSYTNKDSVTVKGNASPGTTVHIYNGEKEAGETKAAADGTFHAGIILNKGENELTATASTDNGTTDASSPITVTLDQEKPELTLDNPKDGGKTNKETLTVKGAVSDDNLKDVKVNGKKATVADGSYSARILLENGRNEIKVIATDLAGNKTTKKTVIDVNFDKPVISGLIPGEDKNLKAGESVKIAFSSAEDLDATFTIRMPLTNARASVQNATELPLREISPGRYEGYWTATSSIKAKGAKVEVIVRDDYGNETRKTANGKLNMNTEN

SEQ ID NO: 1301 - protein, 381 aa, Bacillus subtilis
MRSKKLWISLLFALTLIFTMAFSNMSAQAAGKSSTEKKYIVGFKQTMSAMSSAKKKDVISEKGGKVQKQFKYVNAAAATLDEKAVKELKKDPSVAYVEEDHIAHEYAQSVPYGISQIKAPALHSQGYTGSNVKVAVIDSGIDSSHPDLNVRGGASFVPSETNPYQDGSSHGTHVAGTIAALNNSIGVLGVAPSASLYAVKVLDSTGSGQYSWIINGIEWAISNNMDVINMSLGGPTGSTALKTVVDKAVSSGIVVAAAAGNEGSSGSTSTVGYPAKYPSTIAVGAVNSSNQRASFSSVGSELDVMAPGVSIQSTLPGGTYGAYNGTSMATPHVAGAAALILSKHPTWTNAQVRDRLESTATYLGNSFYYGKGLINVQAAAQ

SEQ ID NO: 1302 - protein, 381 aa, Bacillus subtilis
MRSKKLWISLLFALTLIFTMAFSNMSAQAAGKSSTEKKYIVGFKQTMSAMSSAKKKDVISEKGGKVQKQFKYVNAAAATLDEKAVKELKKDPSVAYVEEDHIAHEYAQSVPYGISQIKAPALHSQGYTGSNVKVAVIDSGIDSSHPDLNVRGGASFVPSETNPYQDGSSHGTHVAGTIAALNNSIGVLGVSPSASLYAVKVLDSTGSGQYSWIINGIEWAISNNMDVINMSLGGPSGSTALKTVVDKAVSSGIVVAAAAGNEGSSGSSSTVGYPAKYPSTIAVGAVNSSNQRASFSSAGSELDVMAPGVSIQSTLPGGTYGAYNGTSMATPHVAGAAALILSKHPTWTNAQVRDRLESTATYLGNSFYYGKGLINVQAAAQ

SEQ ID NO: 1303 - protein, 381 aa, Bacillus subtilis
MRSKKLWISLLFALTLIFTMAFSNMSAQAAGKSSTEKKYIVGFKQTMSAMSSAKKKDVISEKGGKVQKQFKYVNAAAATLDEKAVKELKKDPSVAYVEEDHIAHEYAQSVPYGISQIKAPALHSQGYTGSNVKVAVIDSGIDSSHPDLNVRGGASFVPSETNPYQDGSSHGTHVAGTIAALNNSIGVLGVAPSASLYAVKVLDSTGSGQYSWIINGIEWAISNNMDVINMSLGGPTGSTALKTVVDKAVSSGIVVAAAAGNEGSSGSTSTVGYPAKYPSTIAVGAVNSSNQRASFSSAGSELDVMAPGVSIQSTLPGGTYGAYNGTSMATPHVAGAAALILSKHPTWTNAQVRDRLESTATYLGNSFYYGKGLINVQAAAQ

SEQ ID NO: 1304 - protein, 806 aa, Bacillus subtilis
MKKGIIRFLLVSFVLFFALSTGITGVQAAPASSKTSADLEKAEVFGDIDMTTSKKTTVIVELKEKSLAEAKEAGESQSKSKLKTARTKAKNKAIKAVKNGKVNREYEQVFSGFSMKLPANEIPKLLAVKDVKAVYPNVTYKTDNMKDKDVTISEDAVSPQMDDSAPYIGANDAWDLGYTGKGIKVAIIDTGVEYNHPDLKKNFGQYKGYDFVDNDYDPKETPTGDPRGEATDHGTHVAGTVAANGTIKGVAPDATLLAYRVLGPGGSGTTENVIAGVERAVQDGADVMNLSLGNSLNNPDWATSTALDWAMSEGVVAVTSNGNSGPNGWTVGSPGTSREAISVGATQLPLNEYAVTFGSYSSAKVMGYNKEDDVKALNNKEVELVEAGIGEAKDFEGKDLTGKVAVVKRGSIAFVDKADNAKKAGAIGMVVYNNLSGEIEANVPGMSVPTIKLSLEDGEKLVSALKAGETKTTFKLTVSKALGEQVADFSSRGPVMDTWMIKPDISAPGVNIVSTIPTHDPDHPYGYGSKQGTSMASPHIAGAVAVIKQAKPKWSVEQIKAAIMNTAVTLKDSDGEVYPHNAQGAGSARIMNAIKADSLVSPGSYSYGTFLKENGNETKNETFTIENQSSIRKSYTLEYSFNGSGISTSGTSRVVIPAHQTGKATAKVKVNTKKTKAGTYEGTVIVREGGKTVAKVPTLLIVKEPDYPRVTSVSVSEGSVQGTYQIETYLPAGAEELAFLVYDSNLDFAGQAGIYKNQDKGYQYFDWDGTINGGTKLPAGEYYLLAYAANKGKSSQVLTEEPFTVE

SEQ ID NO: 1305 - protein, 56 aa, Bacillus subtilis
MEKLFKEVKLEELENQKGSGLGKAQCAALWLQCASGGTIGCGGGAVACQNYRQFCR

SEQ ID NO: 1306 - protein, 256 aa, Bacillus subtilis
MQTETIHNIPYVNSNLTSFIDYLEKHYIDQKIGAVISTVNPEIAFAAIKDRDYFDVLSSSNFILPDGIGVVMMSRLTNNRLQSRIAGYDVFKELLGVANKKKKRIFLYGAKKDVIKGVVSKISSEYPNIKIAGYSDGYVQDRTLVAKQIARANPDMVFVALGYPHQEKFIHNYRHLFPKAVSIGLGGSFDVFSGNVKRAPSWMIRLNLEWFYRLILNPWRWKRMLSIPKYALTVLKEEKNKKTFYPKPEKDHTKQI

SEQ ID NO: 1307 - protein, 257 aa, Bacillus subtilis
MQTKPINQLDFVDSELTSFVSHLETTYLDQNKGAFIVTANPEIGFEAMQNPRYEAVLSSADFILPDGIGVVMVSKLIGKPLQSRIAGYDLFTSLLDKADQKKKRVFFYGAAKHVIAETIERVKRDFPGIEIAGYSDGYVKDQREVADKIAASTPDMVFVALGYPNQEFFIHKYRHLFPQAVAVGLGGSFDVFSGNVKRAPSFFIRFHLEWMYRLLTNPARWRRMLSIPKYVTAVLKHERASAKPHYTGQVKDQSRHL

SEQ ID NO: 1308 - protein, 2334 aa, Bacillus subtilis
MKKRKRRNFKRFIAAFLVLALMISLVPADVLAKSTEEENGNRIAADDPEETLQKEQTEEAVPFDPKDINKEGEITSERTENTKLYYEGDGVYKQEVYLDPIHTKETPDADWEDISPELKESTSKQVETENAILNSDFQKQMKNGLYATFEHNDHKVTYSLAEAKGPNKTSLTPKDTSADYKTDSNEIVYPDVFPNIDLQTFTFNENIKEDLVLHQYNGYNTFTFQLKTDLQAKEQEDGSIDFSDEKGKVVFSVPKPFMTDSKLDELSGEVERSDKVSYKLEKNEEGYLLHLTADENWLKDPERVYPVSIDPSTSLSVSSDTFVMSAYPTTNYSASSQKWDANLKAYVLKTGYYDKTTGTNYAFMKFNNLKPIQNMTVTKATLKTYVAHSYYGTKATGLWLDTVNSNYDNAKVTWNTKPASKNIGKADVHKGQWASYDVTAAVKSWNSGGANYGFKLHTNGNGKEYWKKLISSANSANKPYIEVTYTIPKGNTPTIKAYHNGDSTGYFDISWKKVEGAKGYKVWIYNGKEYQAISAGNVTSWSTKGKKIWPTSAEIASKRYKLHLDGKDGAELALDPSPVYKNSGGSYATSKNYWIGVSAIFDQGEGAMSAPAKPVIPNVGKAQAPSAKGYNNGNATGYFDLSWKAVSGATGYKVQVFNGKGFETLDLGNQTSWTTKGKKIWPTSAEIKAGKYALHLKDGSGAELPINPGPTYKNAGGDGAKRNYSFKIIAYNKDGEAIASPAATPALPDIARPKNVTGYLYTNTKSSQTGYVNLIWEKVQNAKGYKVNIYNGKEYQSFDVGDADHWTTQNKNIWPTSEEIKAGSYKLHTDGKGGELALDPSPVYNNANGNYKGKKNYSFTLVAYDANGETIPTAPFNPTFHEGAEFLGTEEYWSIIDIPSGQLNGATGNVIVNEEDLSIDGRGPGLGLSRTYNSLDSSDHLFGQGWYADAETSVISTDGGAMYIDEDATTHRFTKKADGTYQPPTGVYLELTETADQFILKTKDQTNAYFNKKGGKLQKVVDGHNNATVYTYNDKNQLTAITDASGRKLTFTYDENGHVTSITGPKNKKVTYSYENDLLKKVTDTDGTVTSYDYDSEGRLVKQYSANSTEAKPVFTEYQYSGHRLEKAINAKKETYVYSYDADKKTLLMTQPNGRKVQYGYNEAGNPIQVIDDAEGLKITTNTKYEGNNVVEDVDPNDVGTGKATESYQYDKDGNVTSVKDAYGTETYEYNKNNDVTKMKDTEGNVTDIAYDGLDAVSETDQSGKSSSAAVYDKYGNQIQSSKDLSASTNILKDGSFEAQKSGWNLTASKDSGKISVIADKSGVLSGSKALEVLSQSTSAGTDHGYSSATQTVELEPNTTYTLSGKIKTDLAKSRAYFNIDLRDKDQKRIQWIHNEYSALAGKNDWTKRQITFTTPANAGKAVVYMEVDHKDKDGKGKAWFDEVQLEKGEVSSSYNPVQNSSFTSATENWNVSGASVDSEEGFNDDVSLKAARTSASQAGSVTKQTVVLGQSANDKPVYLTLTGMSKASSVKFTDEKDYSLQANVTYADGSTGIYNAKFPSGTQEWNRAAVVIPKTKPINKVDISILFQKSATGTVWFDDIRLIEGSLLTKSTYDSNGNYVTKEEDELGYATSTDYDETGKKTSETDAKGEKTTYTYDQADQLTNMTLSNGTSILHSYDKEGNEVSKTIRAGADQTYKFEYDVMGKLVKTTDPLGNVLASEYDANSNLTKTISPNGNEVSLSYDGTDRVKSKSYNGTEKYIFTYDKNGNETSVVNKEQNTTKKRTFDNKNRLTELTDRGGSQTWTYPSDSDKLKTFSWIHGDQKGTNQFTYNKLDQMIEMKDSTSSYSFDYDENGNVQTFITGNGGGTSFSYDERNLVSSLHIGDKNGGDILTESYEYDANGNRTTINSSASGKVQYEYGKLNQLVKETHEDGTVIEYTYDGFGNRKTVTTIKDGSSKTVNASFNIMNQLTKVNDESISYDKNGNRTSDGKFTYTWDAEDNLTAVTKKGEDKPFATYKYDEKGNRIQKTVNGKVTNYFYDGDSLNVLYETDADNNVTKSYTYGDSGQLLSYTENGKKYFYHYNAHGDIIAISDSTGKTVAKYQYDAWGNPTKTEASDEVKDNRYRYAGYQYDEETGLYYLMARYYEPRNGVFLSLDPDPGSDGDSLDQNGYAYGNNNPVMNVDPDGHWVWLVVNAGFAAYDGYKAYKSGKGWKGAAWAAASNFGPGKIFKGASRAYKFTKKAVKITGHTRHGLNQSIGRNGGRGVNLRAKLNAVRSPKKVIKQPNGATKYVGKKATVVLNKRGKVITAYGSSRAKGSKHVFHTHGKGNKSKRRR

SEQ ID NO: 1309 - protein, 894 aa, Bacillus subtilis
MKRRKFSSVVAAVLIFALIFSLFSPGTKAAAAGAIDQAAALENGKEQTGAMKEPEQVKWYKVTPGATDIQKNSHMALTVKSDSVLNVSVYPSKEKALKDETFEMYRSFTAEDGKSEVIFPYAWSGPYYVKVEYLGEEEPEDGGTAEAAAEAKYTIGYKGTKKQPSDLEEEEACPVEMSVDQKKSGKGILDKLRSIRDEQLSQTAEGKELTSLYYKAAPFIVAKLALNKTARNEIYQDLVTLKPLFDDVSENGASSSYKVTEKDQKAINRLYDKALQSVPSFLKEEIKKQADRLNMKQLQGKTAGAILTENNIAAKSEVQTTKVIFKVKDNKSLSSVHNEMKGFSASAQSKKDISNVKKAKKLFDNLYSFELPKDEKQNGAYTASAKRVKSAAATLSKMSNVEFAEPVQEYKSLANDIQYPYQWPLKNNGENGGVKNADVKYEPANTLLSKRKLNDTLIAVVDTGVDSTLADLKGKVRTDLGHNFVGRNNNAMDDQGHGTHVAGIIAAQSDNGYSMTGLNAKAKIIPVKVLDSAGSGDTEQIALGIKYAADKGAKVINLSLGGGYSRVLEFALKYAADKNVLIAAASGNDGENALSYPASSKYVMSVGATNRMDMTADFSNYGKGLDISAPGSDIPSLVPNGNVTYMSGTSMATPYAAAAAGLLFAQNPKLKRTEVEDMLKKTADDISFESVDGGEEELYDDYGDPIEIPKTPGVDWHSGYGRLNVMKAVSAADLQLKVNKLESTQTAVRGSAKEGTLIEVMNGKKKLGSAKAGKDNAFKVNIATQKQDQVLYLKATKGDAKTSYKVVVVKGKPSGTPKVNAVKTKDTAVKGKANSKAMIRVKNKSKKVIASAKADAKGTFSVKIKKQKAGTVLYVTAVDTDKKESKEAKVVVEK

SEQ ID NO: 1310 - protein, 311 aa, Bacillus subtilis
MRNQEIIRKAEMSLSALKSGGLMNPAQASAFIRMVQNTPTIFSESRVIQMENDSQKFEKIGFGQRILRAAQEGKALSNDELTVPTTSTVQLNTKEVIAEINITYDTLENNIEKDGLQQTIMQILAERAAVDIEELIVNGDTASADPYLAQLDGIRKQAVSHIVDMNGEELSRATFKKGLKAVPPKYLRIPQEFRFYTSHGLEVEWKDRVADRQTNLGDQAVQGGLSTAFGVPVKGVSNIQPYTVGEGDAQYDASDIILTHPKNIILGFSRNIRIEVDKDIRSRKFIIVLTAKLDSKFEEEDACAKLINVKE

SEQ ID NO: 1311 - protein, 297 aa, Bacillus subtilis
MVNIIQDFIPVGANNRPGYAMTPLYITVHNTANTAVGADAAAHARYLKNPDTTTSWHFTVDDTEIYQHLPLNENGWHAGDGNGSGNRASIGIEICENADGDFAKATANAQWLIKTLMAEHNISLANVVPHKYWSGKECPRKLLDTWDSFKAGIGGGGSQTYVVKQGDTLTSIARAFGVTVAQLQEWNNIEDPNLIRVGQVLIVSAPSAAEKPELYPLPDGIIQLTTPYTSGEHVFQVQRALAALYFYPDKGAVNNGIDGVYGPKTADAVARFQSVNGLTADGIYGPATKEKIAAQLS

SEQ ID NO: 1312 - protein, 317 aa, Bacillus subtilis
MSIPVKKNLVSEAKYALKCPNAMSAEYITIHNTANDASAANEISYMIGNTSSTSFHFAVDDQEVIQGLPLNRNAWHTGDGTNGPGNRKSIGVEICYSKSGGPKYEAAEALAISFVAQLLKERGWGIDRVRKHQDWSGKYCPHRILSEGRWDQVKAAIEKELNGGVSAKKAAVSSSASEYHVKKGDTLSGIAASHGASVKTLQSINHITDPNHIKIGQVIKLPQTASASKSHAASSYPLPSGVIKVTSPLTQGTKVKQVQTALAALYFYPDKGAKNHGVDGVYGPKTANAVKRFQSVSGLTADGIYGPKTKAKMEEKL

SEQ ID NO: 1313 - protein, 423 aa, Bacillus subtilis
MMSSVKKTICVLLVCFTMMSVMLLGPGVTEVSAASDAKVNISADRQVIRGFGGMNHPAWIGDLTAAQRETAFGNGQNQLGFSVLRIHVDENRNNWYKEVETAKSAIKHGAIVFASPWNPPNDMVETFNHNGDTSAKRLRYDKYAAYAQHLNDFVNFMKSNGVNLYAISMQNEPDYAHEWTWWTPQEILRFMRENAGSINARVIAPESFQYLKNISDPILNDPQALRNMDILGTHLYGTQVSQFPYPLFKQKGGGKELWMTEVYYPNSDNNSADRWPEALGVSEHIHHSMVEGDFQAYVWWYIRRSYGPMKEDGMISKRGYNMAHFSKFVRPGYVRIDATKNPEPNVYVSAYKGDNKVVIVAINKNNTGVNQNFVLQNGTASQVSRWITSSSSNLQPGTDLKVTDNHFWAHLPAQSVTTFVVKR

SEQ ID NO: 1314 - protein, 422 aa, Bacillus subtilis
MIPRIKKTICVLLVCFTMLSVMLGPGATEVLAASDVTVNVSAEKQVIRGFGGMNHPAWAGDLTAAQRETAFGNGQNQLGFSILRIHVDENRNNWYKEVETAKSAVKHGAIVFASPWNPPSDMVETFNRNGDTSAKRLKYNKYAAYAQHLNDFVTFMKNNGVNLYAISVQNEPDYAHEWTWWTPQEILRFMRENAGSINARVIAPESFQYLKNLSDPILNDPQALANMDILGTHLYGTQVSQFPYPLFKQKGAGKDLWMTEVYYPNSDTNSADRWPEALDVSQHIHNAMVEGDFQAYVWWYIRRSYGPMKEDGTISKRGYNMAHFSKFVRPGYVRIDATKNPNANVYVSAYKGDNKVVIVAINKSNTGVNQNFVLQNGSASNVSRWITSSSSNLQPGTNLTVSGNHFWAHLPAQSVTTFVVNR

SEQ ID NO: 1315 - protein, 513 aa, Bacillus subtilis
MRKKCSVCLWILVLLLSCLSGKSAYAATSTTIAKHIGNSNPLIDHHLGADPVALTYNGRVYIYMSSDDYEYNSNGTIKDNSFANLNRVFVISSADMVNWTDHGAIPVAGANGANGGRGIAKWAGASWAPSIAVKKINGKDKFFLYFANSGGGIGVLTADSPIGPWTDPIGKPLVTPSTPGMSGVVWLFDPAVFVDDDGTGYLYAGGGVPGVSNPTQGQWANPKTARVIKLGPDMTSVVGSASTIDAPFMFEDSGLHKYNGTYYYSYCINFGGTHPADKPPGEIGYMTSSSPMGPFTYRGHFLKNPGAFFGGGGNNHHAVFNFKNEWYVVYHAQTVSSALFGAGKGYRSPHINKLVHNADGSIQEVAANYAGVTQISNLNPYNRVEAETFAWNGRILTEKSTAPGGPVNNQHVTSIQNGDWIAVGNADFGAGGARSFKANVASTLGGKIEVRLDSADGKLVGTLNVPSTGGAQTWREIETAVSGATGVHKVFFVFTGTGTGNLFNFDYWQFTQR

SEQ ID NO: 1316 - protein, 290 aa, Bacillus subtilis
MQFQIGDMVARKSYQMDVLFRIIGIEQTSKGNSIAILHGDEVRLIADSDFSDLVAVKKDEQMMRKKKDESRMNESLELLRQDYKLLREKQEYYATSQYQHQEHYFHMPGKVLHLDGDEAYLKKCLNVYKKIGVPVYGIHCHEKKMSASIEVLLDKYRPDILVITGHDAYSKQKGGIDDLNAYRHSKHFVETVQTARKKIPHLDQLVIFAGACQSHFESLIRAGANFASSPSRVNIHALDPVYIVAKISFTPFMERINVWEVLRNTLTREKGLGGIETRGVLRIGMPYKSN

SEQ ID NO: 1317 - protein, 100 aa, Bacillus subtilis
MNSYYDQKGSSSVPEQHDVTMKGRKHLDISGVKHVESFDNEEFLLETVMGMLSVRGQNLQMKNLDVEKGIVSIKGRVFDLVYLDEQQGDKAKGFFSKLFK

SEQ ID NO: 1318 - protein, 211 aa, Bacillus subtilis
MTLTTQFYTMLAMSGMGLWLGASLDTYRLFVIRAKTARWLLFIHDILFWIMQGLLFFYVLLHVNEGEFRIYIFLAVLLGVATYQSLCKRIYIKILKFVIYLVVSVYQFFKKLIQHVLFRPIVWTCGAIIWLAAFLFKKTYSLIGFLLLCLYKIVMVLCFPIRFIAKQCLKLLPVKMRLTFRRYFEKGAGFLKKKKKLLITIRTTITRFLKR

SEQ ID NO: 1319 - protein, 354 aa, Bacillus subtilis
MFQKKTYAVFLILLLMMFTAACSGSKTSAEKKESETEKSSDIAQVKIKDVSYTLPSKYDKSTSDDQLVLKVNVAVKNTGKDPLNVDSMDFTLYQGDTKMSDTDPEDYSEKLQGSTINADKSVEGNLFFVVDKGKQYELNYTPESYGDKKPKSVTFKIDGKDKKILATADKLQDSAKALSAYVDVLLFGKDNADFEKITGANKNEIVNDFNESAKDGYLSASGLSSTYADSKALDNIVNGIKEGLSKNSSIQAKTTSISKDEAIVEATVKPVDASSLSDRIEDKVKDYYSKNSSASYEEAVKYALQVYPEEFKKLGPASSEKTVEVKMKKNDIDQWQLDMDDYRAAELVEAFIKE

SEQ ID NO: 1320 - protein, 472 aa, Bacillus subtilis
MKGAAFVKKEGLKQKALEIGRVPTHLKLEIEDYGGDDKRAHFCWADPQDENTGIIVELGPDGELESLSRDIEPESGERLSEEKLEDIMRQFVETHHPGALSAFVREENDRAYGDKVRFSYVQMEAGLPLPMSGFMADVSLSGEIVYFRYYGEAGSIIKPKRVADVEEALAFIKKDVEFDLLFEVLHRSVYKNGDDQPHLVYEPEGRAITVPADLVQEEQAVDDDDDYREPESFPLPLFEGIREKADPDSMIGIENGFVKEREADLGDGRIGIVWRNPDDPVYQPADKSMDSWFKGRTHQVLKTIYNKETGKLEGVMSFMEKKGPLTVTLAECEKIALRFLFALFPNADQYFRIRYDEKDEEENAVAGFTFEAHCHGVPLRFGQIRICVSRQTGYITVYMGPDIDPNKLATIDPVPAISVEQAKSIFWQHFKVELGWEREYGDDEEHSYRLVYKPVYPHFIDAHTGEPVFSIW

SEQ ID NO: 1321 - protein, 317 aa, Bacillus subtilis
MKKFALLFIALVTAVVISACGNQSTSSKGSDTKKEQITVKHQLDKNGTKVPKNPKKVVVFDFGSLDTLDKLGLDDIVAGLPKQVLPKYLSKFKDDKYADVGSLKEPDFDKVAELDPDLIIISARQSESYKEFSKIAPTIYLGVDTAKYMESFKSDAETIGKIFDKEDKVKDELANIDHSIADVKKTAEKLNKNGLVIMANDGKISAFGPKSRYGLIHDVFGVAPADQNIKASTHGQSVSYEYISKTNPDYLFVIDRGTAIGETSSTKQVVENDYVKNVNAVKNGHVIYLDSATWYLSGGGLESMTQMIKEVKDGLEK

SEQ ID NO: 1322 - protein, 236 aa, Bacillus subtilis
MRRILSILVFAIMLAGCSSNASTEKQHAGGEKTVKAEPQSTSSQKDSTDDYQPNSQVTDDRTLHKVGQTFSDDKGKAVLKDIKQVNKTYKIGDVELTVKEMKLIHLRPDYSMIDYFHELTHDEEFDFVKVFVDIKNTSTKKVNVAPIALMKTNTGETFDWNKDIYLEELNGELEGGAEKSGNLGFIVNASSGHAHDKAADAEKKTKEIKWIEITTSDVFDHNHKKISDAQKIKIKF

SEQ ID NO: 1323 - protein, 620 aa, Bacillus subtilis
MRRSCLMIRRRKRMFTAVTLLVLLVMGTSVCPVKAEGAARQMEALNRGLVAVKTDGGIFVSWRFLGTENASVLFNVYRDGQKLNAAPVKTTNYVDKNGSAGSTYTVRAVVNGTEQPASEKASVWAQPYHSVPLDKPAGGTTPKGESYTYSANDASVGDVDGDGQYELILKWDPSNSKDNSQDGYTGDVLIDAYKLDGTKLWRINLGKNIRAGAHYTQFMVYDLDGDGKAEVAMKTADGTKDGTGKVIGNANADYRNEQGRVLSGPEYLTVFQGSTGKELVTANFEPARGNVSDWGDSYGNRVDRFLAGIAYLDGQRPSLIMTRGYYAKTMLVAYNFRDGKLSKLWTLDSSKSGNEAFAGQGNHNLSIADVDGDGKDEIIFGSMAVDHDGKGMYSTGLGHGDALHTGDLDPGRPGLEVFQVHEDKNAKYGLSFRDAATGKILWGVYAGKDVGRGMAADIDPRYPGQEVWANGSLYSAKGVKIGSGVPSSTNFGIWWDGDLLREQLDSNRIDKWDYQNGVSKNMLTASGAAANNGTKATPTLQADLLGDWREEVVWRTEDSSALRIYTTTIPTEHRLYTLMHDPVYRLGIAWQNIAYNQPPHTSFFLGDGMAEQPKPNMYTP

SEQ ID NO: 1324 - protein, 612 aa, Bacillus subtilis
MKPKKRQMEYLTRGLIAVQTEQGVFVSWRFLGTDHETTAFHLYRDGKRITRDPIAESTNFLDQNGTADSVYQVAAVNKGREEKLSKKARVWQENVLEVPLAKPEGGVTPDGKPYTYSANDASVGDIDGDGEYEMILKWDPSNSKDNAHDGYTGEVLIDAYKLDGTFLWRINLGRNIRAGAHYTQFMVYDLDGDGKAEIAMKTADGTTDGKGHIIGDEQADFRNEQGRILSGPEYLTVFKGETGEALTTVEYEPPRGKLEDWGDGYGNRMDRFLAGTAYLDGERPSLVMARGYYTRTVLVAYDFRNGRLKKRWVFDSNQPGHEAYAGQGNHSLSVADVDGDGKDEIIYGAMAVDHDGTGLYSTGLGHGDAMHVGDLDPSRKGLEVFQVHEDATKPYGLSLRDAGTGEILWGVHAGTDVGRGMAAHIDPSYKGSLVWGIDPPGNDGMSYGLFTSKGEKISDKAPSSANFAIWWDGDLVRELLDHDWDGTIGRPKIEKWDAENGCLKTIFQPAGVLSNNGTKGNPVLQANLFGDWREEVIWRTEDSSALRIYTTTHLTRHCFYTLMHDPVYRLGIAWQNTAYNQPPHTSFYLGTGMKKPPKPALYIAGSKAEAPL

SEQ ID NO: 1325 - protein, 363 aa, Bacillus subtilis
MITLGFMSLSRQHEADYSAELAKRAPEFGIRFIRFTPFDISPDTLRVKASVYHSASSTWNETEMAIPDYIYDRCFYGKDSHSQKAKPIVEWLKKYPKTEFIGRGLPDKWTVLHDLQQHSVINPYIPETIKVSRYEQIHSFLSKEKACILKPAFGAGGRGVILLKLGKKNITATYHIGKDKQTKTFSNQTSFKTWCKKVLQHQYLLQPYLNIQDKEQYPCDIRLFMEKNEAGEWNTVGKAVRRGYKHGLLANLSGGSDALTFDSWFEDIPKKQQVVLLDDVFSITQSVPYYLDERYGPLFELGLDICLAKDGRIWILDINSKPGRKSILRVSPEQKEQLYTCPLKRCQYLFSEQSQKGVLPRES

SEQ ID NO: 1326 - protein, 453 aa, Bacillus subtilis
MNPKRFLIGIDKTSENTLFLPSSLKQDGLLHAAFGTKVVRCHVAYRRHLEQTVLLSENLFHELLLPHRSRADILIHDHTVHIGPLVGIFTAGFTVSLERPFKDRSLFFSKLVTLHEQAGGYCFVFGAHQINWEEGTIEGLLYRENGWEKKIVPLPNVVYDRLPNRKIEDSLLLQHTKKRLIDEYQIPWFNKTFFNKWNVHQLLEKDPRTAPFLPRSELTPSVELIDELCGAYKKVYIKPANGALGTGIYQLTRTDGGLTVKHTNDAKTFTSIDYSDAASFLAEFQKHHNPSDFLIQQGVDLIEFQGKPADFRVHTNKNRKGKWTVTAIAVKISGKNSITTHLSNGGTVKTLAEVYDDPAERVEVIKKLSAAALTASHVLHDHIEGFIGEIGFDFGIDQNGKVWMFEANSRPGRSIFSHPNLHHVDSLTKRRSFEYASYLSEKAITSPEALWPS

SEQ ID NO: 1327 - protein, 213 aa, Bacillus subtilis
MKKVLLLLFVLTIGLALSACSQSSDASEKEKPKEKKSQEELEKELDKELKKGGEPKTKKDDQIHKIGETFKAGHTNFTVNKVDRVQKGEYMNVGGAVNEETKTIKDDEERLIIEVTMENIGEDSISYNFIGFDLRDKNDQSVRPVFSIEEKGRILMGGTLVSGKKVTGVLSYVIPKGEQKHYTLVYNPFLADTNSSNTEERVKDDIDYLVKLD

SEQ ID NO: 1328 - protein, 226 aa, Bacillus subtilis
MTKTIKTVSFAAAAILVVIICTFLIIRQTHENVLSKETVVKKVEASYEGKVTKATQSKDKKTYDITLENPKGTYFVKADAISADILSMNRVKAVNPSAMTEKEAEHLALERVPGTVKKQTRQSQVATYTIQKEDGKTYEVKVDMQAKTVLSADQISSKDQQKTPITKKEAKTIAERKTGGTADDADLEESEGTLIFEVDVDLPDNKEATVKINAYTGKVANIVYED

SEQ ID NO: 1329 - protein, 170 aa, Bacillus subtilis
MLKKKWMVGLLAGCLAAGGFSYNAFATENNENRQASSKTDALTEQEAEAIAKTVVDGTVEDIDRDLYNGKEVYEVEIEKEGEDYDVYVDIHTKQALNDPLKEKAEQVAITKEEAEEIALKQTGGTVTESKLDEDDGAYIYEMEIQTKQGTETEFEISAKDGRIIKQEIDD

SEQ ID NO: 1330 - protein, 161 aa, Bacillus subtilis
MKKIGLLFMLCLAALFTIGFPAQQADAAEAPYKASITNISTDGGVYGKINYGQGQYWRVKYNITVSGKLLDQNGQPVPNAPVRFEADTKVGNTTQTASGTTDANGTFEVPMYLGPAAGYYTYYTSVSVHYYDIIPFRVFSGESRLVSTDNSLYHFAYQVRR

SEQ ID NO: 1331 - protein, 250 aa, Bacillus subtilis
MAKPLSKGGILVKKVLIAGAVGTAVLFGTLSSGIPGLPAADAQVAKAASELPNGIGGRVYLNSTGAVFTAKIVLPETVKNNDSVSTPYIYSGFRATSGTEADIGLQYSKQYNVWKPLMKVGSKNEETYIEGKDKFTYNKGFRPGSTVQMTIYKNLSGNTRMTLWGTNNDGYTGRIITEIQGTNIGTISKWKTLATAAVSYESQRDAIKATFSTSFNNITIDNKAVTPVVDTQDFAKVSVAGNNVTISVNK

SEQ ID NO: 1332 - protein, 232 aa, Bacillus subtilis
MKKIMSAFVGMVLLTIFCFSPQASAAYDDLHEGYATYTGSGYSGGAFLLDPIPSDMEITAINPADLNYGGVKAALAGSYLEVEGPKGKTTVYVTDLYPEGARGALDLSPNAFRKIGNMKDGKINIKWRVVKAPITGNFTYRIKEGSSRWWAAIQVRNHKYPVMKMEYEKDGKWINMEKMDYNHFVSTNLGTGSLKVRMTDIRGKVVKDTIPKLPESGTSKAYTVPGHVQFPE

SEQ ID NO: 1333 - protein, 287 aa, Bacillus subtilis
MKKTIMSFVAVAALSTTAFGAHASAKEITVQKGDTLWGISQKNGVNLKDLKEWNKLTSDKIIAGEKLTISSEETTTTGQYTIKAGDTLSKIAQKFGTTVNNLKVWNNLSSDMIYAGSTLSVKGQATAANTATENAQTNAPQAAPKQEAVQKEQPKQEAVQQQPKQETKAEAETSVNTEEKAVQSNTNNQEASKELTVTATAYTANDGGISGVTATGIDLNKNPNAKVIAVDPNVIPLGSKVYVEGYGEATAADTGGAIKGNKIDVFVPSKSDASNWGVKTVSVKVLN

SEQ ID NO: 1334 - protein, 161 aa, Bacillus subtilis
MRKKALIFTVIFGIIFLAVLLVSASIYKSAMAQKEEGHEAAAAEAKKETDLAHVDQVETFVGKEKYYVVKGTDKKGTALYVWVPADKKAKILSKEAKEGISEDKAAKIIKDEGLVSKQKEVHLAREGNVLLWEVTYLDKEGQYSLSYVDFTTGKILKNITP

SEQ ID NO: 1335 - protein, 99 aa, Bacillus subtilis
MKRLTLVCSIVFILFILFYDLKIGTIPIQDLPVYEASAKTAVQEPAYKTVKVKPGDTVMSIVGSAGSPDDIVKDFEALNPNVKANAIQAGTAYKFPVYP

SEQ ID NO: 1336 - protein, 142 aa, Bacillus subtilis
MKQGKFSVFLILLLMLTLVVAPKEKAEAASSGWQPVSGISGCKIRVITDAYTYTKSATSIDAYAETNGKCGKLNYKSFGVSIVEGGDIGPQYSGYFSSRTPTKKFYFSKLPKPTGTPWAVGLSVYKGKAKGAAFVYINPQKR

SEQ ID NO: 1337 - protein, 638 aa, Bacillus subtilis
MRKTFFSKISFMLIAILLMWLKTYAVYKTSFHIKIDNLTQEFILFINPLSFLLLIFGLSLFLKGKNRNRYIIAMSCLVTFVLLANMVFYRFYNDFLTIPVLFQTSNMGDLGSSIGTLLEPTDLLLAVDIAVLIWLHIRQKAFQSDIPSTKNERAAYFLFVASVYFFNLGLSEAERPQLLTRSFDREMLVKNISLFNFHIYDGVLQSKQSAQRALADSNSLTEIENYVTANAKDANKRLFGAAKGRNVILVSLESTQSFVINEKLNGEEITPFLNDFIKQSYNFNNVYHQTGQGKTSDSEFIVDNSLYPLGRGAVFFTNAGNQYMAAPEILKNSGYYSAVLHANNKSFWNRDLMYDSFGYDSFFDINSYDVTDENSVGWGLKDKEFFEQSSELMKNLPQPFYSRLITLTNHFPFDLDEEDQLIDEYDSNSQTLNKYFPTVRYQDEALKRFIEKLKEDGLYDNSVIVLYGDHYGISENHNEAMGQFLGKEITPFEEVQLQKVPLVIHIPGITDKKPQTIETVGGQIDIRPTLMNLLGIDTKDQIQFGNDLLSDEKLDFTVLRDGSFITDQVVYTDGACYDKETGKPLEETKQCEAFADKAKQELSLSDEIIYGDLLRFYDQKRLDNSSKRKEKQMLDQAS

SEQ ID NO: 1338 - protein, 518 aa, Bacillus subtilis
MNKKYFVLIVCIIFTSALFPTFSSVTAAQGEAVIATDEMNVRSGPGLSYGITAEVKKGERYPILKEDGDWVQIQLGSGEKGWVVSWLITKEDQASTSSSGSSDTVTSTDPDLRMRSGPGTSYEVIGKFPQGSQASVIDKDSGWIKISYHSATGWVSSEYVTSGGSSSASDESDQTEDSGASTTGTVGVSSLNVRASASHDAAIITKLDRGTKLTVLNEKNGWAHIEVNGLKGWVASHYLLTSSVPADDSANAGSSSSAKKAYIMYGGTNLRSDASTSASIVERAAKGDSYTITGSKGSWYEIKLDNGQTAYVANWVVQTSKSAEEAGEPPVSDSPSGNGSLNNKTIIVDPGHGGKDSGTIGYSGKFEKNLTIKTAKLLASKLRSAGADVYVTRQDDTFVSLQSRVSTSHYRNADAFISIHYDSYADTSTRGSTAYYYSPAKDQELASDVHSEVVKRSSIPDRGVLFGDYYVLRENRQPAMLYELGYVSHPQEEAIVHSNSYQEKVTDGIESGLEKYFQ

SEQ ID NO: 1339 - protein, 113 aa, Bacillus subtilis
MDQEAGFMVNFINSYFIALGVLIGGALIGGLGAYLAGEPPLTAITKLANRLKIWALVAAIGGTFDAVYSFERGILEGNTRDIFKQLLLIISAMGGAQSGWLIISWLTQEHLSS

SEQ ID NO: 1340 - protein, 105 aa, Bacillus subtilis
MKLRHLLLGAGLGICTAVVVRQYVMKPYISSEKALRIVKSAFKQRGPIDGSWIYTQPEPYNINGETVQVYKTGITRSAFGELEQYEVMVDAKTGEIVDVIDTIAS

SEQ ID NO: 1341 - protein, 339 aa, Bacillus subtilis
MVKGTIKEKYGIHIRQLSMYQHTYQCFQTPNSYFLIVPVSQFSETELAELYYMSQYLQEQSDPYVSVFIFTKEGELTFEHEGKTYALLKAAPPYSNRAFSIGAELAEFHRKGRGYPYEVKAAGRIGQWKDLWGKRIDQLEAFWQRKVQTPPHEPFDKKMIESFPYYLGLSENAIQYLVDTELDDKPQAADSGTICHQRMERHTWSPESLIRIPADWVFDHASRDLAEYMRHTFLHHRQDFNQQGFLFLQEYEQVTPLSSFSKRLLYSRLLFPLHYFEIVESYYMSSESEKHYFEEQLDFILNDCGRYEQFLNTAQEFMNMRAQKLFVPRVSWLGKGSSR

SEQ ID NO: 1342 - protein, 617 aa, Bacillus subtilis
MKGTFFHNQRFLCFSILFMWIKTYVIYKLGFDLQIDTLLEELMLLVNPLSFILPLFGIGLFLKENKQRAFLLIANLVLTVILISNTIFYGFYIDFITIPVLFQASNMSDMGSSVKELFHPLFIALFVDLVFLLLFARKTKHPQTKAAPHTIKRYYAASCGMLLCTLALAEVQQPKLLAHSFDREMLVKSIGLFQFHIYDTISQTVNISAKAFADEDSITAIKNYTEADYSKPDQSKFGLAKGRNVIFVTLESTQSFVLNEKVNGKEITPFMNDLIKKSYSFDHFYQQTEQGKTSDSEFIVANSLYPSLSGAVFFTKSDHQFHTMYKSLKQHDYYSAVFHANHKTFWNRDVMYDTFGIDRFFDVDDFHVTPGTSTSWGLKDKEFLEQSAKKLKSLPQPFYSSFITLTNHFPFEIDEKDQLIDEFDSSSDLLNRYVTTVRYEDEALKHFIKKLKDEGLYENSMIVFMGDHYGISEAHNEAMAEFLGKDEITPYDNVQLQRVPFIIHIPGITDQQPETIPDAGGQVDVRPTLMHLLGVETKGDIQFGNDLLSGDRTPFAVLRNGSFITNDYVYTKNTCYSQKTGEVLEDQDACLPYKEKANEELSLSDKILNGDLLRFSE

SEQ ID NO: 1343 - protein, 87 aa, Bacillus subtilis
MMDMFFAYLLVASATPLFIWLDNKKVALSAIPPIILMWVFFFFYATESLSPLGHTLMIILFAVNVIVAHIAAFIIYGLPYLRRKRSS

SEQ ID NO: 1344 - protein, 468 aa, Bacillus subtilis
MRKWYFILLAGVLTSVILAFVYDKTKANEEGSGDYLYVSPNGSDQNEGTKEKPFRTLAHASEKAAAGTTVMIREGTYHETLDVKHSGTDGKPITFRNYENENVVISGESVANAEYETPLIRIHDKHDIAISGLTIQDLSVSSEEATAIGIYVSGSSSHIAIKDNHIRGIKTTADEGNAHGIAVYGTGSMKDIRIEDNTVEKLTLGASEAVVLNGNIDGFTVAGNVVRNNNNIGIDLIGYEGTADKNDYVRNGVVENNTVYQNSTYGNPAYGDEYSAGGIYVDGGHDIEIKNNTVYDNDIGIEATSEHKGKYANAIQITDNKVYNNAYTGISIGGYDKKRGGTSNSLIARNIMYRNDTKGLYGGQLLLQYDTKNNTIEKNILTAGDSRLFIGNDFTENEGNTVNHNVYHKEADQDGIWMWKKKEYDSFSSYRKATKNDQQSIYADPMFRDEASYDFSLDPDSPARPVIE

SEQ ID NO: 1345 - protein, 178 aa, Bacillus subtilis
MNKPTKLFSTLALAAGMTAAAAGGAGTIHAQQPETTVSIDDLYSYPIDSYLVSAEALNVRTKPSASSQKADTLHLGDSLKLISFSNADWAKVKYKNGKTGFVSTHYIVKAATTVKTKTKTKVYTSADGKSIKTLPADTSVSFLGWSKTNKGGFDFDWVFVDYGGTTGYMKTKDLHMTK

SEQ ID NO: 1346 - protein, 410 aa, Bacillus subtilis
MVKSFRMKALIAGAAVAAAVSAGAVSDVPAAKVLQPTAAYAAETVFSQNNGASGFLPGRYDVQAMAPAMFNWSRESRFAGNTDGTLKWQNDIRTTPQNGAGAVIDGDGTVYLHSRDGEMKAFNPDGSVKWVTGNLGKTYTQSPVLGTNGVIYLASYDKKIYFIDKETGEILTTVPLSGGPSSETVIGSDGTLYFSTLDNYVHAIKPTSKSTWTERWKLKTNGVVSSVPVLAKNGTVYVGTYNYVFYAINSGTGQVKWSRTTSNAFKGYPVIDKDGNIYAGNQDGQLYAYTSTGSLKWTFPLNGFSSSSPAIDHNGNIYIGSGSGELFSISKNGDMNWSFYTDGPVRTAPLIDAKGTVYFGSDDMKVYAADANGNELWSYQTDSNVVSSPQLAEDGTLYIGSYTKLMAFGK

SEQ ID NO: 1347 - protein, 180 aa, Bacillus subtilis
MRHKIITFILAVVVIIIIGNMIGGGGGSEATSKTSSSSKAETEKTYNIGDTVKTEKTEVTVTKVEDRDTVGTQYVEKKASEGGTIVAVQYTIKNVSKKPISSFSIPTVKLVDADGTSYDSDIDASVNYATETKVDNSKILSDLNPNIKVTGVKAFEVDKEAYAKGTWKLKFSNDVIVKIK

SEQ ID NO: 1348 - protein, 277 aa, Bacillus subtilis; identical to SEQ ID NO: 1236

SEQ ID NO: 1349 - protein, 83 aa, Bacillus subtilis
MQAKTVLSADQISSKDQQKTPITKKEAKTIAERKTGGTADDADLEESEGTLIFEVDVDLPDDKEATVKINAYTGKVANIVYED

SEQ ID NO: 1350 - protein, 473 aa, Bacillus subtilis
MKGAAFVKKEGLKQKALEIGRVPTHLKLEIEDYGSDDKRAYFCWTDPQDENIGIIVELGPDGELESLSRDIEPESGKRLSEEKLEDIMRQFVETHHPGALSAFVREENDHAYGDKVRFSYVQMEAGLPLPMSGFMADVSLSGEIVYFRYYGEAGSIIKPKRVADVEEALAFIKKDVEFDLLFEVLHRSVYKNGDDQPHLVYEPECRAITVPADLVQEEQGGVDNDDDYREPESFPLPLFEGIREKADPDSMIGIENGFVKEREADLGDGRIGIVWRNPDDPVYQPADKSMDSWFKGRTHQVLKTIYNKETGKLEGVMSFMEKKGPLTVTLAECEKIALRFLFALFPNADQYFRIRYDEKDEEENAVAGFTFEAHCHGVPIRFGQIRICVSRQTGDITVYMGPDIDPNKLAAIDPIPAISVEQAKAIFWQHFKVELGWEREYGDDEEHSYRLVYKPVFPRFIDAHTGEPVFSSW

SEQ ID NO: 1351 - protein, 105 aa, Bacillus subtilis
MKLRHLLLGAGLGICAAVVVKQYVMKPYISSEKALRIVKSAFKQRGPIDGSWIYTQPEPYNINGETVQVYKTGITRSAFGELEQYEVMVDAKTGEIVDVIDTIAS

SEQ ID NO: 1352 - protein, 521 aa, Bacillus subtilis
MGLGKKLSVAVAASFMSLSISLPGVQAAEGHQLKENQTNFLSKNAIAQSELSAPNDKAVKQFLKKNSNIFKGDPSKRLKLVESTTDALGYKHFRYAPVVNGVPIKDSQVIVHVDKSDNVYAVNGELHNQSAAKTDNSQKVSSEKALALAFKAIGKSPDAVSNGAAKNSNKAELKAIETKDGSYRLAYDVTIRYVEPEPANWEVLVDAETGSILKQQNKVEHAAATGSGTTLKGATVPLNISYEGGKYVLRDLSKPTGTQIITYDLQNRQSRLPGTLVSSTTKTFTSSSQRAAVDAHYNLGKVYDYFYSNFKRNSYDNRGSKIVSSVHYGTQYNNAAWTGDQMIYGDGDGSFFSPLSGSLDVTAHEMTHGVTQETANLIYENQPGALNESFSDVFGYFNDTEDWDIGEDITVSQPALRSLSNPTKYNQPDNYANYRNLPNTDEGDYGGVHTNSGIPNKAAYNTITKLGVSKSQQIYYRALTTYLTPSSTFKDAKAALIQSARDLYGSTDAAKVEAAWNAVGL

SEQ ID NO: 1353 - protein, 170 aa, Bacillus subtilis
MLKKKWMVGLLAGCLAAGGFSYNAFAKENNENRQASSKTDALTEQEAEAIAKTVVDGTVEDIDRDLYNGKEVYEVEIEKEGEDYDVYVDIHTKQALNDPLKEKAEQVAITKEEAEEIALKQTGGTVTESKLDEDDGAYIYEMEIQTKQGTETEFEISAKDGRIIKQEIDD

SEQ ID NO: 1354 - protein, 161 aa, Bacillus subtilis
MRKKALIFTVIFGIIFLAVLLVSASIYKSAMAQKEEGHEAAAAEAKKETDLANVDQVETFVGKEKYYVVKGTDKKGTALYVWVPADKKAKILSKEAKEGISEDKAAKIIKDEGLVSKQKEVHLAREGNVLLWEVTYLDKEGQYSLSYVDFTTGKILKNITP

SEQ ID NO: 1355 - protein, 250 aa, Bacillus subtilis
MYEVTGSLFNGGIIMRRILSIFVFAIMLAGCSSNASTEKQHAGGEKTVKAEPQSTSSQKDSTDDYQPNSQVTDDRSLHKVGQTFSDDKGKAVLKDIKQVNKTYKIGDVELTVKEMKLIHLRPDYSMIDYFHELTHDEEFDFVKVFVDIKNTSTKKVNVAPIALMKTNTGETFDWNKDIYLEELNGELEGGAEKSGNLGFIVNASSGHAHDKAADAEKKTKKIEWIEITTSDVFDHNHKKISDAQKIKIKF

SEQ ID NO: 1356 - protein, 221 aa, Bacillus subtilis; identical to SEQ ID NO: 1289

SEQ ID NO: 1357 - protein, 271 aa, Bacillus subtilis
MKISMQKAAISLLVFTMFFTLMMSETVFAAGLNKDQKRRAEQLTSIFENGTTEIQYGYVERLDDGRGYTCGRAGFTTATGDALEVVEVYTKAVPNNKLKKYLPELRRLAKEESDDTSNLKGFASAWKSLANDKEFRAAQDKVNDHLYYQPAMKRSDNAGLKTALARAVMYDTVIQHGDGDDPDSFYALIKRTNKKAGGSPKDGIDEKKWLNKFLDVRYDDLMNPANHDTRDEWRESVARVDVLRSIAKENNYNLNGPIHVRSNEYGNFVIK

SEQ ID NO: 1358 - protein, 1196 aa, Bacillus subtilis
MMRRILHIVLITALMFLNVMYTFEAVKAAEPQQPISIEKAIQQKEGQALVEGYAVGQAVSPQHYKLTSPFSNDYNVALADRKNETSPDHILPVQIPSAFRSQFGLQTNPLLLGKKITVQGKLDNYFNTTGLKNVQSMNVTDDTKTPPAEQQVTINEARGRLNEEVTIKGIITADQNAIGGGKLSTFLQDETGGINIYSPSPEQFPELKEGMDVTVTGKITSYQGLKEIVPSSSGIKINQSNQSLPAPKHLTINELINGSLGDQYEGRLVKLTAFVSSIPSSPAGGGYNVTMIDDDHHAMTLRVMNETGVIDELDEGKWYDFTGVLSRYQTFQLLPRKSADLKLLEEQPAPPSAEGEYEGIVDRVVDGDTIHLKSPVLGTTKIRFVNVDTPETYHTPKNDADENQLRFGKKASDYLKTVLSPGDKITVKVGSEAKDSYGRLLGQVLTESGSNVNLELVKNGYAPTYFIWPVDNEEDYQQFQAAVAAAKKDQKGIWNENDPLMEMPFEFRAREQGKGLTRYVGDSSNKTYVQPADWKKIAVENRIFFASASEAESAGYKKTQTAPQEHVPLRILSMNDLHGKIDQQYELDLDGNGIADGTFGRMDYAAAYLKEKKAEKKNSLIVHAGDMIGGSSPVSSLLQDEPTVELMEDIGFDVGTVGNHEFDEGTDELLRILNGGDHPKGTNGYDGQNFPLVCANCKMKSTGEPFLPAYDIINVEGVPVAFIGVVTQSAAGMVMPEGIKNIEFTDEVTAVNEAANELKKKGVKAIAVLAHMSAEQNTNAITGESADLANKTDSEIDVIFAAHNHQVVNGEVNGKLIVQAFEYGKAIGVVDVEIDKTTKDIVKKSAEIVYVDQSKIEPDVSASAILKKYETIAEPIISEVVGEAAVDMEGGYSNDGDTPLGNLIADGMRAAMKTDFALMNGGGIREALKKGPITWGDLYNIQPFGNVLTKLEIKGKDLREIINAQISPVFGPDYSISGFTYTWDKETGKAVDLKMADGTEIQPDATYTLTVNNFMATATGAKYQPIGLLGKNPVTGPEDLEATVEYVKSFDEPIAYTKEGRIKLAEASDIEDPVTEDPITEKPGDDPVTEDPIKEDPRPGEDLPDIKETPGTAPVHQLPPSAISRFNEIPINNTKTADTANSISTLPLQTETAESGSDHQLPDTSAGYYNFMVIGAAVTLSGTYLYVRRKRSASRT

SEQ ID NO: 1359 - protein, 430 aa, Bacillus subtilis; identical to SEQ ID NO: 1255

SEQ ID NO: 1360 - protein, 360 aa, Bacillus subtilis
MRRKNECFRKKTYAVFLILLLMMFTAACSGSKTSAEKKESETEKSSDIAQVKIKDVSYTLPSKYDKSTSDDQLVLKVNVAVKNTGKDPLNVDSMDFTLYQGDTKMSDTDPEDYSEKLQVSTINADKSVEGNLFFVVDKGKQYELNYTPKSYGDKKPKSVTFKIDGKDKKILTTADKLQDSAKALSAYVDVLLFGKDNADFEKITGANKNEIVNDFNESAKDGYLSASGLSSTYADSKALDNIVNGIKEGLSKNSSIQAKTTSISKDEAIVEATVKPVDASSLSDRIEDKVKDYYSKNSSASYEEAVKYALQVYPEEFKKLGPASSEKTVEVKMKKNDIDQWQLDMDDYRAAELVEAFIKE

SEQ ID NO: 1361 - protein, 214 aa, Bacillus subtilis
MKKVLLLLFVLTIGLALSACSQSSDASEKEKPKEKKSQEELEKELDKELKKGGEPKTKKDDQIHKIGETIKVNDINFTVNKVDREQKGQYGDLGGKDYDKTKTVKDNEERLIIEVTLEYVGKGSMEYNRLGLDLKDKKNKSVRSVISLEDKGKMFLGGNLASGKKVTGVVSYVIPKGEQKNYTLVYNPFLIDTGSDRIEESAKYNIDYLIKLEK

SEQ ID NO: 1362 - protein, 521 aa, Bacillus subtilis
MGLGKKLSVAVAASFMSLSISLPGVQAAESHQLKENQTNFLSKNAIAQSELSAPNDKAVKQFLKKNSNIFKGDPAKRLKLVESTTDALGYKHFRYAPVINGVPIKDSQVIVHVDKSDNVYAVNGELQNQSAAKTENSQKVSSEKALALAFKAIGKSPDAVSNGTAKNSNKAELKAVETKDGSYRLAYDVTIRYIEPEPANWEVLVDAETGSIVKQQNKVEHAAATGSGTTLKGATVPLNISYESGKYVLRDLSKPTGTQIITYDLQNRQSRLPGTLVSSTTNTFTSSSQRAAVDAHYNLGKVYDYFYSTFKRNSYDNKGSKIVSSVHYGTRYNNAAWTGDQMIYGDGDGSFFSPLSGSLDVTAHEMTHGVTQETANLIYENQPGALNESFSDVFGYFNDTEDWDIGEDITVSQPALRSLSNPTKYDQPDNYANYRNLPNTDEGDYGGVHINSGIPNKAAYNTITKLGVSKSQQIYYRALTTYLTPSSTFKDAKAALIQSARDLYGSTDAAKVEAAWNAVGL

SEQ ID NO: 1363 - protein, 161 aa, Bacillus subtilis
MRKKALIFTAIFGIIFLAVLLVSASIYKSAMAQKEEGHEAAAAEAKKETDLANVDQVETFVGKEKYYIVKGTDKKGTTLYVWVPADKKAKILSKEAKEGISEDKAAKIIQDEGLVSKQKEVHLAREGNVLLWEVTYLDKEGQYSLSYVDFTTGKILKNITP

SEQ ID NO: 1364 - protein, 166 aa, Bacillus subtilis
MNVKILSAAALGAVISISSLSSTHAAVLHKEDTAKVQTQQQASITLSKAKTIALHNCNGAVQSAQMKKVNGVYVYVIKVLGEDGKVHTFNVNCSNGKVVKHHVDNKQAAVTKAKAQSIALNKCKGTVKSSALKKENGIYVYIIKITASNHTVQTIKVNAENGSICS

SEQ ID NO: 1365 - protein, 105 aa, Bacillus subtilis
MKLRHLLLGAGLGICTAVVVKQYVMKPYISSEKALRIVKSAFKQRGPIDGSWIYTQPEPYNVNGETVQVYKTGITRSAFGELEQYEVMVDAKTGIIVDVIDTIAS

SEQ ID NO: 1366 - protein, 471 aa, Bacillus subtilis
MKGATLVKKKELKQKALEIGRVPTHLKLEIEDYGDDEKSAHFIWTDPQDEHIGIIVELGPDGQLKSLSRDIEPESGERLSEEKLEDIMRQFVETHFPGALSVFVREENDRTYDDKVRFSYVQIEAGLPLPMSGFMAEVSLSGEIIYFRYYGKAGSIIKPMRVADYEEAFAFIKKDVEFNLLFEVLHRSVYKNGDDQPHLVYEPECRAVTVPADLVKEEQAFDDDDDREPESFPLPLFEGIHEKADLGSMIGIEKGFVKERETDLGDGRIRTVWRNPADPVYQPADKSMDSWFRGRVHQVLKTIHNKETGKLEGVMSFMEKKEPLTVTEAECEKIALRFLFALFPNADQYFKIKYDEPDEEENAVAGFTFEAHCHGVPLRFGQIRICVSRQTGHITVYMAPDIDPKELEAIHPVPAISAEQAKSIFWQHFKVELGWEREYRDDEEQSYRLVYKPVYPRFIEAHTGEPVFSSW

SEQ ID NO: 1367 - protein, 171 aa, Bacillus subtilis
MLKKRWMVGLLAGCLAAGGFSYNAFAKENNENTQPASSKTDALTEQEAKSIAKTVVDGTVDDIDRDIYNGKEVYEVEIEKDGEDYDVYVDINTKQALNDPLKEKAEQVVITKEEAEKIALKQTNGTVTESKLDENDGAYTYEIEIQTKQGTEEEFDISAKDGRIIKQEIDD

SEQ ID NO: 1368 - protein, 299 aa, Bacillus subtilis
MNITKVLSGAALGTIISISSFTSAHAAVIQKDDASAKVETKQQASITIAKAKQVALNKCKGTVQSAQMKKVNGTYVYVVKVLGEDGKQHTMNVNCDSGKVVKHDVQKKQSYISKSKAHSLALKNCQGAVQSSELKKENGVYVYVVKVLGEDGSLHSFHINGENGKVAKHEQKKQAHLSKTKAHQIALNKYKGAVQSSELKKENGVYIYLVKVLGEDGSTHTIHVNCDSGKIVKQEVQKKNAAITKTKAHQIALNKCKGTVKSSALKKENGKYVYVIKITAQNHTEQTVKVNAENGSICK

SEQ ID NO: 1369 - protein, 226 aa, Bacillus subtilis
MNKTIKVASAAAAAVLAVIICAFLIIRQTHEDVLSKEAVVKKVEASYEGEVTKVTQSKDKKTYDMTLENPKGTYFIKADAKSADILSMNRVKALNPSALTENEAEHLALKRVPGTVKKQTQQNRVATYTIQKEDGETYEVKVDMQAKAVVSADRIIGEDQPKTPITKKEAKTIAERETGGTADDADLEKSEGTLIFEVDVDLPDDKEATVKINAYTGKVANIVYED

SEQ ID NO: 1370 - protein, 430 aa, Bacillus subtilis
MPYIVDVYAREVLDSRGNPTVEVEVYTETGAFGRALVPSGASTGEYEAVELRDGDKDRYLGKGVLTAVNNVNEIISPELLGFDVTEQNAIDQLLIELDGTENKGKLGANAILGVSMACARAAADFLQIPLYQYLGGFNSKTLPVPMMNIVNGGEHADNNVDIQEFMIMPVGAPNFREALRMGAQIFHSLKSVLSAKGMNTAVGDEGGFAPNLGSNEEALQTIVEAIEKAGFKPGEEVKLAMDAASSEFYNKEDGKYHLSGEGVVKTSAEMVDWYEEMVSKYPIISIEDGLDENDWEGHKLLTERLGKKVQLVGDDLFVTNTKKLAEGIKNGVGNSILIKVNQIGTLTETFDAIEMAKRAGYTAVISHRSGETEDSTIADIAVATNAGQIKTGAPSRTDRVAKYNQLLRIEDQLAETAQYHGINSFYNLNK

SEQ ID NO: 1371 - protein, 1195 aa, Bacillus subtilis
MMRRILHIVLITALMFLHVMYTCEAVKAAEPQQPISVDKAIQQKEGQALVEGYAVGQAVSPQNYKLTSPFSNDYNVALADSKTETSSDHILPVQIPSAFRSQFGLQTNPLLLGKKITVQGKLENYFNTTGLKNVQSMDLTDDAKTPPAEQPMTINEARGRLNEEVTIKGIVTADQSAIGGGKLSTFMQDKTGGINIYSPSPKQFPELKEGMDVTVTGKVTTYRGLTEIVPNSSGIKINQSNQPIPAPKHLTINELINSSLGDQFEGRLVTLKAFVSSIPNSPAGGGYNVTMVDEDHHAMTLRVMNETGVIDELDEGKWYEFTGVLSRYQSFQLLTRKSSDLKLLKEQPAPPSAEGEYEGIVDRVVDGDTIHLKTPVLGTTKIRFVNVDTPETYHTPKNEADENQIRFGKKASDYLKTVLSPGDKITVKVGSEAKDNYGRLLAQVITESGSNVNLELVKNGYAPTYFIWPVDNEGDYQQFQAAVAAAKKEQKGIWNEDDPLLEMPFEFRAREQGKGLTRYVGDSSNKTYVQPADWKQVAVENRIFFASVSQAENAGYKKRQTAPQESVPLRILSMNDLHGKIDQQYELDLDGNGTADGTFGRMDYAAAYLKEKKAEKKNTLIVHAGDMIGGSSPVSSLLQDEPTVELMEDIGFDVGTVGNHEFDEGTDELLRILNGGDHPKGTSGYDGQNFPLVCANCKMKSTGEPFLPAYDIINVEGIPVAFIGVVTQSAAGMVMPDGIKNIEFTDEVTAVNEAAEELKKKGVKAIAVLAHMSAEQNGAAITGESADLANKTDSEIDVIFAAHNHKVVNGEVNGKLIVQAFEYGKAIGVVDVELDKTTKDIVNKSADIVYVDQSKIKPDASASAILKKYQTLAEPIISEVVGEAAVDMEGGYSNDGDTPLGNLIADGMRAAMKTDFALMNGGGIREALKKGPITWGDLYNIQPFGNVLTKLEIKGKDLREIINAQISPAFGPDYSISGFTYTWDKETGKAVDIKLADGTEIQPEATYTLTVNNFMATATGTKYQPIGLLGKNPVTGPEDLEATVAYVKSFDEPIAYTKEGRIKLAEASDIEDPVTEDPVTDEPGDAPGTEQPVKEDPEPGEDQTDIKETPDTVPVHQLKPTDILRLGEIPSGEKYTDTAGKISTLPLQNGTAKGGSDHQLPDTSAGYYNFMVIGAAVTLSGTYLYVRRKRSASRT

SEQ ID NO: 1372 - protein, 278 aa, Bacillus subtilis
MKISLNKKADFWKKAVISSLVFTVFFTLMMSETVFAAGLNKDQKRRAEQLTSIFENGTTEIQYGYVEPLDDGRGYTCGRAGFTTATGDALEVVEVYTKAVPNNKLKKYLPELRRLAKEESDDISNLKGFASAWHSLGNDKDFRAAQDEVNDRLYYQPAMKRSDQAGLKTALARAVMYDTVIQHGDGDDPDSFYALIKRTNKKAGGSPKDGKDEKKWLNKFLDVRYDDLMNPADPDTRDEWRESVARVDVLRSIAKENNYNLNGPIHVQSKEYGHFVIK

SEQ ID NO: 1373 - protein, 354 aa, Bacillus subtilis
MFQKKTYAVFLILLLMMFTAACSGSKTSAEKKNSETEKSSDIAQVKIKDVSYTLPSKYDKSTSDDQLVLKVNVAVKNTGKEPLNVDSMDFTLYQDDTKMSDTDPEDYNEKLRSSTINADKSVEGSLFYVVDKGEKYELNYTPESYGDKKPKSVTFKIDGKDKKILATADQLQDSAKALSAYVDVLLFGKDNADFEKITGDNKNKIVSDFNESAKDGYLSASGLSSTYADSKALDNIVNGIKEGLSKNSSIQAKTTSISKDEAIVEATIKPVDASSLSDRIEDRVKDYYSKNSGASYEDAVKYALQVYPEEFKKLGPASSEKTVEVKMKKNDIDQWQLDMDDYRAAELVEAFIKE

SEQ ID NO: 1374 - protein, 250 aa, Bacillus subtilis
MYEVTGSLFNGGIIMKRILSIFVFAIVLAGCSSNANTEKQSAGGEQAVKATPQSTSSQKDSIDEYQPNSQVTDDRSLLKVGQTFSDDKGKAVLKDIKQVNQTYQIGDVELTVKEMKLIHLRPDYSMIDYFHVLTHDEEFDFVKVFVDIKNTSSKKVNVAPIALMKTNTGETFDWNKDIYLEELNGELEGGAEKSGNLGFIVNASSGHAHDEDADDKKKEKEIKWIEITTSDVFDHNHKKISDAQKIKIKF

SEQ ID NO: 1375 - protein, 213 aa, Bacillus subtilis
MAGKLVPCKACGQEIAKGVKKCPNCGKDQRNFFMRHKIITFILAVVVIIIIGNVIGGGGGSEATSKTSSSSKAETEKTYNIGDTVKTEKTEVTVTKVEDRDTVGTQYVEKKASDGGTIVAVQYTIKNVSKKPISSFSIPTVKLVDADGTSYDSDIDASVNYATETKVDNSKILSDLNPNIKVTGVKAFEVDKEAYAKGTWKLKFSNDVIVKIK

SEQ ID NO: 1376 - protein, 195 aa, Bacillus subtilis
MKKALFILFVLTIGFALSACSQSSDASAEQKTEKKEATATEKKTEEKEIKTDEKVHKVGETFKASSTNFSVNKVYTTAEQGEYKTKIGDKEKTINNNEEFLIAEVTIENTSDKSFNYTSGGFELKDSKDQSIRANIVSTADLKTSLKSGKLASGKKVTGTVSFVIPKGEKNLNLSYNPSFLNFETEDITYFVKLN

SEQ ID NO: 1377 - protein, 194 aa, Bacillus subtilis
MKKIVSILFMFSLVMGFSQFQSSTAFAADKVVHETIIVPKNTTYDGKGQRFVAGKELGDGSQSENQEPVFRVEDGATLKNVVLGTPAADGVHTYGNVNIQNVKWEDVGEDALTVKKEGKVTIDGGSAQKASDKIFQINKASTFTVKNFTADTGGKFIRQLGGSTFHVDVIIDKCTITNMKEAISGQTAKQARLE

SEQ ID NO: 1378 - protein, 1980 aa, Bacillus subtilis
MRTRSFPLGLKKSGRIVMIISLAIFFFFSQIASYTLTAQAVDVTSSDSQFFDSVTVKEGNDKIVDGSKGNEPAVTPGDEVTLTYEWSLKKDKDAESEKDINVEIPKSFTFDKGAEGEIKSADQVIGSYQVPAGGSTMTVKLTTASADSPDAKGAITLSATFTADVKDDEHTVAALFQLGGGKTQQVIIPVKKDETPDAEAEEPKNDSSETAGDQEGTDDKSTPSVSKDQKEEEQQPSADSKSSDSSKSDDSKKVSSSSQSAFKSLQTEEKQITQHILTGVTLTDENGEPYDKSNRASTNAPVKISIDWAIPDDLGKTINAGDTYEFDLPKEFIMHNDIVNLPLRAGDTTYGTFSIDTNGHVVMTFNGEVKETSNVKGTLVINTQFNEKKITGSTTQKIPFPVNSDTPETTVYFKPNVSKTIDKSGALDKGINPGKVTWTVDVNKKLDQVKNAKLTESLPDGLIYRSVKVYELNVNIDGSVSRGNEVSSGYSVDSKGNVTFNGTIDSAYRLVYETDIDNSAKPSQGGNVTLTNKAAFSGDNLEQISAEATVTAKYGKMIAKSSTGYNGESQTFSWAIAYNYGEKQIDQSKASIKDSFGTGDLHLVKDSLKVIPITFGQNGSEQAGTPLKEGEDYTLTDNGSGFEIKFNKPVTSAYKITYQTKVNSGVIIDKSTTYTNSVVTGTGDTKEASGIAIQQNLIKGYSNVDYEKKTVDWTITVNKNNYEMNNWTLDDQFESGGLVLIDDSFKIQDTTNNKTLQKDKDYTLTKKPEHKGFTLALIGDYAKTNSQFKITYTTTFNADYSNEIVKNTAQSTWTDQYGNERTNKVSSSFTPNHQTTNNGFKNGSYNAVSKEITWKIGINYNGEPTKNPYIKDVITDPQQFVPGSVVVKSYTINKNGSITEGDALDPSKYEVEEPSEKNERTLTVHLKTGDSVPYLIEFKTSLKGQVIDQNQYTNKATYHNDGYADRTLTGSVSVTNGGSLVFKGGKQNGSYIDWNINVNSSQSTLDDVKVTDTPDENQILDADSFKVYQAKYDENGVVKDSSGNLTARDVELQKDKDYTLDIKTDNTTGEQSFVLKFIGSYKQIDRAYVIKYRSLINIAGTNGHVKNKVSISGTNVKEQTQENSSSIFVAISSGDGSGSGDKGSLTIFKTGEDDKALEGAEFQLWSEDSKQLLRTGTTDAGGKLTFGNIRYGSYVLKEIKAPDGYTISDAYAKGVSVKIDSNSSKTGALYKVVNQQNKVTLIKQDEQNNPLAGAVFKLEKKSNDGTYTLIRTDIKSDKNGKVEMNGLPAGYYRLTETQAPAGFIVNTKAIHFSIAKNEKNQVSDVNLGAMTNYQGKVSLTKENAEGQKLEGAVFNIVDQDGNIVKEKLTSDKDGKVEASGLAPGRYAFVETKAPSGYVLNTTKKEFTISESAAGKPEAADAGIAVNDKGSVQLTKEDADGQKLEGAVFRIIDKEGNTVQEGLTSDENGRVAASGLAPGHYAFVETKAPSGYVLNTEKIEFTISDSAAGKPEPVNAGTAINYKGSVELTKENTEGQKLEGAVFNIVDQEGNTVQEKLTSDKDGKVKASDLAPGRYAFIETKAPSGYVLNTEKIEFIISESAAGKPESADAGIVVNDKGSVQLTKQDQDGKGLAGAVFKITDSNGKTVRDDLVSKEGGKIEVDGLAPGSYQFVEKQAPDGYLLSESPVSFTIKGEYSGKPEQVKVTAVNTKNLVVLTKVDQHDKNKVLQGAEFNLTDANGKVLKSGLTTDDKGQLTVHGLKAGEYQFVETKAPKDYHLDQTPISFKITNTDTKPVDITAENILTPGDVNVTKVDQDDKTTVLEGAEFKLLDASGKPVKTDGYGKELPELWKTDKKGQFTVKGLTPGSYQFIETKAPEGYKLDETPIEFTIEKGQPKAVELVVSNQKVKTPTPDKSDKPTPDGNVNGDGHHSKTSGTDGDSKTDKSLPKTGDADSTLTVMIGILLLMAGGGLAVASRKKQRKG

SEQ ID NO: 1379 - protein, 180 aa, Bacillus subtilis
MRHKIITFILAVVVIIIIGNMIGGGGGSEATSKTSSGSKAETEKTYNIGDTVKTEKTEVTVTKVEDRDTVGTQYVEKKASDGGTIVAVQYTIKNVSKKPISSFSIPTVKLVDADGTSYDSDIDASVNYATETKVDNSKILSDLNPNIKVTGVKAFEVDKEAYAKGTWKLKFSNDVIVKIK

SEQ ID NO: 1380 - protein, 105 aa, Bacillus subtilis; identical to SEQ ID NO: 1340

SEQ ID NO: 1381 - protein, 459 aa, Bacillus subtilis
MKKNSNIFKGDPSKRLKLVESTTDALGYKHFRYAPVVNGVPIKDSQVIVHVDKSDNVYAVNGELHNQSAAKTDNSQKVSSEKALALAFKAIGKSPDAVSNGAAKNSNKAELKAIETKDGSYRLAYDVTIRYVEPEPANWEVLVDAETGSILKQQNKVEHAAATGSGTTLKGATVPLNISYEGGKYVLRDLSKPTGTQIITYDLQNRQSRLPGTLVSSTTKTFTSSSQRAAVDAHYNLGKVYDYFYSNFKRNSYDNKGSKIVSSVHYGTQYNNAAWTGDQMIYGDGDGSFFSPLSGSLDVTAHEMTHGVTQETANLIYENQPGALNESFSDVFGYFNDTEDWDIGEDITVSQPALRSLSNPTKYNQPDNYANYRNLPNTDEGDYGGVHTNSGIPNKAAYNTITKLGVSKSQQIYYRALTTYLTPSSTFKDAKAALIQSARDLYGSTDAAKVEAAWNAVGL

SEQ ID NO: 1382 - protein, 226 aa, Bacillus subtilis
MTKTIKIVSFAAAAILVVIICTFLIIRQTHENVLSKETVVKKVEASYEGKVTKATQSKDKKTYDITLENPKGTYFVKADAISADILSMNRVKAVNPSAMTEKEAEHLALERVPGTVKKQTRQSQVATYTIQKEDGKTYEVKVDMQAKTVLSADQISSKDQQKTPITKKEAKTIAERKTGGTADDADLEESEGTLIFEVDVDLPDNKEATVKINAYTGKVANIVYED

SEQ ID NO: 1383 - protein, 277 aa, Bacillus subtilis; identical to SEQ ID NO: 1236

SEQ ID NO: 1384 - protein, 166 aa, Bacillus subtilis
MNMKICSAAALGAIISISSLSSAHAAVLHKEDTAKVQTQQQASITLSKAKTVALKNCKGAVQSAQMKKADGVYVYVIKVLGEDGKIHTFNINRNSGKIVKHHVEHKQAAITKAKAQSIALNKCKGTVTSSALKKENGTYVYIITITASNHTVQTIKVNAENGGICS

SEQ ID NO: 1385 - protein, 430 aa, Bacillus subtilis; identical to SEQ ID NO: 1255

SEQ ID NO: 1386 - protein, 213 aa, Bacillus subtilis
MKKVLLLLFVLTIGLALSACSQSSDASEKEKPKEKKSQEELEKELDKELKKGGEPKTKKDNQIHKIGETFKAGHTNFTVNKVDRVQKGEYMNVGGAVNEETKTIKDDEERLIIEVTMENIGEDSISYNFIGFDLRDKNDQSVRPVFSIEEKGRILMGGTLVSGKKVTGVLSYVIPKGEQKHYTLVYNPFLADTNSSNTEERVKDDIDYLVKLD

SEQ ID NO: 1387 - protein, 519 aa, Bacillus subtilis
MVFVTHASADQSIKYDHTYQTPSYIIEKSPQKPVQNTTQKESLFSYLDKHQTQFKLKGNANSHFRVSKTIKDPKTKQTFFKLTEVYKGIPIYGFEQAVAMKENKQVKSFFGKVHPQIKDVSITPSISEKKAIHAARRELEASIGKIEYLDGEPKGELYIYPHDGEYDLAYLVRLSTSEPEPGYWHYFIDAKNGKVIESFNAIHETAGTGIGVSGDEKSFDVREQNGRFYLADETRGKGINTFDAKNLNETLFTLLSQLIGYTGKEIVSSTSVFNEPAAVDAHANAQAVYDYYSKTFGRDSFDQNGARITSTVHVGKQWNNAAWNGVQMVYGDGDGSKFKPLSGSLDIVAHEITHAVTQYSAGLLYQGEPGALNESISDIMGAMADRDDWEIGEDVYTPGIAGDSLRSLEDPSKQGNPDHYSNRYTGTEDYGGVHINSSIHNKAAYLLAEGGVHHGVQVEGIGREASEQIYYRALTYYVTASTDFSMMKQAAIEAANDLYGEGSKQSVSVEKAYEAVGIL

SEQ ID NO: 1388 - protein, 299 aa, Bacillus subtilis
MNITKVLSGAALGTIISISSFTSAHAAVIQKDDTSTKVETKQQASITIAKAKQVALNKCKGTVQTAQMKKVNGTYVYVVKVLGEDGKQHTMNVNCNSGKVVKHDVQKKQSYISKTKAQSIALKNCKGAVQSSELKQENGVYAYVVKVMGEDGSLHTFHINGENGKVAKHEQKKQAHLSKTKAHQIALNKCKGAVQSSELKKENGAYIYVVKVLGEDGSTHKIHVNCDSGKIVKQEVQKKNAAVTKTKAHQIALNKCKGTVKSTDLKKENGTFVYVIKITAQNHTEQTVKVNAENGSICK

SEQ ID NO: 1389 - protein, 250 aa, Bacillus subtilis
MYEVTGSLFNGGIIMRRILSILVFAIMLAGCSSNASTEKQHAGGEKTVKAEPQSTSSQKDSTDDYQPNSQVTDDRTLHKVGQTFSDDKGKAVLKDIKQVNKTYKIGDVELTVKEMKLIHLRPDYSMIDYFHELTHDEEFDFVKVFVDIKNTSTKKVNVAPIALMKTNTGETFDWNKDIYLEELNGELEGGAEKSGNLGFIVNASSGHAHDKAADAEKKTKEIKWIEITTSDVFDHNHKKISDAQKIKIKF

SEQ ID NO: 1390 - protein, 170 aa, Bacillus subtilis; identical to SEQ ID NO: 1329

SEQ ID NO: 1391 - protein, 354 aa, Bacillus subtilis; identical to SEQ ID NO: 1319

SEQ ID NO: 1392 - protein, 473 aa, Bacillus subtilis
MKGAAFVKKEGLKQKALEIGRVPTHLKLEIEDYGGDDKRAYFCWTDPQDENTGIIVELGPDGELESLSRDIEPESGERLSEEKLEDIMRQFVETHYPEALSAFVREENDRAYGDKVRFSYVQMEAGLPLPMSGFMADVSLSGEIVYFRYYGEAGSIIKPKRVADVEEALAFIKKDVEFDLLFEVLHRSVYRNGDDQPHLVYEPECRAITVPADLVQEEQGGVDDDDDYREPESFPLPLFEGIREKADPDSMIGIENGFVKEREADLGDGRIGIVWRNPDDPVYQPADKSMDSWFKGRTHQVLKTIYNKETGKLEGVMSFMEEKGPLTVTLAECEKIALRFLFALFPNADQYFRIRYDEKDEEENAVAGFTFEAHCHGVPLRFGQIRICVSRQTGYITVYMGPDIDPNKLATIDPVPAISVEQAKSIFWQHFKVELGWEREYGDDEEHSYRLVYKPVYPHFIDAHTGEPVFSIW

SEQ ID NO: 1393 - protein, 212 aa, Bacillus subtilis
MFGLVMGFSQFQSSTAFAADKVVHETIIVPKNTTYDGKGQRFVAGKELGDGSQSENQDPVFRVEDGATLKNVVLGAPAADGVHTYGNVNIQNVKWEDVGEDALTVKKEGKVTIDGGSAQKASDKIFQINKASTFTVKNFTADNGGKFIRQLGGSTFHVDVIIDKCTITNMKEAIFRTDSKTSTVRMTNTRYSNVGQKWIGVQHIYENNNTQF

SEQ ID NO: 1394 - protein, 1177 aa, Bacillus subtilis
MYTFEAVKAAEPQQPISIEKAIQQKEGQALIEGYAVGQAVSPQHYKLTSPFSNDYNVALADRKNETSPDHILPVQIPSAFRSQFGLQTNPLLLGKKITVQGKLENYFNTTGLKNVQSMNVTDDTKTPPAEQPVTINEARGRLNEEVTIKGIIKADQNAIGGGKLSTFLQDETGGINIYSPSPEQFPELKEGMDVTVTGKIASYQGLKEIVPSSSGIKINQSNQSLPAPKHLTINELINGSLGDQYEGRLVKLTAFVSSIPSSPAGGGYNVTMIDDDHHAMTLRVMNETGVINELDEGKWYDFTGVLSRYQTFQLLPRKSADLKLLEEQPAPPSAEGEYEGIVDRVVDGDTIHLKSPVLGTTKIRFVNVDTPETYHTPKNDADENQLRFGKKASDYLKTVLSPGDKITVKVGSEAKDSYGRLLGQVITESGSNVNLELVKNGYAPTYFIWPVDNEEDYQQFQAAVAAAKKDQKGIWNENDPLMEMPFEFRAREQGKGLTRYVGDSSNKTYVKPADWKKVAVENRIFFASASEAESAGYKKRQTAPQEHVPLRILSMNDLHGKIDQQYELDLDGNGTVDGTFGRMDYAAAYLKEKKAEKKNSLIVHAGDMIGGSSPVSSLLQDEPTVELMEDIGFDVGTVGNHEFDEGTDELLRILNGGDHPKGTSGYDGQNFPLVCANCKMKSTGEPFLPAYDIINVEGVPVAFIGVVTQSAAGMVMPEGIKNIEFTDEATAVNKAAKELKKKGVKAIAVLAHMSAEQNGNAITGESADLANKTDSEIDVIFAAHNHKVVNGEVNGKLIVQAFEYGKAIGVVDVEIDKTTKDIVKKSAEIVYVDQSKIEPDVSASAILKKYETIAEPIISEVVGEAAVDMEGGYSNDGDTPLGNLIADGMRTAMKTDFALMNGGGIREALKKGPITWGDLYNIQPFGNVLTKLEIKGKDLREIINAQISPVFGPDYSISGFTYTWDKETGKAVDLKMADGTEIQPDATYTLTVNNFMATATGTKYQPIGLLGKNPVTGPEDLEATVEYVKSFDEPIAYTKEGRIKLAEASDIEDPVTEDPITEEPGDDPVTEDPIKEDPRPGEDLPDIKETPGTAPVHQLPPSAISRFNEIPINNTKNADTANSISTLPLRNEGGESGSEHPLPDTSANYYNFIVIGAAVTLSGTYLYVRRKRSASRT

SEQ ID NO: 1395 - protein, 161 aa, Bacillus subtilis; identical to SEQ ID NO: 1334

SEQ ID NO: 1396 - protein, 213 aa, Bacillus subtilis
MAGKLVPCKACGQEIAKGVKKCPNCGKDQRNFFMRHKIITFILAVVVIIIIGNMIGGGGGSEATSKTSSSSKAETEKTYNIGDTVKTEKTEVTVTKVEDRDTVGTQYVEKKASEGGTIVAVQYTIKNVSKKPISSFSIPTVKLVDADGTSYDSDIDASVNYATETKVDNSKILSDLNPNIKVTGVKAFEVDKEAYAKGTWKLKFSNDVIVKIK

SEQ ID NO: 1397 - protein, 170 aa, Bacillus subtilis
MLKKRWMVGLLAGCLAAGGFSYNAFAKENDENRQASSKTDALTEQEAEAIAKTVVDGTVEEIDTDLYNGKEVYEVEIEKEGEDYDVYVDIHTKQALNDPLKEKAEQVAITKEEAEEIALKQTDGTVTESKLDEDDGAYIYEMEIQTKQGTETEFEISAKDGRIIKQEIDD

SEQ ID NO: 1398 - protein, 473 aa, Bacillus subtilis
MKGAAFVKKEELKQKALEIGRVPTHLKLEIEDYGGDDKRAHFCWADPQDENTGIIVELGPDGELESLSRDIEPESGERLSEEKLEDIMRQFVETHHTGALSSFVREENDCAYGDKVRFSYVQMEAGLPLPMSGFMADVSLSGEIVYFRYYGEAGSIIKPERVADVEEALAFIKKEVEFDLLFQVLHRSVYKNGDDQPHLVYEPECRAITVPADLVQEEQGGVDDDDDYREPESFPLPLFEGIHEKADPGSMIGIEKGFVKEREADLGDGRLGIVWRNPDDPMYQPADKSMDSWFKGRTHQVLKTIYNKETGKLEGVMSFMEKEGPLTVTEAECEKIAVRFLFALFPNADQYFRIRYDEKDEEENAVAVFTFEAHCHGVPIRFGQIRICVSCQTGYITVYTGPDIDPNKLATIDPVPAISVEQAKSIFWQHFKVELGWEREYGDDEEHSYRLVYKPVYPHFIDAHTGEPVFSIW

SEQ ID NO: 1399 - protein, 161 aa, Bacillus subtilis; identical to SEQ ID NO: 1354

SEQ ID NO: 1400 - protein, 271 aa, Bacillus subtilis
MKISMQKAAISLLVFTMFFTLMMSETVFAAGLNKDQKRRAEQLTSIFENGTTEIQYGYVERLDDGRGYTCGRAGFTTATGDALEVVEVYTKAVPNNKLKKYLPELRRLAKEESDDTSNLKGFASAWKSLANDKEFRAAQDKVNDHLYYQPAMKRSDNAGLKTALARAVMYDTVIQHGDGDDPDSFYALIKRTNKKAGGSPKDGIDEKKWLNKFFDVRYDDLMNPANHDTRDEWRESVARVDVLRSIAKENNYNLNGPIHVRSNEYGNFVIK

SEQ ID NO: 1401 - protein, 105 aa, Bacillus subtilis
MKLRHLLLGAGLGICTAVVVKQYVMKPYISSEKALRIVKSAFKQRGPIDGSWIYTQPEPYNINGETVQVYKTGITRSAFGELEQYEVMVDAKTGEIVDVIDTIAS

SEQ ID NO: 1402 - protein, 430 aa, Bacillus subtilis; identical to SEQ ID NO: 1255

SEQ ID NO: 1403 - protein, 214 aa, Bacillus subtilis
MKKVLLLLFVLTIGLALSACSQSSDASEKEKPKVKKSQEELEKELDKELKKGGEPKTEKDDQIHKIGETIKVNDINFTVNKVDREQNGQYGDLGGKEYDKIKTLKGNEERLIIEVTLEYVGKGSMEYNRLGLDLKDKKNKSVRSVISLEDKGKMFLGGNLASGKKVTGVVSYVIPKGEQKNYTLVYNPFLTDTRSDRIEESAKYNMDYLIKLEK

SEQ ID NO: 1404 - protein, 1970 aa, Bacillus subtilis
MIISLAIFFFFSQIASYTLTAQAVDVTSSDSQFFDSVTVKDAKGQIVDGSKGNKPALTPGDEVTLTYEWSLKKDKKADSEQDINVEIPKSFTFDKGAEGEIKSADQVIGSYQVPAGSSTMTVKLTTASADSPDAKGTITLPAKFTADVKDDEHTAAALFQLGGGKTQQVIIPVKKEETPDAEAEEPKNDSSDTAGDQEGKDDKPAPSVSKDQKEEEQQPSDDSKSGEASKSDDSKKVSSSSQSAFKSLQTEEKQITQNILTGVTLTDENGKPYDKGNRANTNSPVKISIDWAIPDNLGKTINAGDKYEFDLPKEFIMHNDIVNLPLSAGDTTYGTFSIDTNGHVVMTFNGEVKDSSNVKGTLVINTQFNEKKITGSTTQKVPFPVNSDTPETTVYFKPNVSKTIDKSGVLDKGINPGKVTWTVDVNKKLDQVKNAKLTESLPDGLIYRSVKVYELNVNIDGSVSKGNEVSSGYSVDSKGNVTFDGTIDSAYRLVYETDIDNSAKPSEGGNVTLTNKAAFSGDNLEPISAEATVAAKYGKMIAKSSTGYDGESQTFSWALSYNYGEKQIDQSKASIKDSFGTGDLHLVKDSLKVIPITFGQNGSEQAGTPLKEGEDYTLIDNGSGFEIKFNKTITSAYKITYQTKVNSGVIIDKSTTYTNSVVTGTGDSKEASGIAIQQNLIKGYSNVDYEKKTADWTITVNKNKYFMNNWTLDDQFESGGLVLLDESFKLQDTTNNKTLQKDKDYTLTKKPDHKGFTLALIGDYAKTDSQFKITYTTTFNADYSNEGVKNTAQSTWTDQNGNERTNKVSSGFTPNHQTTNNGFKNGSYNAVSKEITWKIGVNYNGEPTKNSYIKDAITDPQQFVPGSVVVKSYTINKNGSITEGDALDPSKYEVEEPSAKNERTLTVHLKTGDSVPYLIEFKTSLKGQVIDQNQYTNKATYYNDGYADRTLTGSVSVTNGGSLVFKGGKQNGSYIDWSINVNSSQSTLDDVKVTDTPDENQILDADSFKVYQAKYDENGVVKDSSGNLTAGDVELQKDKDYTLDIKTDNTTGEQSFVLKFIGSYKQIDRAYVIKYRSLINIAGTNGHVKNKVSISGTNVKEQTQENTSSIFVAISSGDGSGSGDKGSLTIFKTGEDDKALEGAEFQLWSEDSKQLLRTGTTDVGGKLTFGNIRYGSYVLKEVKAPDGYTISDAYAKGVSVKIDSNSSKTGALHKVINQQNKVTLIKQDEQNNPLAGAVFKLEKKSNDGTYTLIRTDIKSDKNGKVEMNGLPAGYYRLTETQAPEGFIVNTKAIHFSVAKNEKNQVSDVNLGKMTNYQGKVLLTKENAEGQKLEGAVFNIVDQDGKVVQEKLTSDKDGKIEASGLAPGRYAFVEIKAPAGYVLNTKKKVFTISESAAGQPEAADAGIAVNDKGSVELTKEDADGQKLEGAVFKIIDKEGNIVQEGLTSDKNGKVAASGLAPGHYAFVETKAPAGYVLNTEKIEFEISDSSEGKPEATDAGIATNHKGSVELTKENAEGKKLEGAVFNIVDEKGNTVQEELTSDKDGKVKASGLAPGRYAFVETKAPAGYVLNTEKKEFTISESAAGKPKSADAGIAVNYQGSVQLMKEDQDGKGLAGAVFKITDSNGNTVRDDLVSKEGGKIEVDGLAPGSYQFVEKQAPDGYLLSEKPVSFTIKAEYGGKPEQVKATAVNTKNLVVLTKVDQHDQHKVLQGAEFNLTDANGKVLKSGLVTDDKGQITVHGLKAGEYQFVETKAPKDYELDQTPISFKITNTDTKTVEITAENILAPGDVNVKKVDQDDKNTVLEGAEFKLLDESGKPVKTDGYGKELSELWKTDQNGQFTVKGLAPGSYQLIETKAPEGYKLDETPIEFTIEKGQSKAVEIVVSNQKVKTPAPDKHDHPDKPTPGGNGKDDGDHPNTNGTDGSSDGQSNTDKTLPKTGDTDSMLTAMIGILLLMAGGGLAVASRKKQRKG

SEQ ID NO: 1405 - protein, 236 aa, Bacillus subtilis
MRRIVSIFVFAIMLAGCSSNASTEKQHAGGEKTVKAEPQSTSSQKDSTDDYQPNSQVTDDRSLLKVGQTFSDDKGKAVLKDIKQVNETYKIGDVELTVKEMKLIHLRPDYSMIDYFHELTHDEEFDFVKVFVDIKNTSSKKVNVAPIALMKTNTGETFDWNKDIYLEELNGELEGGAEKSGNLGFIVNASSGHAHDKAADAEKKTKEIKWIEITTSDVFDHNHKKISDAQKIKIKF

SEQ ID NO: 1406 - protein, 354 aa, Bacillus subtilis
MFQKKTYAVFLILLLMMFTAACSGSKTSAEKKESETEKSSDIAQVKIKDVSYTLPSKYDKSTSDDQLVLKVNVAVKNTGKDPLNVDSMDFTLYQGDTKMSDTDPEDYSEKLQGSTINADKSVEGNLFFVVDKGKQYELNYTPESYGDKKPKSVTFKIDGKDKKILATADKLQDSAKALSAYIDVLLFGKDNADFEKITGANKNEIVNDFNESAKDGYLSASGLSSTYADSKALDNIVNGIKEGLSKNSSIQAKTTSISKDEAIVEATVKPVDASSLSDRIEDKVKDYYSKNSSASYEEAVKYALQVYPEEFKKLGPASSEKTVEVKMKKNDIDQWQLDMDDYRAAELVEAFIKE

SEQ ID NO: 1407 - protein, 521 aa, Bacillus subtilis
MGLGKKLSVAVAASFMSLSISLPGVQAAEGHQLKENQTNFLSKNAIAQSELSAPNDKAVKQFLKKNSNIFKGDPAKRLKLVESTTDALGYKHFRYAPVVNGVPIKDSQVIVHVDKSDNVYAVNGELHNQSAAKTDNSQKVSSEKALALAFKAIGKSPDAVSNGAAKNSNKAELKAIETKDGSYRLAYDVTIRYVEPEPANWEVLVDAETGSILKQQNKVEHAAATGSGTTLKGATVPLNISYEGGKYVLRDLSKPTGTQIITYDLQNRQSRLPGTLVSSTTKTFTSSSQRAAVDAHYNLGKVYDYFYSNFKRNSYDNKGSKIVSSVHYGTQYNNAAWTGDQMIYGDGDGSFFSPLSGSLDVTAHEMTHGVTQETANLIYENQPGALNESFSDVFGYFNDTEDWDIGEDITVSQPALRSLSNPTKYNQPDNYANYRNLPNTDEGDYGGVHTNSGIPNKAAYNTITKLGVSKSQQIYYRALTTYLTPSSTFKDAKAALIQSARDLYGSTDAAKVEAAWNAVGL

SEQ ID NO: 1408 - protein, 241 aa, Bacillus subtilis
MQVADASLAKNERYPGRILSLKKIVSILFMFGLVMGFSQFQSSTAFAADKVVHETIIVPKNTTYDGKGQRFVAGKELGDGSQSENQDPVFRVEDGATLKNVVLGAPAADGVHTYGNVNIQNVKWEDVGEDALTVKKEGKVTIDGGSAQKASDKIFQINKASTFTVKNFTADNGGKFIRQLGGSTFHVDVIIDKCTITNMKEAIFRTDSKTSTVRMTNTRYSNVGQKWIGVQHIYENNNTQF

SEQ ID NO: 1409 - protein, 225 aa, Bacillus subtilis
MTKTIKTVSFAAAAILVVIICTLLIIRQTHENVLSKETVVKKVEASYEGKVTKATQSKDKKTFDITLENPKGTYFVKADAISADILSMNRVKALNPSAMTEKEAEHLALERVPGTVKKQTRQSRVAIYTIQNEDGKTYEVKVDMQAKAVLSADQISKDQQKTPITKKEAKTIAERKTGGTADDADLEESEGTLIFEVDVDLPDDKEATVKINAYTGKVANIVYED

SEQ ID NO: 1410 - protein, 1195 aa, Bacillus subtilis
MRRILHIVLITALMFLNVMYTFEAVKAAEPQQPISIEKAIQQKEGQALVEGYAVGQAVSPQHYKLTSPFSNDYNVALADRKNETSPDHILPVQIPSAFRSQFGLQTNPLLLGKKITVQGKLENYFNTTGLKNVQSMNVTDDTKTPPAEQPVTINEARGRLNEEVTIKGIITADQNAIGGGKLSTFLQDETGGINIYSPSPEQFPELKEGMDVTVTGKITSYQGLKEIVPSSSGIKINQSNQSLPAPKHLTINELINGSLGDQYEGRLVKLTAFVSSIPSSPAGGGYNVTMIDDDHHAMTLRVMNETGVINELDEGKWYEFTGVLSRYQTFQLLPRKSADLKLLEDQPAPPSAEGEYEGIVDRVVDGDTIHLKSPVLGTTKIRFVNVDTPETYHTPKNDADENQLRFGKKASDYLKTVLSPGDKITVKVGSEAKDSYGRLLGQVITESGSNVNLELVKNGYAPTYFIWPVDNEEDYQQFQAAVATAKKDQKGIWNENDPLMEMPFEFRAREQGKGLTRYVGDSSNKTYVQPADWKKVAVENRIFFASASEAESAGYKKRQTAPQEHVSLRILSMNDLHGKIDQQYELDLDGNGTVDGTFGRMDYAAAYLKEKKAEKKNSLIVHAGDMIGGSSPVSSLLQDEPTVELMEDIGFDVGTVGNHEFDEGTDELLRILNGGDHPKGTSGYDGQNFPLVCANCKMKSTGEPFLPAYDIINVEGVPVAFIGVVTQSAAGMVMPEGIKNIEFTDEATAVNKAAKELKKKGVKAIAVLAHMSAEQNGNAITGESADLANKTDSEIDVIFAAHNHKVVNGEVNGKLIVQAFEYGKAIGVVDVEIDKTTKDIVKKSAEIVYVDQSKIEPDVSTSAILKKYETIAEPIISEVVGEAAVDMEGGYSNDGDTPLGNLIADGMRTAMKTDFALMNGGGIREALKKGPITWGDLYNIQPFGNVLTKLEIKGKDLREIINAQISPVFGPDYSISGFTYTWDKETGKAVDLKMADGTEIQPDATYTLTVNNFMATATGAKYQPIGLLGKNPVTGPEDLEATVEYVKSFDEPIAYTKEGRIKLAEASDIEDPVTEDPITEEPGDDPVTEDPIKEDPRPGEDLPDIKETPGTAPVHQLPPSAISRFNEIPINNTKTADTANSISTLPLRNEGGESGSEHPLPDTSANYYNFMVIGAAVTLSGTYLYVRRKRSASRT

SEQ ID NO: 1411 - protein, 224 aa, Bacillus subtilis
MNIKAVFAAGAAVLAVIICAVLIIRQTHEDVLSKEAVVKKVEASYEGKVTKVTQSKDKKTYDMTLENPKGTYFIKADAKSANILSMNRVKAMNPSAMTEKEAEHLALERVPGTVKKQTQQNRVATYTIQKEDGETYEVKIDMNAKAVVSADRISGEDQQKTPITKKEAKTIAERETGGTADDADLEKSEGTLIFEVDVDLPDDKEATVKINAYTGKVANIVYED

SEQ ID NO: 1412 - protein, 105 aa, Bacillus subtilis
MKLRHLLLGAGLGICTAVVVKQYVMKPYISSEKALRIVKSAFKQRGPIDGSWIYTQPEPYNVNGETVQVYKTGITRSAFGELEQYEVMVDAKTGEIVDVIDTIAS

SEQ ID NO: 1413 - protein, 171 aa, Bacillus subtilis
MLKKRWMVGLLAGCLAAGGFSYNAFAKENNENTQSVSSKTDALTEQEAKSIAKTVVDGTVDDIDRDIYNGKEVYEVEIEKDGEDYDVYVDINTKQALNDPLKEKAEQVIITKKEAEEIALKQTNGTVTESKLDEDDGAYIYEVEIQTKQGTEAEFDISAKDGRIIKQEIDD

SEQ ID NO: 1414 - protein, 521 aa, Bacillus subtilis
MGLGKKLSVAVAASFMSLSISLPGVQAAESHHLKENQTNFLSKNAIAQSELSAPNDKAVKQFLKKNSNIFKGDPAKRLKLVESTTDALGYKHFRYAPVVNGVPIKDSQVIVHVDKSDNVYAVNGELHNQSAAKTENSQKVSSEKALALAFKAIGKSPDAVSNGKAKNSNKAELKAVETKDGSYRLAYDVTIRYIEPEPANWEVLVDAETGSILKQQNKVEHAAATGSGTTLKGATVPLNISYESGKYVLRDLSKPTGTQIITYDLQNRQSRLPGTLVSSTTNTFTSSSQRAAVDAHYNLGKVYDYFYSTFKRNSYDNKGSKIVSSVHYGTRYNNAAWTGDQMIYGDGDGSFFSPLSGSLDVTAHEMTHGVTQETANLIYENQPGALNESFSDVFGYFNDTEDWDIGEDITVSQPALRSLSNPTKYGQPDNYANYRNLPNTDEGDYGGVHTNSGIPNKAAYNTITKLGVSKSQQIYYRALTTYLTPSSTFKDAKAALIQSARDLYGSTDAAKVEAAWNAVGL

SEQ ID NO: 1415 - protein, 465 aa, Bacillus subtilis
MKKEELKQKALEIGRVPTHLKLEIEDYGDDEKRGHFCWTDPQDEHIGIIVELGPDGQLKSLSRDIEPESGERLSEEKLEDIMRQFVETHYPGALSVFVREEENCTSDDKVRFSYVQMEDGLPLPMSGFMGEVSLSGEIIYFRYYGKAGSIIKPKRVADEEEAFAFIKKDVEFDLLFEVLHRSVYKNGDDQPHLVYEPECRAVTVPADLVKEEQAFDDDDDREPESFPLPLFEGIHEKADLGSMIGIEKGFVKERETDLGDGRIRTVWRNPDDPVYQPADKSMDSWFRGRVHQVLKTIHNKETGKLEGVMSFMEKKGPLTVTEAECEKRALRFLFALFPNADQYFKIKYDEPDEEENEVAGFTFEAHCHGVPLRFGQIRICVSRQTGHITVYMAPDIDPKELEAIHPVPAISAEQAKSIFWQHFKVELGWEREYRDDEEHSYRLVYKPVYPRFIEAHTGEPVFSSW

SEQ ID NO: 1416 - protein, 161 aa, Bacillus subtilis
MRKKALIFTAIFGIIFLAVLLVSASIYKSAMAQKEEGHEAAAAEAKKETDLANVDQVETFVGKEKYYVVKGTDKKGTTLYVWVPANKKAKILSKEAKEGISEDKAAKIIQDEGLVSKQKEVHLAREGNVLLWEVTYLDKEGQYSLSYVDFTTGKILKNITP

SEQ ID NO: 1417 - protein, 266 aa, Bacillus subtilis
ATGATGATGEAGPAGATGATGEAGPAGATGATGEAGPTGATGATGEAGPAGATGATGEAGPTGATGATGATGDVGPAGATGATGEAGPTGATGATGATGDVGPAGATGATGEAGPTGATGATGATGTGAAGLSEYGYIYNLSAQTVAIEADVIFDSTGITTPGITHAPGTSQIAITTPGDYEVTFSVSGVEPNQFTLFLNGAPITNTVYGSGAGTQQNNGQAIIAIAAGDVLTLRNHTSAAAVTLQTLAGGTQTNVNASIVIKKLD

SEQ ID NO: 1418 - protein, 430 aa, Bacillus subtilis
MPYIVDVYAREVLDSRGNPTVEVEVYTETGAFGRALVPSGASTGEYEAVELRDGDKDRYLGKGVLTAVNNVNEIISPELLGFDVTEQNAIDQLLIELDGTENKGKLGANAILGVSMACARAAADFLQIPLYQYLGGFNSKTLPVPMMNIVNGGEHADNNVDIQEFMIMPVGAPNFREALRMGAQIFHSLKSVLSAKGMNTAVGDEGGFAPNLGSNEEALQTIVEAIEKAGFIPGEEVKLAMDAASSEFYNKEDGKYHLSGEGVVKTSAEMVDWYEEMVSKYPIISIEDGLDENDWEGHKLLTERLGKKVQLVGDDLFVTNTKKLAEGIKNGVGNSILIKVNQIGTLTETFDAIEMAKRAGYTAVISHRSGETEDSTIADIAVATNAGQIKTGAPSRTDRVAKYNQLLRIEDQLAETAQYHGINSFYNLNK

SEQ ID NO: 1419 - protein, 212 aa, Bacillus subtilis
MKKVLLLLFVLTIGFALSACSQSSDASEKEKPKEKTQEELEKELDKELKEGNVSKSKKDDQIHKIGETFKAGHTNLTVNKVDRVQKGEYTEVGGAVDAKPKTIKNEEERLIIEVTIENIGKDSISYNFIGFDLKDKNDQSIRPVFSIEEKDRILMGGTLVPGKKVTGVVSYVIPKGEQKNYTLVYNPFFADTTSSNIEERVKDDIDYLVKLD

SEQ ID NO: 1420 - protein, 212 aa, Bacillus subtilis
MAGKLVPCKACGQEIAKGVKKCPNCGKDQRNFFMRHKIITFILAVVVIIIIANIGGGGGSEATSKTSSSSKAETEKTYNIGDTVKTEKTEVTVTKVEDRDTVGTQYVEKKASDGGTIVAVQYTIKNVSKKPISSFSIPTVKLVDADGTSYDSDIDASVNYATETKVDNSKILSDLNPNIKVTGVKAFEVDKEAYAKGTWKLKFSNDVIVKIK

SEQ ID NO: 1421 - protein, 221 aa, Bacillus subtilis
MKKIMSILFMFSLVMGFSQFQSSTAFAADKVVHETIIVPKNTTYDGKGQRFVAGKELGDGSQSENQKPVFHVEDGATLKNVVLGTPAADGVHTYGNVNIQNVKWEDVGEDALTVKKEGKVTIDGGSAQKASDKIFQINKASTFTVKNFTADNGGKFIRQLGGSTFHVDVVIDKCTITNMKEAIFRTDSKTSTVRMTNTRYSNVGQKWIGVQHIYENNNTQF

SEQ ID NO: 1422 - protein, 1980 aa, Bacillus subtilis
MRTRSFPLGLKKSGRIVMIISLAIFFFFSQIASYTLTAQAVDVTSSDSQFFDSVTIKEGNDQVVDGAKGNEPALKPGDEVTLTYEWSLKKDKDTESEQDINVEIPKNFTFDKGAAGEIKSADQVIGSYQVPAGDNTMTVKLTTASADSPEAKGAITLSATFTADVKDDEHTVAALFQLGGGKTQQVIIPVKKDETPDAETEEPKNDSSETAGDQEGTDDKSAPSVSKEQKEEEQQASADTKGGDSSKSDDSNKVSSSSQSAFKSLQTEEKQITQTILTGVTLTDENGKPYDKGNRADTNSPVKISIDWAIPDDLGKTINAGDTYEFDLPKEFIMHNDIVNLPLSAGDTTFGTFSIDTNGHVVMTFNGEVKDSSNVKGTLVINTQFNEKKITGSTTQKIPFPVNSDTPETTVYFKPNVSKTIDKSGALDKGINPGKVTWTVDVNKKLDQVKNAKLTESLPDGLIYRSVKVYELNVNIDGSVSRGNEVSSGYSVDSKGNVTFNGTIDSAYRLVYETDIDNSAKPSEGGNMTLTNKAAFSGDNLEPISAEATVAAKYGKMIAKSSTGYDGESQTFSWALSYNYGEKQIDQSKASIKDSFGTGDLHLVKDSLKVIPITFGQNGSEQAGTPLKEGEDYTLIDNGSGFEVKFNKNITSAYKITYQTKVNSGVIIDKSTTYTNSVVTGTGDSKEASGIAIQQNLIKGYSNVDYEKKTADWTITVNKNNYEMNNWTLDDQFESGGLVLIDDSFKIQDTTNNKTLQKDKDYTLTKKPEHKGFTLALIGDYAKTDSQFKITYTTTFNADYSNESVKNTAQSTWTDQYGNERTNKVSSGFTPNHQTTNNGFKNGSYNAVSKEITWKIGVNYNGEPTKNPYIKDAITDPQQFVPGSVVIKSYTINKNGSITEGNALDPSKYEVEEPSEKNERTLTVHLKTGDSVPYLIEFKTSLKGKVIDQNKYTNKATYHNDGYADRTLTGSVSVVDGGSLIFKGGKQNGSYIDWSINVNSSQSTLDDVKVTDTPDENQILDADSFKVYQAKYDENGVVKDSSGNLIAGDVELQKDKDYTLNIKTDNTTGEQSFVLEFIGSYKQIDRAYVIKYRSLINIAGTSGHVKNKVSISGTNVKEQTQETSSSIFVAISSGDGSGSGEKGSLTIFKTGEDNNALEGADFQLWSEDAKQLLRTGTTDSGGKLTFGNIRYGSYVLKEIKAPDGYTISHAYAKGVSVKIDSNSSKTGALYKVVNQQNKVTLIKQDEHNNPLAGAVFKLEKKSNDGTYTLIRTDIKSDKNGKVEMNGLPAGYYRLTETQAPAGFIVNTKAIHFSIAKNEKNQVSDVNLGAMTNYQGKVSLTKENAEGQKLEGAVFNIVDQDGNIVKEKLTSDKDGKVEASGLTPGRYAFVETKAPSGYVLNTKKKEFTISESAAGKPEAADAGIAVNDKGSVELTKEEADGQKLEGAVFRIIDKEGNTVQEGLTSDENGRVTASGLAPGHYAFVETKAPSGYVLNTEKIEFAISDSAAGKPDPADAGIAINYKGSVELTKENTEGQKLEGAVFNIVDQEGNTVQEELTSDKDGKVKASGLAPGRYAFVETKAPSGYVLNTEKKEFTISESAAGKPEPAEAGIVVNYLGSVQLTKEDQDGKGLAGAVFKITDTNGETVRDDLVSKEDGKIEVDGLAPGSYQFVEKQAPDGYLLSEKPVSFTIKAEYGGKPEQVKVTAVNTKNLVVLTKVDQHDKNKVLQGAEFNLTDANGKVLKSGLTTDEKGQITVHGLKAGEYQFVETKAPKDYHLDQTPISFKITNTDTKPVKITAENILAPGDVKVTKVDQDDKTTVLEGAEFKLLDASGKPVKTDGYGKELPELWKTDKKGQFTVKGLAPGSYQFIETKAPEGYKLDETPIEFTIEKGQPKAVELVVSNQKVKTPTPDKPDKPTPDGNVNGDGHHSKTNGTDGDSKTDKSLPKTGDADSTLTVMIGILLLMAGGGLAVASRKKQRKG

SEQ ID NO: 1423 - protein, 235 aa, Bacillus subtilis
MKRILSIFVFAIVLAGCSSNANTEKQSAGGEQAKATPQSTSSQKDSIDEYQPNSQVTDDRSLLKVGQTFSDDKGKAVLKDIKQVNQTYKIGDVELTVKEMKLIHLRPDYSMIDYFHVLTHDEEFDFVKVFVDIKNTSSKKVNVAPIALMKTNTGETFDWNKDIYLEELNGELEGGAEKSGNLGFIVNASSGHAHDEDADNKKKEKEIKWIEITTSDVFDHNHKKISDAQKIKIEF

SEQ ID NO: 1424 - protein, 354 aa, Bacillus subtilis
MFQKKTYAVFLILLLMMFTAACSGSKTSAEKKNSETEKSSDIAQVKIKDVSYTLPSKYDKSTSDDQLVLKVNVAVKNTGKEPLNVDSMDFTLYQDDTKMSDTDPEDYNEKLRSSTINADKSVEGSLFYVVDKGKKYELNYTPESYGDKKPKSVTFKIDGKDKKILATADQLQDSAKALSAYVDVLLFGKDNADFEKITGDNKNKIVSDFNESAKDGYLSASGLSSTYADSKALDNIVNGIKEGLSKNSSIQAKTTSISKDEAIVEATIKPVDASSLSDRIEDRVKDYYSKNSGASYEDAVKYALQVYPEEFKKLGPASSEKTVEVKMKKNDIDQWQLDMDDYRAAELVEAFIKE

SEQ ID NO: 1425 - protein, 1194 aa, Bacillus subtilis
MRRILHIVLITALMFLNVMYTCEAVKAAEPQQPISVDKAIQQKEGQALVEGYAVGQAVSPQHYKLTSPFSNDYNVALADSKNETLSDHILPVQIPSAFRSQFGLQTNPLLFGKKITVQGKLEDYFNTTGLKNVQSMELTDDTKTPPAEQPVTINEARGRLNEEVTIKGIVTADQGAIGGGKLSTFMQDETGGINIYSPSPKPFPELKEGMDITVTGKITTYQGLTEIVPNSSGIKINQTNQSIPAPKHLTINELMNSSLGDQFEGRLVTLKAFVSSIPNSPAGGGYNVTMVDEVHHAMTLRVMNETGVIDELDEGKWYEFTGVLSRYQSFQLLPRKSSDLKLLEEQPSPPSAEGEYEGIVDRVVDGDTIHLKTPVLGTTKIRFVNVDTPETYHTPKNEADENQLRFGKKASDYLKTVLSPGDKITVKVGSEAKDNYGRLLGQVITESGSNVNLELVKNGYAPTYFIWPVDNEEDYQQFQTAVAAAKKEQKGIWNEDDPLLEMPFEFRAREQGKGLTRYVGDSSNKTYVQPADWKQVAVENRIFFASASEAENAGYKKSQTAPQENVPLRILSMNDLHGKIDQQYELDLDGNGTADGTFGRMDYAAAYLKEKKAEKKNTLIVHAGDMIGGSSPVSSLLQDEPTVELMEDIGFDVGTVGNHEFDEGTDELLRILNGGDHPKGTSGYDGQNFPLVCANCKMKSTGEPFLPAYDIINVEGIPVAFIGVVTQSAAGMVMPDGIKNIEFTDEVTAVNKAAEELKKKGVKAIAVLAHMSAEQNGAAITGESADLANKTDSEIDVIFAAHNHKVVNGEVNGKLIVQAFEYGKAIGVVDVELDKTTKDIVKKSADIVYVDQSKIEPDASASAILKKYQTLAEPIISEVVGEAAVDMEGGYSNDGDTPLGNLIADGMRAAMKTDFALMNGGGIREALKKGPITWGDLYNIQPFRNVLTKLKIKGKDLREIINAQISPVFGPDYSISGFTYTWDKETGKAVDIKLADGTEIQPDATYTLTVNNFMATATGTKYQPIGLLGKNPVTGPEDLEATVAYVKGFDEPIAYTKEGRIKLAEASDIEDPVTDDPVTEEPGGDPGTEQPFKEDPEPGEGQTDIKETPSTVPVHQLTPSDILRLGEMPSGEKNANTAGKISTLPLQNDTAERGPDHQLPDTSAGYYNFMVIGAAVTLSGTYLYVRRKRSASRT

SEQ ID NO: 1426 - protein, 521 aa, Bacillus subtilis
MGLGKKLSVAVAASFMSLTISLPGVQAAENPQLKENLTNFVPKHSLVQSELPSVSDKAIKQYLKQNGKVFKGNPSERLKLIDHTTDDLGYKHFRYVPVVNGVPVKDSQVIIHVDKSNNVYAINGELNNDASAKTANSKKLSANQALDHAFKAIGKSPEAVSNGNVANKNKAELKAAATKDGKYRLAYDVTIRYIEPEPANWEVTVDAETGKVLKKQNKVEHAAATGTGTTLKGKTVSLNISSESGKYVMRDLSKPTGTQIITYDLQNRQYNLPGTLVSSTTNQFTTSSQRAAVDAHYNLGKVYDYFYQTFKRNSYDNKGGKIVSSVHYGSKYNNAAWIGDQMIYGDGDGSFFSPLSGSMDVTAHEMTHGVTQETANLNYENQPGALNESFSDVFGYFNDTEDWDIGEDITVSQPALRSLSNPTKYGQPDHYKNYRNLPNTDAGDYGGVHTNSGIPNKAAYNTITKIGVKKAEQIYYRALTVYLTPSSSFKDAKAALIQSARDLYGSQDAASVEAAWNAVGL

SEQ ID NO: 1427 - protein, 521 aa, Bacillus subtilis; identical to SEQ ID NO: 1279

SEQ ID NO: 1428 - protein, 521 aa, Bacillus subtilis
  MOD_RES (338)..(338): Any amino acid
MGLGKKLSVAVAASFMSLTISLPGVQAAENPQLKENLTNFVPKHSLVQSELPSVSDKAIKQYLKQNGKVFKGNPSERLKLIDHTTDDLGYKHFRYVPVVNGVPVKDSQVIIHVDKSNNVYAINGELNNDASAKTANSKKLSANQALDHAFKAIGKSPEAVSNGNVANKNKAELKAAATKDGKYRLAYDVTIRYIEPEPANWEVTVDAETGKVLKKQNKVEHAAATGTGTTLKGKTVSLNISSENGKYVMRDLSKPTGTQIITYDLQNRQYNLPGTLVSSTTNQFTTSSQRAAVDAHYNLGKVYDYFYQTFKRNSYDNRGGKIVSSVHYGSRYNNAAWXGDQMIYGDGDGSFFSPLSGSMDVTAHEMTHGVTQETANLNYENQPGALNESFSDVFGYFTDTEDWDIGEDITVSQPALRSLSNPTKYGQPDHYKNYQNLPNTDAGDYGGVHTNSGIPNKAAYNTITKIGVKKAEQIYYRALTVYLTPSSSFKDAKAALIQSARDLYGSQDAASVEAAWNAVGL

SEQ ID NO: 1429 - protein, 488 aa, Bacillus subtilis
FMSLTISLPGVQAAENPQLKENLTNFVPKHSLVQSELPSVSDKAIKQYLKQNGKVFKGNPSERLKLIDHTTDDLGYKHFRYVPVVNGVPVKDSQVIIHVDKSNNVYAINGELNNDASAKTANSKKLSANQALDHAFKAIGKSPEAVSNGNVANKNKAELKAAATKDGKYRLAYDVTIRYIEPEPANWEVTVDAETGKVLKKQNKVEHAAATGTGTTLKGKTVSLNISSENGKYVMRDLSKPTGTQIITYDLQNRQYNLPGTLVSSTTNQFTTSSQRAAVDAHYNLGKVYDYFYQTFKRNSYDNRGGKIVSSVHYGSRYNNAAWIGDQMIYGDGDGSFFSPLSGSMDVTAHEMTHGVTQETANLNYENQPGALNESFSDVFGYFTDTEDWDIGEDITVSQPALRSLSNPTKYGQPDHYKNYQNLPNTDAGDYGGVHTNSGIPNKAAYNTITKIGVKKAEQIYYRALTVYLTPSSSFKDAKAALIQSARD

SEQ ID NO: 1430 - protein, 521 aa, Bacillus subtilis
MGLGKKLSVTVAASFMSLTISLPGVQAAENPQLKENLTNFVPKHSLVQSELPSVSDKAIKQYLKQNGKVFKGNPSERLKLIDHTTDDLGYKHFRYVPVVNGVPVKDSQVITHVDKSNNVYAINGELNNDASAKTANSKKLSANQALDHAFKAIGKSPEAVSNGNVANKNKAELKAAATKDGKYRLAYDVTIRYIEPEPANWEVTVDAETGKVLKKQNKVEHAAATGTGTTLKGKTVSLNISSENGKYVMRDLSKPTGTQIITYDLQNRQYNLPGTLVSSTTNQFTTSSQRAAVDAHYNLGKVYDYFYQTFKRNSYDNRGGKIVSSVHYGSRYNNAAWIGDQMIYGDGDGSFFSPLSGSMDVTAHEMTHGVTQETANLNYENQPGALNESFSDVFGYFTDTEDWDIGEGITVSQPALRSLSNPTKYGQPDHYKNYQNLPNTDAGDYGGVHTNSGIPNKAAYNTITKIGVKKAEQIYYRALTVYLTPSSSFKDAKAALIQSARDLYGSQDAASVEAAWNAVGL

SEQ ID NO: 1431 - protein, 506 aa, Bacillus subtilis
MSLSISLPGVQAAEGHQLKENQTNFLSKNAIAQSELSAPNDKAVKQFLKKNSNIFKGDPSKRLKLVESTTDALGYKHFRYAPVVNGVPIKDSQVIVHVDKSDNVYAVNGELHNQSAAKTDNSQKVSSEKALALAFKAIGKSPDAVSNGAAKNSNKAELKAIETKDGSYRLAYDVTIRYVEPEPANWEVLVDAETGSILKQQNKVEHAAATGSGTTLKGATVPLNISYEGGKYVLRDLSKPTGTQIITYDLQNRQSRLPGTLVSSTTKTFTSSSQRAAVDAHYNLGKVYDYFYSNFKRNSYDNKGSKIVSSVHYGTQYNNAAWTGDQMIYGDGDGSFFSPLSGSLDVTAHEMTHGVTQETANLIYENQPGALNESFSDVFGYFNDTEDWDIGEDITVSQPALRSLSNPTKYNQPDNYANYRNLPNTDEGDYGGVHTNSGIPNKAAYNTITKLGVSKSQQIYYRALTTYLTPSSTFKDAKAALIQSARDLYGSTDAAKVEAAWNAVGL

SEQ ID NO: 1432 - protein, 521 aa, Bacillus subtilis
MGLGKKLSVAVAASFMSLTISLPGVQAAENPQLKENLTNFVPKHSLVQSELPSVSDKAIKQYLKQNGKVFKGNPSERLKLIDHTTDDLGYKHFRYVPVVNGVPVKDSQVIIHVDKSNNVYAINGELNNDASAKTANSKKLSANQALDHAFKAIGKSPEAVSNGNVANKNKAELKAAATKDGKYRLAYDVTIRYIEPEPANWEVTVDAETGKVLKKQNKVEHAAATGTGTTHKGKTVPLNISSESGKYVMRDLSKPTGTQIITYDLQNRQYNLPGTLVSSTTNQFTTSSQRAAVDAHYNLGKVYDYFYQTLKRNSYDNKGGKIVSSVHYGGKYNNAAWIGDQMIYGDGDGSFFSPLSGSMDVTAHEMTHGVTQETANLNYENQPGALNESFSDVFGYFNDTEDWDIGEDITVSQPALRSLSSPTKYGQPDHYKNYRNLPNTDAGDYGGVHTNSGIPNKAAYNTITKIGVKKAEQIYYRALTVYLTPSSSFKDAKAALIQSARDLYGSQDAASVEAAWNAVGL

SEQ ID NO: 1433 - protein, 596 aa, Bacillus subtilis
MKKVFSNKKFLVFSFIFAMILSLSFFNGESAKASSDKSYKIIGYYPSWGAYGRDFQVWDMDASKVSHINYAFADICWEGRHGNPDPTGPNPQTWSCQDENGVIDVPNGSIVMGDPWIDVQKSNAGDTWDEPIRGNFKQLLKLKKNHPHLKTFISVGGWSWSNRFSDVAADPAARENFAASAVNFLRKYGFDGVDLDWEYPVSGGLPGNSTRPEDKRNYTLLLQDVREKLDAAEAKDGKKYLLTTVSGASPEYVSNTELDKIAETVDWINIMTYDFNGGWQSISAHNAPLFYDPKAKEAGVPNAETFNIESTVKRYKEAGVKADKLVLGTPFYGRGWSNCEPADNGEYQKCGPAKEGTWEKGVFDFSDLEKNYINKNGYKRYWNDRAKVPFLYNAENGNFITYDDEESYGYKTDLIQSNGLSGAMFWDFSGDSNQTLLNKLAADLGFAPGGGNPEPPSSAPDNLRVTEKTATSISLAWDAPSDGANIAEYVLSYEGGAVSVKDTSATIGQLKPNTTYSFTVSAKDADGKLHTGPTIEAATNSDQTCGYNEWKDTAVYTGGDRVVFNGKVYEAKWWTKGEQPDQAGESGVWKLIGDCK

SEQ ID NO: 1434 - protein, 341 aa, Bacillus subtilis
MRNLTKTSLLLAGLCTAAQMVFVTHASADQSIKYDHTYQTPSYIIEKSPQKPVQNTTQKESLFSYLDKHQTQFKLKGNANSHFRVSKTIKDPKTKQTFFKLTEVYKGIPIYGFEQAVAMKENKQVKSFFGKVHPQIKDVSITPSISEKKAIHAARRELEASIGKIEYLDGEPKGELYIYPHDGEYDLAYLVRLSTSEPEPGYWHYFIDAKNGKVIESFNAIHETAGTGIGVSGDEKSFDVREQNGRFYLADETRGKGINTFDAKNLNETLFTLLSQLIGYTGKEIVSSTSVFNEPAAVDAHANAQAVYDYYSKTFGRDSFDQNGARITSTVHVGKQWNNAA

SEQ ID NO: 1435 - protein, 596 aa, Bacillus subtilis
MKKVFSNKKFLVFSFIFAMILSLSFFNGESAQASSDKSYKIIGYYPSWGAYGRDFQVWDMDASKVSHINYAFADICWEGRHGNPDPTGPNPQTWSCQDENGVIDVPNGSIVMGDPWIDVQKSNAGDTWDEPIRGNFKQLLKLKKNHPHLKTFISVGGWSWSNRFSDVAADPAARENFAASAVNFLRKYGFDGVDLDWEYPVSGGLPGNSTRPEDKRNYTLLLQDVREKLDAAEAKDGKKYLLTIASGASPEYVSNTELDKIAETVDWINIMTYDFNGGWQSISAHNAPLFYDPKAKEAGVPNAETFNIESTVKRYKEAGVKADKLVLGTPFYGRGWSNCEPADNGEYQKCGPAKEGTWEKGVFDFSDLEKNYINKNGYKRYWNDRAKVPFLYNAENGNFITYDDEESYGYKTDLIQSNGLSGAMFWDFSGDSNQTLLNKLAADLGFAPGEGNPEPPSSAPGNLRVTEKTATSISLAWDAPSDGANIAEYVLSYEGGAVSVKDTSATIGQLKPNTTYSFTVSAKDADGKLHTGPTIEATTNSDQTCGYNEWKDTAVYTGGDRVVFNGKVYEAKWWTKGEQPDQAGESGVWKLIGDCK

SEQ ID NO: 1436 - protein, 271 aa, Bacillus subtilis; identical to SEQ ID NO: 1357

SEQ ID NO: 1437 - protein, 521 aa, Bacillus subtilis; identical to SEQ ID NO: 1352

SEQ ID NO: 1438 - protein, 226 aa, Bacillus subtilis
MTKTIKIVSFAAAAILVVIICTFLIIRQTHENVLSKETVVKKVEASYEGKVTKATQSKDKKTYDITLENPKGTYFVKADAISADILSMNRVKAVNPSAMTEKEAEHLALERVPGTVKKQTRQSRVATYTIQKEDGKTYEVKVDMQAKTVLSADQISSKDQQKTPITKKEAKTIAERKTGGTADDADLEESEGTLIFEVDVDLPDNKEATVKINAYTGKVANIVYED

SEQ ID NO: 1439 - protein, 170 aa, Bacillus subtilis; identical to SEQ ID NO: 1353

SEQ ID NO: 1440 - protein, 105 aa, Bacillus subtilis; identical to SEQ ID NO: 1340

SEQ ID NO: 1441 - protein, 538 aa, Bacillus subtilis
MRNLTKTSLLLAGLCTAAQMVFVTHASADQSIKYDHTYQTPSYIIEKSSQKPVQNTTQKESLFSYLDKHQTQFKLKGNANSHFRISKTIKDPKTKQTFFKLTEVYKGIPIYGFEQAVAMKENKQVKSFFGKVHPQIKDVSITPSISEKKAIHTARRELEASIGKIEYLDGEPKGELYIYPHDGEYDLAYLVRLSTSEPDPGYWHYFIDAKNGKVIESFNAIHEAAGTGIGVSGDEKSFDVTEQNGRFYLADETRGKGINTFDAKNLNETLFTLLSQLIGYTGKEIVSGTSVFNEPAAVDAHANAQAVYDYYSKTFGRDSFDQNGARITSTVHVGKQWNNAAWNGVQMVYGDGDGSKFKPLSGSLDIVAHEITHAVTQYSAGLLYQGEPGALNESISDIMGAMADRDDWEIGEDVYTPGIAGDSLRSLEDPSKQGNPDHYSNRYTGTEDYGGVHINSSIHNKAAYLLAEGGVHHGVQVEGIGREASEQIYYRALTYYVTASTDFSMMKQAAIEAANDLYGEGSKQSASVEKAYEAVGIL

SEQ ID NO: 1442 - protein, 521 aa, Bacillus subtilis; identical to SEQ ID NO: 1279

SEQ ID NO: 1443 - protein, 161 aa, Bacillus subtilis; identical to SEQ ID NO: 1334

SEQ ID NO: 1444 - protein, 472 aa, Bacillus subtilis
MKGAAFVKKEGLKQKALEIGRVPTHLKLEIEDYGGDDKRAHFCWADPQDENTGIIVELGPDGELESLSRDIEPESGERLSEEKLEDIMRQFVETHHPGALSAFVREENDRAYGDKVRFSYVQMEAGLPLPMSGFMADVSLSGEIVYFRYYGEAGSIIKPKRVADVEEALAFIKKDVEFDLLFQVLHRSVYKNGDDQPHLVYEPECRAITVPADLVQEEQAVDDDDDYREPESFPLPLFEGIREKADPDSMIGIEKGFVKEREADLGNGRIGIVWRNPDDPVYQPADKSMDSWFKGRTHQVLKTIYHKETGKLEGVMSFMEKKGPLTVTLAECEKIALRFLFALFPNADQYFRIRYDENDEEENAVAGFTFEAHCHGVPIRFGQIRICVSRQTGYITVYMGPDIDPNKLATIDPVPAISVEQAKSIFWQHFKVELGWEREYGDDEEHSYRLVYKPVYPHFIDAHTGEPVFSIW

SEQ ID NO: 1445 - protein, 1197 aa, Bacillus subtilis
MRRILHIVLITALMFLNVMYTCEAVKAAAAEPQQPISIEKAIQQKEGQALVEGYAVGQAVSPQHYKLTSPFSNDYNVALADRKNETSPEHILPVQIPSAFRSQFGLQTNPLLLGKKITVQGKLENYFNTTGLKNVQSMNVTDDTKTPPAEQPVTINEARGRLNEEVTIKGIITADQNAIGGGKLSTFLQDETGGINIYSPSPEQFPELKEGMDVTVTGKITSYQGLKEIVPNSSGIKINQSNQSLPAPKHLTINELINGSLGDKYEGRLVKLTAFVSSIPSSPAGGGYNVTMIDDDHQAMTLRVMNETAVINELDEGKWYEFTGVLSRYQTFQLLPRKSADLKLLEEQPAPPSAEGEYEGIVDRVVDGDTIHLKSPVLGTTKIRFVNVDTPETYHTPKNDADENQLRFGKKASDYLKTVLSPGDKITVKVGSEAKDSYGRLLGQVITESGSNVNLELVKNGYAPTYFIWPVDNEEDYQQFQAAVAAAKKDQKGIWNENDPLMEMPFEFRAREQGKGLTRYVGDSSNKTYVQPADWKKVAVENRIFFASASEAESAGYKKRQTAPQEHVPLRILSMNDLHGKIDQQYELDLDGNGIADGTFGRMDYAAAYLKEKKAEKKNSLIVHAGDMIGGSSPVSSLLQDEPTVELMEDIGFDVGTVGNHEFDEGTDELLRILNGGDHPKGTSGYDGQNFPLVCANCKMKSTGEPFLPAYDIINVEGVPVAFIGVVTQSAAGMVMPEGIKNIEFTDEVTAVNKAAEELKKKGVKAIAVLAHMSAGQNGNAITGESADLANKTDSEIDMIFAAHNHQVVNGEVNGKLIVQAFEYGKAIGVVDVEIDKTTKDIVKKSAEIVYVDQSKIEPDVSASAILKKYETIAEPIISEVVGEAAVDMEGGYSNDGDTPLGNLIADGMRAAMKTDFALMNGGGIREALKKGPITWGDLYNIQPFGNVLTKLEIKGKDLREIINAQISPVFGPDYSISGFTYTWDKETGKAVDMKMADGTEIQPDATYTLTVNNFMATATGTKYQPIGLLGKNPVTGPEDLEAAVEYVKSFDEPIAYTKEGRIKLAAASDIEDPVTEDPITEEPGDDPGTEDPIKEDPRPDEDLHDIKETPGTAPVHQLPPSAISRFNEIPINNTKTADTANSISTLPLQTETAESGSDHQLPDTSAGYYNFMVIGAAVTLSGTYLYVRRKRSASRT

SEQ ID NO: 1446 - protein, 236 aa, Bacillus subtilis
MRRILSIFVFAIMLAGCSSNASTEKQHAGGEKTVKAEPQSTSSQKDSTDDYQPNSQVTDDRSLLKVGQTFSDDKGKAVLKDIKQVNKTYKIGDVELTVKEMKLIHLRPDYSMIDYFHELTHDEEFDFVKVFVDIKNTSSKKVNVAPIALMKTNTGETFEWNKDIYLEELNGELEGGAEKSGNLGFIVNASSRHAHDKAEDAEKKTKEIKWIEITTSDVFDHNHKKISDAQKIKIKF

SEQ ID NO: 1447 - protein, 221 aa, Bacillus subtilis
MKKFVSILFMFGLVMGFSQFQSSTAFAADKVVHETIIVPKNTTYDGKGQRFVAGKELGDGSQSENQDPVFRVEDGATLKNVVLGAPAADGVHTYGNVNIQNVKWEDVGEDALTVKKEGKVTIDGGSAQKASDKIFQINKASTFTVKNFTADNGGKFIRQLGGSTFHVDVIIDKCTITNMKEAIFRTDSKTSTVRMTNTRYSNVGQKWIGVQHIYENNNTQF

SEQ ID NO: 1448 - protein, 430 aa, Bacillus subtilis; identical to SEQ ID NO: 1255

SEQ ID NO: 1449 - protein, 271 aa, Bacillus subtilis
MKISMQKAAISLLVFTMFFTLMMSETVFAAGLNKDQKRRAEQLTSIFENGTTEIQYGYVERLDDGRGYTCGRAGFTTATGDALEVVEVYTKAVPNNKLKKYLPELRRLAKEESDDTSNLKGFASAWKSLANDKEFRAAQDKVNDRLYYQPAMKRSDNAGLKTALARAVMYDTVIQHGDGDDPDSFYALIKRTNKKAGGSPKDGIDEKKWLNKFLDVRYDDLMNPANHDTRDEWRESVARVDVLRSIAKENNYNLNGPIHVRSNEYGNFVIK

SEQ ID NO: 1450 - protein, 214 aa, Bacillus subtilis; identical to SEQ ID NO: 1361

SEQ ID NO: 1451 - protein, 354 aa, Bacillus subtilis; identical to SEQ ID NO: 1319

SEQ ID NO: 1452 - protein, 240 aa, Bacillus subtilis
MCAQLNACGGSSRGPTGPTGATGATGPTGATGITGATGPAGVTGATGITGPTGATGPTGATGATGATGATGATGITGATGITGATGPTGVTGATGITGPTGTGGSVTGNSMYASNTVGSTIAVVLGGSPVPLPNNQSLDGFTVNGGNNMFTVPVAGRYYLSYQINTTLSLLAGSRLMRNGDPIPGSIISPAVSTSSYNDDVFATLDAGDRISLQLFGVVATVILLGGGSTGAALTIIRLN

SEQ ID NO: 1453 - protein, 465 aa, Bacillus subtilis; identical to SEQ ID NO: 1415

SEQ ID NO: 1454 - protein, 224 aa, Bacillus subtilis; identical to SEQ ID NO: 1411

SEQ ID NO: 1455 - protein, 161 aa, Bacillus subtilis; identical to SEQ ID NO: 1416

SEQ ID NO: 1456 - protein, 171 aa, Bacillus subtilis; identical to SEQ ID NO: 1413

SEQ ID NO: 1457 - protein, 105 aa, Bacillus subtilis; identical to SEQ ID NO: 1412

SEQ ID NO: 1458 - protein, 521 aa, Bacillus subtilis; identical to SEQ ID NO: 1414

SEQ ID NO: 1459 - protein, 190 aa, Bacillus subtilis
MGATGATGEAGPAGATGATGATGDVGPAGATGATGEAGPTGATGATGATGTGAAGLSEYGYIYNLSAQTVAIEADVIFDSTGITTPGITHAPGTSQIAITTPGDYEVTFSVSGVEPNQFTLFLNGAPITNTVYGSGAGTQQNNGQAIIAIAAGDVLTLRNHTSAAAVTLQTLAGGTQTNVNASIVIKKLD

SEQ ID NO: 1460 - protein, 1980 aa, Bacillus subtilis; identical to SEQ ID NO: 1422

SEQ ID NO: 1461 - protein, 1194 aa, Bacillus subtilis; identical to SEQ ID NO: 1425

SEQ ID NO: 1462 - protein, 212 aa, Bacillus subtilis; identical to SEQ ID NO: 1420

SEQ ID NO: 1463 - protein, 212 aa, Bacillus subtilis; identical to SEQ ID NO: 1419

SEQ ID NO: 1464 - protein, 235 aa, Bacillus subtilis; identical to SEQ ID NO: 1423

SEQ ID NO: 1465 - protein, 221 aa, Bacillus subtilis; identical to SEQ ID NO: 1421

SEQ ID NO: 1466 - protein, 354 aa, Bacillus subtilis; identical to SEQ ID NO: 1424

SEQ ID NO: 1467 - protein, 430 aa, Bacillus subtilis; identical to SEQ ID NO: 1418

SEQ ID NO: 1468 - protein, 773 aa, Phanerochaete chrysosporium
MLGRSLLALLPFVGLAFSQSASQFTDPTTGFQFTGITDPVHDVTYGFVFPPLATSGAQSTEFIGEVVAPIASKWIGIALGGAMNNDLLLVAWANGNQIVSSTRWATGYVQPTAYTGTATLTTLPETTINSTHWKWVFRCQGCTEWNNGGGIDVTSQGVLAWAFSNVAVDDPSDPQSTFSEHTDFGFFGIDYSTAHSANYQNYLNGDSGNPTTTSTKPTSTSSSVTTGPTVSATPYDYIIVGAGPGGIIAADRLSEAGKKVLLLERGGPSTKQTGGTYVAPWATSSGLTKFDIPGLFESLFTDSNPFWWCKDITVFAGCLVGGGTSVNGALYWYPNDGDFSSSVGWPSSWTNHAPYTSKLSSRLPSTDHPSTDGQRYLEQSFNVVSQLLKGQGYNQATINDNPNYKDHVFGYSAFDFLNGKRAGPVATYLQTALARPNFTFKTNVMVSNVVRNGSQILGVQTNDPTLGPNGFIPVTPKGRVILSAGAFGTSRILFQSGIGPTDMIQTVQSNPTAAAALPPQNQWINLPVGMNAQDNPSINLVFTHPSIDAYENWADVWSNPRPADAAQYLANQSGVFAGASPKLNFWRAYSGSDGFTRYAQGTVRPGAASVNSSLPYNASQIFTITVYLSTGIQSRGRIGIDAALRGTVLTPPWLVNPVDKTVLLQALHDVVSNIGSIPGLTMITPDVTQTLEEYVDAYDPATMNSNHWVSSTTIGSSPQSAVVDSNVKVFGTNNLFIVDAGIIPHLPTGNPQGTLMSAAEQAAAKILALAGGP

SEQ ID NO: 1469 - protein, 516 aa, Phanerochaete chrysosporium
MFRTATLLAFTMAAMVFGQQVGTNTARSHPALTSQKCTKSGGCSNLNTKIVLDANWRWLHSTSGYTNCYTGNQWDATLCPDGKTCAANCALDGADYTGTYGITASGSSLKLQFVTGSNVGSRVYLMADDTHYQMFQLLNQEFTFDVDMSNLPCGLNGALYLSAMDADGGMAKYPTNKAGAKYGTGYCDSQCPRDIKFINGEANVEGWNATSANAGTGNYGTCCTEMDIWEANNDAAAYTPHPCTTNAQTRCSGSDCTRDTGLCDADGCDFNSFRMGDQTFLGKGLTVDTSKPFTVVTQFITNDGTSAGTLTEIRRLYVQNGKVIQNSSVKIPGIDPVNSITDNFCSQQKTAFGDTNYFAQHGGLKQVGEALRTGMVLALSIWDDYAANMLWLDSNYPTNKDPSTPGVARGTCATTSGVPAQIEAQSPNAYVVFSNIKFGDLNTTYTGTVSSSSVSSSHSSTSTSSSHSSSSTPPTQPTGVTVPQWGQCGGIGYTGSTTCASPYTCHVLNPYYSQCY

SEQ ID NO: 1470 - protein, 621 aa, Phanerochaete chrysosporium [sequence omitted]

SEQ ID NO: 1471 - protein, 378 aa, Phanerochaete chrysosporium
MAFKSLIAFVALAAAVRAAPTAVCPDGTRVSHAACCAFIPLAQDLQETIFQNECGEDAHEVIRLTFHDAIAISRSQGPKAGGGADGSMLLFPTVEPNFSANNGIDDSVNNLIPFMQKHNTISAADLVQFAGAVALSNCPGAPRLEFLAGRPNKTIAAVDGLIPEPQDSVTKILQRFEDAGGFTPFEVVSLLASHSVARADKVDQTIDAAPFDSTPFTFDTQVFLEVLLKGVGFPGSANNTGEVASPLPLGSGSDTGEMRLQSDFALAHDPRTACIWQGFVNEQAFMAASFRAAMSKLAVLGHNRNSLIDCSDVVPVPKPATGQPAMFPASTGPQDLELSCPSERFPTLTTQPGASQSLIAHCPDGSMSCPGVQFNGPA

SEQ ID NO: 1472 - protein, 380 aa, Phanerochaete chrysosporium
MAFASSLLALVALAAVTSAAPATTQATCPDGTKVNNAACCAFIPLAQDLQETIFQNDCGEDAHEVIRLTFHDAIAISQSKGPSAGGADGSMLLFPTIEPNFSANNGIDDSVNNLIPFMQKHNTISAGDIVQFTGAVALTNCPGAPQLEFLARRPNKTIPAIDGLIPEPQDSVTSILERFKDAGNFSPFEVVSLLASHSVARADKVDETIDAAPFDTTPFVFDTQIFLEVLLKGVGFPGTRTTRGEVASPLPLTSGSDTGELRLQSDFALARDERTACIWQGFVNEQALMASFKAAMRKLAVLGQHRNTLIDCSDVVPAPKPAVNKPASFPATTGPQDLELSCNTKPFPSLSVDAGAQQTLIPHCSDGDMTCQSVQFNGPA

SEQ ID NO: 1473 - protein, 382 aa, Phanerochaete chrysosporium
MAFGSLLAFVALAAITRAAPTAESAVCPDGTRVTNAACCAFIPLAQDLQETLFQGDCGEDAHEVIRLTFHDAIAISQSLGPQAGGGADGSMLHFPTIEPNFSANSGIDDSVNNLLPFMQKHDTISAADLVQFAGAVALSNCPGAPRLEFMAGRPNTTIPAVEGLIPEPQDSVTKILQRFEDAGNFSPFEVVSLLASHTVARADKVDETIDAAPFDSTPFTFDTQVFLEVLLKGTGFPGSNNNTGEVMSPLPLGSGSDTGEMRLQSDFALARDERTACFWQSFVNEQEFMAASFKAAMAKLAILGHSRSSLIDCSDVVPVPKPAVNKPATFPATKGPKDLDTLTCKALKFPTLTSDPGATETLIPHCSNGGMSCPGVQFDGPA

SEQ ID NO: 1474 - protein, 20 aa, Phanerochaete chrysosporium
  MOD_RES (3)..(3): Any amino acid
  MOD_RES (8)..(8): Any amino acid
  MOD_RES (11)..(11): Any amino acid
  MOD_RES (14)..(16): Any amino acid
AVXHPGTXVSXAAXXXFIPL

SEQ ID NO: 1475 - protein, 408 aa, Phanerochaete chrysosporium
MKLSASFAALALLLPFVQAQSPVWGQCGGIGWTGPTTCTAGNVCQEYSAYYSQCIPASQATSVTSVSTAPNPPPTSHTSTSSAPSGASTSTAKLNTLAKAKGKLYFGTATDNGELSDTAYTAILDDNTMFGQITPANSMKWDATEPQQGQFTFSGGDQIANLAKSNGMLLRGHNCVWYNQLPSWVSNGKFTAAQLTSIIQNHCSTLVTHYKGQVYAWDVVNEPFNDDGSWRTDVFYNTLGTSYVQIALEAARAADPDAKLYINEYNIEYAGAKATSLLNLVKTLKAASVPLDGIGFQSHFIVGQVPTGLQSQLTTFAAQGVEVAITELDIRMTLPSTPALLAQQKTDYSNVIKACASVEACVGVTVWDWTDKYSWVPNTFSGQGAACPWDQNFVRKPAYDGIAIGFGN

SEQ ID NO: 1476 - protein, 510 aa, Phanerochaete chrysosporium
MFRAAALLAFTCLAMVSGQQAGTNTAENHPQLQSQQCTTSGGCKPLSTKVVLDSNWRWVHSTSGYTNCYTGNEWDTSLCPDGKTCAANCALDGADYSGTYGITSTGTALTLKFVTGSNVGSRVYLMADDTHYQLLKLLNQEFTFDVDMSNLPCGLNGALYLSAMDADGGMSKYPGNKAGAKYGTGYCDSQCPKDIKFINGEANVGNWTETGSNTGTGSYGTCCSEMDIWEANNDAAAFTPHPCTTTGQTRCSGDDCARNTGLCDGDGCDFNSFRMGDKTFLGKGMTVDTSKPFTVVTQFLTNDNTSTGTLSEIRRIYIQNGKVIQNSVANIPGVDPVNSITDNFCAQQKTAFGDTNWFAQKGGLKQMGEALGNGMVLALSIWDDHAANMLWLDSDYPTDKDPSAPGVARGTCATTSGVPSDVESQVPNSQVVFSNIKFGDIGSTFSGTSSPNPPGGSTTSSPVTTSPTPPPTGPTVPQWGQCGGIGYSGSTTCASPYTCHVLNPYYSQCY

SEQ ID NO: 1477 - protein, 460 aa, Phanerochaete chrysosporium
MLKIGFLALAFALSPLAQAQTTVSAWGQCGGINYTGSTTCASGSACVYLNDYYYQCIPGATASTPAHSSTITSVSSHTVSSTSSSVVSSSTPSSPPPPSSFGFVTTSGQKFMLNGQEFTVVGENSYWVGLMGYSTANINKAVQDIANAGSTVVRTWGFNEVTPSTQQNYPIYYQSWSGATPTVNTGANGLQNFDQIVASAKANGLRLIVALTNNWSDYGGMDVYVKQILGSANHDLFYTNAQVIAAFKNYVKTFVGRYVNEPTIMAWELSNEPRCAGSTGTTTGTCTTATVTNWISEISAYIKSIDPNHLVAVGDEGFFNEPGNPSYPYQGGEGIDFNVNLNISTIDFGTFHLYPESWGQSSNPSSSVWGSQWISDHATSQKSANKPVIMEEFGVTSDQTDVYKAWFSTVLSSGLSGDLIWQAGSHLSTGDTPQDGYAEYPDGVVYPIIQQHAAALKARG

SEQ ID NO: 1478 - protein, 399 aa, Phanerochaete chrysosporium
MFKFSASLAALAALVPFVAAQSPEWGQCGGIGWTGPTTCVAGTTCVESNPYYSQCLPGAASVAPPPPSGTSSAGGSTPSSSAKLHTLAKAAGKLYFGTATDNNELTDTAYTAILDDNTMFGQITPANSMKWDATEPQQGVFTFSGGDQIATLAKTNGMLLRGHNCVWYNQLPSWVSSGSFTAAQLTSIIQNHCSTLVTHYKGQVYAWDVVNEPFNDDGTWRTDVFYNTLGTSYVQIALEAARAADPNAKLYINEYNIEFAGAKATSLLNLVKSLKAADVPLDGIGFQCHFIVGEFSGPGLQTQLSTFAAQGVEVAITELDIRMTLPSTPALLAQQQTDYNSVITACMNVESCIGVTVWDWTDKYSWVPNTFSGQGAACPWDQNFVKKPAFNGIAAGFSA

SEQ ID NO: 1479 - protein, 408 aa, Phanerochaete chrysosporium
MKLSASFAALAVLLPFVQAQSPVWGQCGGIGWTGPTTCTAGNVCQEYSAYYSQCIPASQATSVTSVSTAPNPPPTSHTSTSSAPSGASTSTAKLNTLAKAKGKLYFGTATDNGELSDTAYTAILDDNTMFGQITPANSMKWDATEPQQGQFTFSGGDQIANLAKSNGMLLRGHNCVWYNQLPSWVSNGKFTAAQLTSIIQNHCSTLVTHYKGQVYAWDVVNEPFNDDGSWRTDVFYNTLGTSYVQIALEAARAADPDAKLYINEYNIEYAGAKATSLLNLVKTLKAASVPLDGIGFQSHFIVGQVPTGLQSQLTTFAAQGVEVAITELDIRMTLPSTPALLAQQKTDYSNVIKACASVEACVGVTVWDWTDKYSWVPNTFSGQGAACPWDQNFVRKPAYDGIAIGFGN

SEQ ID NO: 1480 - protein, 386 aa, Phanerochaete chrysosporium
MLKYASIALALATLGVAQQQQWGQCGGIGWTGATTCVAGSVCSVLNPYYSQCIPGAATVTSSSAPSTPTPPAGALPRLGGVNTAGYDFSVATDGSFTGTGVSPPVSQFSHFSSQGANLYRIPFAWQLMTPTLGGTISQSFLSRYDQTVQAALNSGPNVFVIIDLHNYARWNGGIIAQGGPTDAQFQSIWTQLAQKYGSNQRVIFGIMNEPHDIPSISTWVNSVQGAVNAIRAAGATNYLLLPGSSWSSAQAFPTEAGPLLVKVTDPLGGTSKLIFDVHKYLDSDNSGTHPDCTTDNVQVLQTLVQFLQANGNRQAILSETGGGNTSSCESLLANELAYVKSAYPTLAGFSVWAAGAFDTTYVLTVTPNADGSDQPLWVDAVKPNLP

SEQ ID NO: 1481 - protein, 290 aa, Phanerochaete chrysosporium
MVSFNSLLVAVSAATCALAFPFEFHNGTHVFPRQSTPAGTGTNNGYFYSFWTDGGGSVTYNNGPAGEYSVTWSNADNFVAGKGWNPGSAQAISFTANYQPNGNSYLSVYGWSTNPLVEYYILEDFGTYNPAVSLTHKGTLTSDGATYDVYEGTRVNEPSIQGTATFNQYWSIRSSKRSSGTVTTANHFAAWKQLGLPLGTFNYQIVATEGYQSSGSSTVTVNPAGGVTSPTAPTGPSSVSTTPSGPSSSPSPVGSCAALYGQCGGQGWTGPTCCSSGTCKFSNNWYSQCL

SEQ ID NO: 1482 - protein, 32 aa, Phanerochaete chrysosporium
WGQCGGQGYTGPTVCAAPYTCTVSNPYYSQCI

SEQ ID NO: 1483 - protein, 854 aa, Phanerochaete chrysosporium
ASPQAYTWKNVKIGGGGGFIPGIVFNPSQKGLAYARTDIGGAYKLNADDTWSPLLDFADDARWNYWGVDALATDPVDPNRLYLATGMYTNSWDPNNGQILISTDQGKTFTPSVLPFKVGGNMPGRGMGERLAVDPNSNNILFFGARSGNGLWKSTNFGQTWTKVSSLPNVGTYKPDPTDTTGLNSDEAGVSFVTFDSTSGTSGTATPRIFVGVGTNTASNLFMSNDAGATWSALPGTNSSWMPHKGVLSPAEKALYISTSDGTGPYDGTLGAVYKYDITAGTMTDITPVSGGDLYFGFGGLAVDLQKPGTVMVAALNCWWPDGNVFRTTDGGSTWTRLWDWAAYPTMNRYYTYDDSLAPWLGPEGTASSIVTQIGWMMEALAIDPFDSNHWLYGTGATIYGGHDLLKWDTTRNVTLKSLADGIEETSVQALLSPPVGPTLLSGVLDEEGFVHTDLTKAPSAEFQPSTASGITGLDYAGQNPKTIVRVGNGDASDGKQIAISNDSGNTWALDYGSPDGVSGGKVAISAAGDTVLWSSSGNGVQVSQYTNPFSAVSSLPAGAAIASDKVVNSIFYAGSGNQFYLSTDGGKTFAKQATLGTSSSVSTVIVHPAVTGDVWVSTDKGLFHSTNNGTSFSAISGVSQAWSISFGAPASTGGYPALFAIANIGGVGYFRSDDAGTNWVQINDAAHGFGSASANVIAGDPRIYGRVYVGTNGRGIFYGDTAGTAPPTTASASSTSAVHSSTSTTSSVHSTTSTTSSVRSSTSTTSSVRSSTSTSVSSHSTSASSTSSAPSSTASLQVAYGQCGGTGWTGPTACVGKLYTACACLSKTHGLFPRQLGLSAQTSILVSTGNLCL

SEQ ID NO: 1484 - protein, 399 aa, Phanerochaete chrysosporium
MFKFSASLAALAALVPFVAAQSPEWGQCGGIGWTGPTTCVAGTTCVESNPYYSQCLPGAASVAPPPPSGTSSAGGSTPSSSAKLHTLAKAAGKLYFGTATDNNELTDTAYTAILDDNTMFGQITPANSMKWDATEPQQGVFTFSGGDQIATLAKTNGMLLRGHNCVWYNQLPSWVSSGSFTAAQLTSIIQNHCSTLVTHYKGQVYAWDVVNEPFNDDGTWRTDVFYNTLGTSYVQIALEAARAADPNAKLYINEYNIEFAGAKATSLLNLVKSLKAADVPLDGIGFQCHLIVGEFSGPGLQTQLSTFAAQGVEVAITELDIRMTLPSTPALLAQQQTDYNSVITACMNVESCIGVTVWDWTDKYSWVPNTFSGQGAACPWDQNFVKKPAFNGIAAGFSA

SEQ ID NO: 1485 - protein, 367 aa, Phanerochaete chrysosporium
MFKLAVALASLATLAAAQVPVWGQCGGIGHSGSTVCAAGNVCTEYSAYYSQCIPGTNSAPPPPASPPPTTTVSVPTTSSVTGTAPTGLSSIPASTLFQFSNFGTNPNGVTMYVYKPKNVQPKPALIVASHYCSGTAQAYYTGSKFAQLAETYGYVVIYPSSPHSGTCWDVSSDETLMHNGGSDSLSIANAARFAISNWGVDPNRVFAVGTSSGAMMTSVLAGAYPDIFKAGIVDSGVAFGCFAVPGQPDDSWNSQCSQGQMILTGQQWAQKVYNAYPGYTGARPKMQVWHGTIDTTLYPQNFWEEIKQWTTVFGYPSNPISNVTESYLPRGYSNATYGPNFQAILAQNVGHTVPLFEQQYLQFLGIA

SEQ ID NO: 1486 - protein, 439 aa, Phanerochaete chrysosporium
QASEWGQCGGIGWTGPTTCVSGTTCTVLNPYYSQCLPGSAVTTTSVITSHSSSVSSVSSHSGSSTSTSSPTGPTGTNPPPPSANNPWTGFQIFLSPYYANEVAAAAKQITDPTLSSKAASVANIPTFTWLDSVAKIPDLGTYLASASALGKSTGTKQLVQIVIYDLPDRDCAAKASNGEFSIANNGQANYENYIDQIVAQIQQFPDVRVVAVIEPDSLANLVTNLNVQKCANAKTTYLACVNYALTNLAKVGVYMYMDAGHAGWLGWPANLSPAAQLFTQVWQNAGKSPFIKGLATNVANYNALQAASPDPITQGNPNYDEIHYINALAPLLQQAGWDATFIVDQGRSGVQNIRQQWGDWCNIKGAGFGTRPTTNTGSQFIDSIVWVKPGGECDGTSNSSSPRYDSTCSLPDAAQPAPEAGTWFQAYFQTLVSAANPPL

SEQ ID NO: 1487 - protein, 540 aa, Phanerochaete chrysosporium
MFRAAALLAFTCLAMVSGQQAGTNTAENHPQLQSQQCTTSGGCKPLSTKVVLDSNWRWVHSTSGYTNCYTGNEWDTSLCPDGKTCAANCALDGADYSGTYGITSTGTALTLKFVTGSNVGSRVYLMADDTHYQLLKLLNQEFTFDVDMSNLPCGLNGALYLSAMDADGGMSKYPGNKAGAKYGTGYCDSQCPKDIKFINGEANVGNWTETGSNTGTGSYGTCCSEMDIWEANNDAAAFTPHPCTTTGQTRCSGDDCARNTGLCDGDGCDFNSFRMGDKTFLGKGMTVDTSKPFTVVTQFLTNDNTSTGTLSEIRRIYIQNGKVIQNSVANIPGVDPVNSITDNFCAQQKTAFGDTNWFAQKGGLKQMGEALGNGMVLALSIWDDHAANMLWLDSDYPTDKDPSAPGVARGTCATTSGVPSDVESQVPNSQVVFSNIKFGDIGSTFSGTSSPNPPGGSTTSSPVTTSPTPPPTGPTVPQWGQCGGIGYSGSTTCASPYTCHVLNPCESILSLQRSSNADQYLQTTRSATKRRLDTALQPRK

SEQ ID NO: 1488 - protein, 277 aa, Phanerochaete chrysosporium
MAFTKSLLTILTAAGLALAQSSTQFCDSSSGICFQGYTDPDFDVTVGFVLPPISTPPSDEFIVQLVAPVSNGYTGISVGGTMADSLLFTLWPYNNELILGPRWTSGYVLPTAYAGPQITLLPSSSINSTHIKATFRCQNCTIWEGGSLGSGDLTSFQVVAYVVATTTKPSDPADVDSVIQEHDDFNFFGLDLSMAHSDSYSSYIGGSVTTSAPASTTTHPTSTSHSSTVISTTSSAPSATQTEWGQCGGTGFTGPTVCASGLTCVAVSPPYYYQCQV

SEQ ID NO: 1489 - protein, 455 aa, Phanerochaete chrysosporium
MLRASLLAAICAAGLPAWAAVPMWGQCGGMTYTGDTVCATGTTCVYLNEWFSQCILDAPTSTLPSTSSRPTSVASSSVAASSTASASSPSSTGFVTVSGQKFMLDGEEFTVVGENAYWIGLFDYGVADVDKAYQDIVNAGSTVVRTLGFNDVTPADIAEYPVYYQSWSNGTGTINLGPNGLQNFDQVVARAKAHGLRLLVTLTNNWSDYGGMDVYVQQILGSTYHDLFYTDPQVIAAFKKYINGFVSRYVDEPTILAWELANEPRCAGSTGVTTGNCTNPTITQWIAEISAYIKSIDPNHLVGVGDEGFINDPGNPSYPYQYVEGTLGIDFEANLQIPTIDFGTFHMYPESWGQTNDPSAVGWGNQWITDHAAMGRSAGKPVIMEEFGVTIADQALTYAEWYDTVISTGLAGDLIWQAGSHLSGGDTPNDGYAEYPDGDVYPIIQQHAAALKARG

SEQ ID NO: 1490 - protein, 32 aa, Phanerochaete chrysosporium
WGQCGGIGYTGPTVCASGFTCHVLNPYYSQCY

SEQ ID NO: 1491 - protein, 277 aa, Phanerochaete chrysosporium
MAFTKSLLTILTAAGLALAQSSSQFCDSSSGICFQGYTDPDFDVTVGFVLPPISTPPSDEFIVQLVAPVSNGYTGISVGGTMADSLLFTLWPYNNELILGPRWTSGYVLPTAYAGPQITLLPSSSINSTHIKATFRCQNCTIWEGGSLGSGDLTSFQVVAYVVATTTKPSDPADVDSVIQEHDDFNFFGLDLSMAHSDSYSSYIGGSVTTSAPTSTTTHPTSTSHSSTVISTTSSAPSATQTEWGQCGGTGFTGPTVCASGLTCVAVSPPYYYQCQA

SEQ ID NO: 1492 - protein, 460 aa, Phanerochaete chrysosporium
MKSTAFFAALVTLLPAYVAGQASEWGQCGGIGWTGPTTCVSGTTCTVLNPYYSQCLPGSAVTTTSVITSHSSSVSSVSSHSGSSTSTSSPTGPTGTNPPPPPSANNPWTGFQIFLSPYYANEVAAAAKQITDPTLSSKAASVANIPTFTWLDSVAKIPDLGTYLASASALGKSTGTKQLVQIVIYDLPDRDCAAKASNGEFSIANNGQANYENYIDQIVAQIQQFPDVRVVAVIEPDSLANLVTNLNVQKCANAKTTYLACVNYALTNLAKVGVYMYMDAGHAGWLGWPANLSPAAQLFTQVWQNAGKSPFIKGLATNVANYNALQAASPDPITQGNPNYDEIHYINALAPLLQQAGWDATFIVDQGRSGVQNIRQQWGDWCNIKGAGFGTRPTTNTGSQFIDSIVWVKPGGECDGTSNSSSPRYDSTCSLPDAAQPAPEAGTWFQAYFQTLVSAANPPL

SEQ ID NO: 1493 - protein, 329 aa, Phanerochaete chrysosporium
MTPLKLQAASLVLLAASLRSVEGHGQVHSVITNYATYPAADAYQAVDPTSPLRKLNTYGPANFTSPENTCGPGGNTPVTPMAKADAGSLVTFDWQDWNSVHPGPVMTYIAECTGGCANFKGDTGNVWVKIDQDGYNPSRGDLAWGEEVIRLEGSKYSVTIPAGLKPGQYLLRHEILGLHVASQANGAQFYPNCLQVEIVNGGNVELPEGIPLPGSYDPYDPGILVQLYKITPTTPNYTIPGGPVLLPGGSGDWAQDVFGTGSVSSSAPAPPPTSFSTSTPLSTISSAPTSSVVLVAKYGQCGGLTYTGPTTCVSGTTCTALNDYYSQCL

SEQ ID NO: 1494 - protein, 802 aa, Phanerochaete chrysosporium
QSGLYQQCGGIGWTGATTCVSGATCTVLNPYYSQCLPGAATTSVSSSHSSSSSVSSHSSSASSSSISSTSTSPPAPSQTVANVSPEWAAAYVKAQAAVAKLSVTDMVNLATGVQWEKGPCVGNTPAISSIPGFTGLCLQDSPVGVRYADGTSVFPPEINVAATWNRTLMRQRGAAMGAEFKGKGVHVALGPMMNLMRVPAAGRNWEGGGGDPFLSGELAFETITGIQSSGAQACAKHFINNEQEHFRDSSSSNVDDRTEHELYGHPFLRSVQANVASVMCSYNQINGTFSCENEKTLSGLLKGEYGFQGYVMSDWWATHSGAPAVNAGLDMTMPGDETTNSGTTYFGQNLVNAVNSGQVSQARIKDMATRILAAWYLLGQDQNFPAVNFNSWNSGQGQHVNVSGNHASLIRTIGAASQILLKNVNGALPLKKPKTIGIIGNGAGSNPSGPNAFSDRAGDVGVLALGWGSGTANFPYLVAPVDAITARASQDGTTVSSSLSDTDLTGAANTATGKDVAMVFITADSGEGYLTVEGNAGDRNDLQAWHGGDALVQQVASHNKNTIVVINSVGPINMEAWVNHPNVTAIVWSGLPGQEAGNAVTDVLFGAVNPGGKLPFTIGKSISDYSAQIITTGSGIVPIPYNEGLFIDYRHFDQAGIAPRFEFGFGLSYTTFDYSNLVITGSTAGGTRQPPGPGSSLDPWLHDSVVTVSFTLTNNGTVDGTEVPQLYLSPPTSAKSAPQNLKGFDSGFLPAGASTTVSFELSRYSFSVWDVVSQSWQIPAGVTGISVGASSRDLRLKGSITN

SEQ ID NO: 1495 - protein, 823 aa, Phanerochaete chrysosporium
MGLTLVVLLHLALGLLTGVQAQSGLYQQCGGIGWTGATTCVSGATCTVLNPYYSQCLPGAATTSVSSSHSSSSSVSSHSSSASSSSISSTSTSPPAPSQTVANVSPEWAAAYVKAQAAVAKLSVTDMVNLATGVQWQKGPCVGNTPAISSIPGFTGLCLQDSPVGVRYADGTSVFPPEINVAATWNRTLMRQRGAAMGAEFKGKGVHVALGPMMNLMRVPAAGRNWEGGGGDPFLSGEVAFETITGIQSSGAQACAKHFINNEQEHFRDSSSSNVDDRTEHELYGHPFLRSVQANVASVMCSYNQINGTFSCENEKTLSGLLKGEYGFQGYVMSDWWATHSGAPAVNAGLDMTMPGDETLSSGTTYFGQNLVNAVNSGQVSQARVKDMATRILAAWYLLGQDQNFPAVNFNSWNSGQGQHVNVSGNHASLIRTIGAASQILLKNVNSALPLKKPKTIGIIGNGAGSNPNGPNAFSDRAGDVGVLALGWGSGTANFPYLVAPVDAITARASQDGTTVSSSLSDTDLTGAANTATGKDVAMVFITADSGEGYLTVEGNAGDRNDLQAWHGGDALVQQVASHNKNTIVVINSVGPINMEAWVNHPNVTAIVWSGLPGQEAGNAVTDVLFGAVNPGGKLPFTIGKSISDYSAQIITTGSGIVPIPYNEGLFIDYRHFDQAGIAPRFEFGFGLSYTTFDYSNLVITGSTAGGTRQPPGPGSSLDPWLHDSVVTVSFTLTNNGTVDGTEVPQLYLSPPASAKSAPQNLKGFDSVFLPAGASTTVSFELSRYSFSVWDVVSQSWQIPAGVTGISVGASSRDLRLKGSITN

SEQ ID NO: 1496 - protein, 32 aa, Phanerochaete chrysosporium
WGQCGGQGWTGATVCASPFNCVVLNPYYSQCQ

SEQ ID NO: 1497 - protein, 290 aa, Phanerochaete chrysosporium
MVSFNSLLVAVSAATCALAFPFEFHNGTHVFPRQSTPAGTGTNNGYFYSFWTDGGGSVTYNNGPAGEYSVTWSNADNFVAGKGWNPGSAQAISFTANYQPNGNSYLSVYGWSTNPLVEYYILEDFGTYNPAVSLTHKGTLTSDGATYDVYEGTRVNEPSIQGTATFNQYWSIRSSKRSSGTVTTANHFAAWKQLGLPLGTFNYQIVATEGYQSSGSSTVTVNPAGGVTSPTAPTGPSSVSTTPSGPSSSPSPVGSCAALYGQCGGQGWTGPTCCSSGTCKFSNDWYSQCL

SEQ ID NO: 1498 - protein, 823 aa, Phanerochaete chrysosporium
MGLTLVVLLHLALGLLTGVQAQSGLYQQCGGIGWTGATTCVSGATCTVLNPYYSQCLPGAATTSVSSSHSSSSSVSSHSSSESSSSISSTSTSPPAPSQTVANVSPEWAAAYVKAQAAVAKLSVTDMVNLATGVQWQKGPCVGNTPAISSIPGFTGLCLQDSPVGVRYADGTSVFPPEINVAATWNRTLMRQRGAAMGAEFKGKGVHVALGPMMNLMRVPAAGRNWEGGGGDPFLSGEVAFETISGIQSSGAQACAKHFINNEQEHFRDSSSSNVDDRTEHELYGHPFLRSVQANVASVMCSYNQINGTFSCENEKTLSGLLKGEYGFQGYVMSDWWATHSGAPAVNAGLDMTMPGDETLSSGTTYFGQNLVNAVNSGQVSQARVKDMATRILAAWYLLGQDQNFPAVNFNSWNSGQGQHVNVSGNHASLIRTIGAASQILLKNANGALPLKKPKTIGIIGNGAGSNPNGPNAFSDRAGDVGVLALGWGSGTANFPYLVAPVDAITARASQDGTTVSSSLSDTDLTGAANTATGKDVAMVFITADSGEGYLTVEGNAGDRNDLQAWHGGDALVQQVASHNKNTIVVINSVGPINMEAWVNHPNVTAIVWSGLPGQEAGNAVTDVLFGAVNPGGKLPFTIGKSISDYSAQIITTGSGIVPIPYNEGLFIDYRHFDQAGIAPRFEFGFGLSYTTFDYSNLVITGSTAGGTRQPPGPGSSLDPWLHDSVVTVSFTLTNNGTVDGTEVPQLYLSPPASAKSAPQNLKGFDSVFLPAGASTTVSFELSRYSFSVWDVVSQSWQIPAGVTGISVGASSRDLRLKGSITN

SEQ ID NO: 1499 - protein, 504 aa, Phanerochaete chrysosporium
MRTALALILALAAFSAVSAQQAGTITAETHPTLTIQQCTQSGGCAPLTTKVVLDVNWRWIHSTTGYTNCYSGNTWDAILCPDPVTCAANCALDGADYTGTFGILPSGTSVTLRPVDGLGLRLFLLADDSHYQMFQLLNKEFTFDVEMPNMRCGSSGAIHLTAMDADGGLAKYPGNQAGAKYGTGFCSAQCPKGVKFINGQANVEGWLGTTATTGTGFFGSCCTDIALWEANDNSASFAPHPCTTNSQTRCSGSDCTADSGLCDADGCNFNSFRMGNTTFFGAGMSVDTTKLFTVVTQFITSDNTSMGALVEIHRLYIQNGQVIQNSVVNIPGINPATSITDDLCAQENAAFGGTSSFAQHGGLAQVGEALRSGMVLALSIVNSAADTLWLDSNYPADADPSAPGVARGTCPQDSASIPEAPTPSVVFSNIKLGDIGTTFGAGSALFSGRSPPGPVPGSAPASSATATAPPFGSQCGGLGYAGPTGVCPSPYTCQALNIYYSQCI

SEQ ID NO: 1500 - protein, 290 aa, Phanerochaete chrysosporium
MVSFNSLLVAVSAATCALAFPFEFHNGTHVFPRQSTPAGTGTNNGYFYSFWTDGGGSVTYNNGPAGEYSVTWSNADNFVAGKGWNPGSAQAISFTANYQPNGNSYLSVYGWSTNPLVEYYILEDFGTYNPAVSLTHKGTLTSDGATYDVYEGTRVNEPSIQGTATFNQYWSIRSSKRSSGTVTTANHFAAWKQLGLPLGTFNYQIVATEGYQSSGSSTVTVNPAGGVTSPIAPTGPSSVSTTPSGPSSSPSPVGTCSALYGQCGGQGWTGPTCCSSGTCKFSNNWYSQCL

SEQ ID NO: 1501 - protein, 511 aa, Phanerochaete chrysosporium
MFRAAALLAFTCLAMVSGQQAGTNTAENHPQLQSQQCTTSGGCKPLSTKVVLDSNWRWVHSTSGYTNCYTGNEWNTSLCPDGKTCAANCALDGADYSGTYGITSTGTALTLKFVTGSNVGSRVYLMADDTHYQLLKLLNQEFTFDVDMSNLPCGLNGALYLSAMDADGGMSKYPGNKAGAKYGTGYCDSQCPKDIKFINGEANVGNWTETGSNTGTGSYGTCCSEMDIWEANNDAAAFTPHPCTTTGQTRCSGDDCARNTGLCDHGDGCDFNSFRMGDKTFLGKGMTVDTSKPFTDVTQFLTNDNTSTGTLSEIRRIYIQNGKVIQNSVANIPGVDPVNSITDNFCAQQKTAFGDTNWFAQKGGLKQMGEALGNGMVLALSIWDDHAANMLWLDSDYPTDKDPSAPGVARGTCATTSGVPSDVESQVPNSQVVFSNIKFGDIGSTFSGTSSPNPPGGSTTSSPVTTSPTPPPTGPTVPQWGQCGGIGYSGSTTCASPYTCHVLNPYYSQCY

SEQ ID NO: 1502 - protein, 384 aa, Chrysosporium lucknowense
MRTLTFVLAAAPVAVLAQSPLWGQCGGQGWTGPTTCVSGAVCQFVNDWYSQCVPGSSNPPTGTTSSTTGSTPAPTGGGGSGTGLHDKFKAKGKLYFGTEIDHYHLNNNALTNIVKKDFGQVTHENSLKWDATEPSRNQFNFANADAVVNFAQANGKLIRGHTLLWHSQLPQWVQNINDRNTLTQVIENHVTTLVTRYKGKILHWDVVNEIFAEDGSLRDSVFSRVLGEDFVGIAFRAARAADPNAKLYINDYNLDIANYAKVTRGMVEKVNKWIAQGIPIDGIGTQCHLAGPGGWNTAAGVPDALKALAAANVKEIAITELDIAGASANDYLTVMNACLQVSKCVGITVWGVSDKDSWRSSSNPLLFDSNYQPKAAYNALINAL

SEQ ID NO: 1503 - protein, 876 aa, Chrysosporium lucknowense
MRSLLVLAAIGLAAAEDGLNGWLRYARIKGARDFHDRLPSTIVALNATEGLPVYTAGQELAQGIEGIFGKKVDLDVDLATAGAGKSNGKGKGNGKGKGKGNNGHGHDRDTTATVGTVAAYVDSNPGAAAAGIPELADDGFYLRVSRGNVLILGQNERGALYGAFHYLSLLAQGNASDYTLASNPDAPIRWVNQWDNMQDGGTHGSVERGYGGDSIFFWDGKVRDDLTRAGLYARLLASIGVNAVVVNNVNADPKTLTPENMDGLARIANAFRPYGVQLGVSLNFASPQTLGGLDSFDPLDERVVEWWRDITDALYERIPDMAGYLVKASSEGQPGPLTYNRTLADGANLFARALKPHGGRVLFRAFVYDHTSLDEDKDWKADRAKAAVEYFDGLDGKFEDNVVIQIKYGPIDFQVREPASPLFSRLVRTASALELQITQEYLGQQAHLVYLAPMWKEILDFDFRVDGRPSRTADILNGKRFGRRRAGGYAGVANVGTNTTWLGSHLAMSNLYAFGRLAWDPSSEPESVLRDWIRLTFGDDPKVLDVITRMSMASWPAYENYSGNLGIQTLTDILLGHYGPNPASQDGNPWGQWTRADADSIGMDRTVWNGTGFSGQYPPEVAARFERIETTPDELLLWFHHVPYTHVLKSGKTVIQHFYDAHYEGSAVAQTFPRLWETLRGRVDDERFEHVLFRLEYQAGHALVWRDSINNFYFNKSGIPDARGRVGHHPYRIEAEHMRLDGYVPYDVSPFEAASGARCVVTRDNSTATAATASVELRHVPTGTYDVAVNYYDMAIGNSTWELYIGRRRVGRWKGDLEYNLGRAPSPYIDGQTAARVTFRRVHIERGSTLKIVGRPDGLEPAPIDYVSILPLGIVD

SEQ ID NO: 1504 - protein, 413 aa, Chrysosporium lucknowense
MHSKAFLAALLAPAVSGQLNDLAVRAGLKYFGTALSESVINSDTRYAAILSDKSMFGQLVPENGMKWDATEPSRGQFNYASGDITANTAKKNGQGMRCHTMVWYSQLPSWVSSGSWTRDSLTSVIETHMNNVMGHYKGQCYAWDVINEAINDDGNSWRDNVFLRTFGTDYFALSFNLAKKADPDTKLYYNDYNLEYNQAKTDRAVELVKMVQAAGAPIDGVGFQGHLIVGSTPTRSQLATALQRFTALGLEVAYTELDIRHSSLPASSSALATQGNDFANVVGSCLDTAGCVGVTVWGFTDAHSWIPNTFPGQGDALIYDSNYNKKPAWTSISSVLAAKATGAPPASSSTTLVTITTPPPASTTASSSSSATPTSVPTQTRWGQCGGIGWTGPTQCESPWTCQKLNDWYWQCL

SEQ ID NO: 1505 - protein, 313 aa, Chrysosporium lucknowense
MKLLGKLSAALALAGSRLAAAHPVFDELMRPTAPLVRPRAALQQVTNFGSNPSNTKMFIYVPDKLAPNPPIIVAIHYCTGTAQAYYSGSPYARLADQKGFIVIYPESPYSGTCWDVSSRAALTHNGGGDSNSIANMVTYTLEKYNGDASKVFVTGSSSGAMMTNVMAAAYPELFAAGIAYSGVPAGCFYSQSGGTNARNSSCANGQINSTPQVWAKMVFDMYPEYDGPRPKMQIYHGSADGTLRPSNYNETIKQWCGVFGFDYTRPDTTQANSPQAGYTTYTWGEQQLVGIYAQGVGHTVPIRGSDDMAFFGL

SEQ ID NO: 1506 - protein, 278 aa, Chrysosporium lucknowense
MVALSSLLVAASAAAVAVAAPSEALQKRQTLTSSQTGFHDGFYYSFWTDGAGNVRYTNEAGGRYSVTWSGNNGNWVGGKGWNPGAARNISFTGQYNPNGNSYLAVYGWTRNPLIEYYIVENFGTYDPSTGAQRLGSITVDGSTYNILKTTRVNQPSIEGTSTFDQFWSVRTNKRSSGSVNVKAHFDAWAQAGLRLGTHDYQIMATEGYFSSGSATITVGEGTSSGGGGDNGGGNNGGGGNTGTCSALYGQCGGQGWTGPTCCSQGTCRVSNQWYSQCL

SEQ ID NO: 1507 - protein, 291 aa, Chrysosporium lucknowense
MLVRSFLGFAVLAATCLAASLQEVTEFGDNPTNIQMYIYVPDQLDTNPPVIVALHPCGGSAQQWFSGTQLPSYADDNGFILIYPSTPHMSNCWDIQNPDTLTHGQGGDALGIVSMVNYTLDKHSGDSSRVYAMGFSSGGMMTNQLAGSYPDVFEAGAVYSGVAFGCAAGAESATPFSPNQTCAQGLQKTAQEWGDFVRNAYAGYTGRRPRMQIFHGLEDTLVRPQCAEEALKQWSNVLGVELTQEVSGVPSPGWTQKIYGDGTQLQGFFGQGIGHQSTVNEQQLLQWFGLI

SEQ ID NO: 1508 - protein, 657 aa, Corynebacterium glutamicum
MRDTAFRSIKAKAQAKRRSLWIAAGAVPTAIALTMSLAPMASAQSSNLSSDAVIGSIAQGVTDGLTDYLKPRVEELPAGEVTYPEIAGLPDGVRVISAEWATSKHVILTIQSAAMPERPIKVQLLLPRDWYSSPNREFPEIWALDGLRAIEEQSGWTIETNIEQYYADKNAIVVLPVGGESSFYSDWEGPNNGKNYQWETFLTQELAPILDKGFRSNTDRAITGISMGGTAAVNIATHHPDMFKFVGSFSGYLDTTSAGMPIAISAALADAGGYDANAMWGPVGSERWQENDPKSNVDKLKGKTIYVSSGNGADDFGKEGSVAIGPANAAGVGLEVISRMTSQTFVDRASQAGVEVVASFRPSGVHSWEYWQFEMTQAFPHIANALGMSTEDRGVECAPVGAIADAVADGAMGTCLTNEYDVTGGKAQDFANGRAYWSANTGAFGLVGRINARYSELGGPASWLGYPTSSELKTPDGRGRFVTFEHGSIYWTATTGPWEIPGDMLAAWGTQDYEKGSLGYPTGAAVEYNGGLRQQFEGGYVFRTSNNQSYWVRGEISKKYAEDGIFAQLGFPTGNEKLINGGAFQEFEKGNIYWSASTGAHVILHGDIFDAWGAKGWEQGEYGFPTSDQTAITAGGQTIDFQNGTIRQVNGRIEESR

SEQ ID NO: 1509 - protein, 657 aa, Corynebacterium melassecola
MRDTAFRSIKAKAQAKRRSLWIAAGAVPTAIALTMSLAPMASAQSSNLSSDAVVGSIAQGVTDGLTDYLKPRVEELPAGEVTYPEIAGLPDGVRVISAEWATSKHVILTIQSAAMPERPIKVQLLLPRDWYSSPNREFPEIWALDGLRAIEEQSGWTIETNIEQYYADKNAIVVLPIGGESSFYSDWEEPNNGKNYQWETFLTQELAPILDKGFRSNTDRAITGISMGGTAAVNIATHHPDMFKFVGSFSGYLDTTSAGMPIAISAALADAGGYDANAMWGPVGSERWQENDPKSNVDKLKGKTIYVSSGNGADDFGKEDSVAIGPANATGVGLEVISRMTSQTFVDRANQAGVEVVASFRPSGVHSWEYWQFEMTQAFPHIANALGMSTEDRGVECAPVGAIADAVADGAMGTCLTNEYDVTGGKAQDFANGRAYWSANTGAFGLVGRINARYSELGGPDSWLGYPTSSELKTPDGRGRFVTFEHGSIYWTATTGPWEIPGDMLAAWGTQDYEKGSLGYPTGAAVEYNGGLRQQFEGGYVFRTSNNQSYWVRGEISKKYADDGIFAQLGFPTGNEKLINGGAFQEFEKGNIYWSVSTGAHVILHGDIFDAWGAKGWEQGEYGFPTSDQTAITAGGQTIDFQNGTIRQVNGRIEESR

SEQ ID NO: 1510 - protein, 425 aa, Corynebacterium aurimucosum
MADIIHVMAREILDSRGNPTVEAEVFLDDGARGVAGVPSGASTGVHEAHELRDGGDRYLGKGVLKAVENVNEEIADELAGFEADDQRLIDQALIKLDGTENKSRLGANAILGVSIAAAKAAAESAGLPLYRYVGGPNAHVLPVPMMNIVNGGAHADSGVDVQEFMIAPIGAESFSEALRIGAEVYHALKSVIKSKGLSTGLGDEGGFAPEAESTKAALDLIIEAIKKAGFEPGKDVALALDVASSEFFKDGKYHFEGGEHTAEEMAKVYEELVAKYPIVSIEDPLQEDDWEGYTKLTETLGDKVQIVGDDFFVTNPARLQEGIDKKAANALLVKVNQIGTLTETFDAVELAHRNGYRTMMSHRSGETEDTTIADLAVALNCGQIKTGAPARSERVAKYNQLLRIEQELGDAAVYAGRSAFPRFQG

SEQ ID NO: 1511 - protein, 425 aa, Corynebacterium diphtheriae
MADIMHVFAREILDSRGNPTVEAEVFLDDGSHGVAGVPSGASTGVHEAHELRDGGERYLGKGVLNAVNNVNEEIADAIAGAEADDQRLIDQAMIALDGTENKSRLGANAILGVSIAVAKAAAESAGLPLYRYIGGPNAHVLPVPMMNIVNGGAHADSGVDVQEFMIAPIGAESFSEALRMGAEVYHSLKSVIKSKGLSTGLGDEGGFAPSVESTKAALDLIVEAIEKAGFKPGADIALALDVASSEFYKDGKYHFEGGEHTAEEMAKVYEQLIAEYPIVSIEDPLQEDDWEGYTALTAAIGDKVQIVGDDFFVTNPARLKEGIEKKAANALLVKVNQIGTLTETFDAVDLAHRNGYRTMMSHRSGETEDTTIADLAVALGCGQIKTGAPARSERVAKYNQLLRIEQQLDDAAVYAGRSAFPRFQG

SEQ ID NO: 1512 - protein, 425 aa, Corynebacterium efficiens [sequence omitted]

SEQ ID NO: 1513 - protein, 425 aa, Corynebacterium glutamicum
MAEIMHVFAREILDSRGNPTVEAEVFLDDGSHGVAGVPSGASTGVHEAHELRDGGDRYLGKGVLKAVENVNEEIGDELAGLEADDQRLIDEAMIKLDGTANKSRLGANAILGVSMAVAKAAADSAGLPLFRYIGGPNAHVLPVPMMNIINGGAHADSGVDVQEFMIAPIGAETFSEALRNGAEVYHALKSVIKEKGLSTGLGDEGGFAPSVGSTREALDLIVEAIEKAGFTPGKDIALALDVASSEFFKDGTYHFEGGQHSAAEMANVYAELVDAYPIVSIEDPLQEDDWEGYTNLTATIGDKVQIVGDDFFVTNPERLKEGIAKKAANSILVKVNQIGTLTETFDAVDMAHRAGYTSMMSHRSGETEDTTIADLAVALNCGQIKTGAPARSDRVAKYNQLLRIEQLLGDAGVYAGRSAFPRFQG

SEQ ID NO: 1514 - protein, 425 aa, Corynebacterium glutamicum; identical to SEQ ID NO: 1513

SEQ ID NO: 1515 - protein, 425 aa, Corynebacterium jeikeium
MALILNIDAREIIDSRGNPTVEVDVLLDDGSFGRAAVPSGASTGVHEAHELRDGGERYQGKGVLNAVKNVIEDIDEELMGVEADDQRLIDQLMRDLDGTENKSKLGANAILGVSMAVARAAAESADLPLFRYVGGPNAHVLPVPMMNILNGGAHADSGVDVQEFMIAPIGAETFSEALRVGAEVYHTLKKVIKDKGLSTGLGDEGGFAPSVDSTKAALDLIVEAIEKAGFKVGEDVALALDVASSEFFKDGKYHFEGGEHTAEEMAKVYEDLIEEYPIVSIEDPLQEDDWEGYTALTAKIGDKVQLVGDDFFVTNPQRLAKGIEEKAANALLVKVNQIGTLTETFDAVELAHRNGYRSMMSHRSGETEDTTIADLAVALNCGQIKTGAPARSERVAKYNQLLRIEEILGDAAVYAGRSAFPRFTK

SEQ ID NO: 1516 - protein, 427 aa, Corynebacterium kroppenstedtii
MAQIIDVQAREILDSRGNPTVEVEVLLDDASFGRAGVPSGASTGVHEAHELRDGGDRYLGKGVRQAVENVNEKIAPAVTGLEADDQRLVDKVMLDLDGSDNKSNLGANAILGVSLATAKAAASSANLELFRYLGGPNAHVLPVPMMNIVNGGAHADSGVDVQEFMIAPIGADSFREALRMGAEVYHNLKSVIKSKGLSTGLGDEGGFAPSVDSTKEALDLIAEAVKKAGYKLGEDIAFALDAASSEFYDKDKGVYNFEGGEHSAEDMVKVYEELVENYPIVSIEDPLQEDDWEGYTKLTAEIGDKVQIVGDDFFVTNPARLKEGIEKKAANALLVKVNQIGSLSETADAVQLAQNNNYRCMMSHRSGETEDTTIADLSVAYSCGQIKSGAPARSERVAKYNQLLRIEEFLGDAAVYAGRSAFPRFNG

SEQ ID NO: 1517 - protein, 425 aa, Corynebacterium urealyticum
MAGILNVSALEIMDSRGNPTVEVEVILDDGSMGRAAVPSGASTGVHEAHELRDGGDRYLGKGVAKAVDFVNTEIDDALAGLEADDQRLIDQTLLELDGTENKSRLGANALLGVSMAVAHAAADSAGLELFRYVGGPNGHVLPVPMMNILNGGAHADSGVDVQEFMIAPIGAETFAEALQVGAEVYHSLKDVIKAKGLSTGLGDEGGFAPSVESTKAALDLIVEAIEKAGYTLGEDVALALDVASSEFYEDGVYNFEGGKHSSAEMVEVYADLVEQYPIVSIEDPLDEDDWEGYVTLTEKLGDKIQIVGDDLFVTNPSRLQEGIDRGAANALLVKVNQIGTLSETFDAVELAHRNGYRTMMSHRSGETEDTTIADLAVALNCGQIKTGAPARSERVAKYNQLLRIERYLEGAAVYAGRSAFPRFKN

SEQ ID NO: 1518 - protein, 278 aa, Corynebacterium glutamicum
MSSASFTTKALSVLAALTAASAPLVAASPAHALANARNVTGSSTTSDSIVRLHIGNTACTGTMITPTWAITARHCIPEGGIAGAAIGSSTLSQFQQVSQAILHPTADLALVELPNQASSNTVDLYGAHVQPGENGQAAGWGGYSAFGQNVAQQADVQIQRRVVNVPSPDRTAVLLEGTVSNGRLVPGDSGGPLYINGQLAGVLSMSTDVENDALDGTVGWYIPVAEHAEWIAYYTGKHIAPIAGAPAELVDATANPTFIPAPQPFTGSSIGGWALGSS

SEQ ID NO: 1519 - protein, 278 aa, Corynebacterium glutamicum
MSSASFTTKALSVLAALTAASAPLVAASPAHALANARNVTGSSTTSDSIVRLHIGNTACTGTMITPTWAITARHCIPEDGIAGAAIGSSTLSQFQQVSQAILHPTADLALVELPNQASSNTVDLYGAHVQPGENGQAAGWGGYSAFGQNVAQQADVQIQRRVVNVPSPDRTAVLLEGTVSNGRLVPGDSGGPLYINGQLAGVLSMSTDVENDALDGTVGWYIPVAEHAEWIAYYTGKHIAPIAGAPAELVDATANPTFIPAPQPFTGSSIGGWALGSS

SEQ ID NO: 1520 - protein, 211 aa, Corynebacterium glutamicum
MGKHRRNNSNATRKAVAASAVALGATAAIASPAQAAEVVVPGTGISVDIAGIETTPGLNNVPGIDQWIPSLSSQAAPTAYAAVIDAPAAEAQAAPAASTGQAIVDAARTKIGSPYGWGATGPNAFDCSGLTSWAYSQVGKSIPRTSQAQAAQGTPVAYSDLQAGDIVAFYSGATHVGIYSGHGTVIHALNSSTPLSEHSLDYMPFHSAVRF

SEQ ID NO: 1521 - protein, 209 aa, Corynebacterium glutamicum
MGKHRRNNSNATRKAVAASAVALGATAAIASPAQAAEVVVPGTGISVDIAGIETTPGLNNVPGIDQWIPSLSSQAAPTAYAAVIDAPAAQAAPAASTGQAIVDAARTKIGSPYGWGATGPNAFDCSGLTSWAYSQVGKSIPRTSQAQAAQGTPVAYSDLQAGDIVAFYSGATHVGIYSGHGTVIHALNSSTPLSEHSLDYMPFHSAVRF

SEQ ID NO: 1522 - protein, 560 aa, Corynebacterium diphtheriae
MSRKLFASILIGALLGIGAPPSAHAGADDVVDSSKSFVMENFSSYHGTKPGYVDSIQKGIQKPKSGTQGNYDDDWKGFYSTDNKYDAAGYSVDNENPLSGKAGGVVKVTYPGLTKVLALKVDNAETIKKELGLSLTEPLMEQVGTEEFIKRFGDGASRVVLSLPFAEGSSSVEYINNWEQAKALSVELEINFETRGKRGQDAMYEYMAQACAGNRVRRSVGSSLSCINLDWDVIRDKTKTKIESLKEHGPIKNKMSESPNKTVSEEKAKQYLEEFHQTALEHPELSELKTVTGTNPVFAGANYAAWAVNVAQVIDSETADNLEKTTAALSILPGIGSVMGIADGAVHHNTEEIVAQSIALSSLMVAQAIPLVGELVDIGFAAYNFVESIINLFQVVHNSYNRPAYSPGHKTQPFLHDGYAVSWNTVEDSIIRTGFQGESGHDIKITAENTPLPIAGVLLPTIPGKLDVNKSKTHISVNGRKIRMRCRAIDGDVTFCRPKSPVYVGNGVHANLHVAFHRSSSEKIHSNEISSDSIGVLGYQKTVDHTKVNSKLSLFFEIKS

SEQ ID NO: 1523 - protein, 560 aa, Corynebacterium ulcerans
MNRKLFASILIGVLLGIGAPPSAHAGADDVVDSSKSFVMENFSSYHGTKPGYVDSIQKGIQKPKSGTQGNYDDDWKGFYSTDNKYDAAGYSVDNENPLSGKAGGVVKVTYPGLTKILALKVDNAETIKKELGLSLTEPLMEQVGTEEFIKRFGDGASRVVLSLPFAEGSSSVEYINNWEQAKALSVELEINFETRGKRGQDAMYEYMAQSCAGSRVRRSVGSSLSCINLDWDAIRDKTKTKIESLKEHGPIKNKMSESPNKTVSEEKAKQYLEEFHQTALEHPELSELKTVTGVNSVFAGANYASWAVNVAQVVDSKTADNLEKTTAALSILPGIGSVMGIADGAVHHNTEEIVAQSIALSSLMVAQAIPLVGELVDLGFAAYNFVESIINLFQVVHNSYNRPAYSPGHKTQPFVHGGYAASWNTVEDSIIKTGFQGESGHDIKITAENTPLPIAGVLLPTIPGKLDVNKSKTHISVNGRKIRMRCRAIDDATIFCRPKTPVYVGNGVHANLHVAFHRSSSEKIHSDETPLSSIDVLGYQKTVDHTKVNSKLSLFAEVKS

SEQ ID NO: 1524 - protein, 560 aa, Corynebacterium ulcerans
MNRKLFASILIGALLGIGAPPSAHAGADDVVDSSKSFVMENFSSYHGTKPGYVDSIQKGIQKPKSGAQGNYDDDWKGFYSTDNKYDAAGYSVDNENPLSGKAGGVVKVTYPGLTKILALKVDNAETIKKELGLSLTEPLMEQVGTEEFIKRFGDGASRVVLSLPFAEGSSSVEYINNWEQAKELSVELEINFETRGKRGQDAMYEYMAQSCAGNRVRRSVGSSLSCINLDWDAIRDKTKTKIESLKEHGPIKNKMSESPNKTVSEEKAKQYLEEFHQTALEHPELSELKTVTGVNSVFAGANYASWAVNVAQVVDSKTADNLEKTTAALSILPGIGSVMGIADGAVHHNTEEIVAQSIALSSLMVAQAIPLVGELVDLGFAAYNFVESIINLFQVVHNSYNRPAYSPGHKTQPFVHGGYAASWNTVEDSIIKTGFQGESGHDIKITAENTPLPIAGVLLPTIPGKLDVNKSKTHISVNGRKIRMRCRAIDDATTFCRPKTPVYVGNGVHANLHVAFHRSSSEKIHSDETPLSSIDVLGYQKTVDHTKVNSKLSLFAEVKS

SEQ ID NO: 1525 - protein, 291 aa, Corynebacterium ulcerans
VVLSLPFAEGSSSVEYINNWEQAKALSVELEINFETRGKRGQDAMYEYMAQSCAGNRVRRSVGNSSSCINLDWDAIRDKTKTKIESLKEHGPIKNKMSESPNKAVSEEKAKQYLEEFHQTALEHPELSELKTVTGTNSVFAGANYAAWAVNVAQVIDSETADNLEKTTAALSILPGIGSVMGIADGAVHHNTEEIVAQSIALSSLMVAQAIPLVGELVDIGFAAYNFVESIINLFQVVHNSYNRPAYSPGHKTQPFLHDGYAVSWNTVEDSIIQTGFQGESGHDIKITAEN

SEQ ID NO: 1526 - protein, 560 aa, Corynebacterium ulcerans
MNRKLFASILIGAILGIGAPPSAHAGADDVVDSSKSFVMENFSSYHGTKPGYVDSIQKGIQKPKSGAQGNYDDDWKGFYSTDNKYDAAGYSVDNENPLSGKAGGVVKVTYPGLTKILALKVDNAETIKKELGLSLTEPLMEQVGTEEFIKRFGDGASRVVLSLPFAEGSSSVEYINNWEQAKELSVELEINFETRGKRGQDAMYEYMAQSCAGNRVRRSVGSSLSCINLDWDAIRDKTKTKIESLKEHGPIKNKMSESPNKTVSEEKAKQYLEEFHQTALEHPELSELKTVTGVNSVFAGANYASWAVNVAQVVDSKTADNLEKTTAALSILPGIGSVMGIADGAVHHNTEEIVAQSIALSSLMVAQAIPLVGELVDLGFAAYNFVESIINLFQVVHNSYNRPAYSPGHKTQPFVHGGYAASWNTVEDSIIKTGFQGESGHDIKITAENTPLPIAGVLLPTIPGKLDVNKSKTHISVNGRKIRMRCRAIDDATTFCRPKTPVYVGNGVHANLHVAFHRSSSEKIHSDETPLSSIDVLGYQKTVDHTKVNSKLSLFAEVKS

SEQ ID NO: 1527 - protein, 560 aa, Corynebacterium diphtheriae; identical to SEQ ID NO: 1522

SEQ ID NO: 1528 - protein, 169 aa, Corynebacterium diphtheriae
MRFFYDTEFIEDGETIDLVSIGIVCEDGREYYAVSTDADHSRANKWVRDNVLDKMPNPSSTLWKSNATIRQEVYEFLTSTPGNTELWAWVGAYDHVVLAQLWGDMRGLPKELPRYTHELKQYWEMAGRPRLPKLPEGNHDALVDARHNLQKFKICAESLPLNKRNVVNR

SEQ ID NO: 1529 - protein, 109 aa, Corynebacterium diphtheriae
MRFSAKKTALIVAATGGLAAAIAPAAGAASVSQWDQVAACESGGNWQINTGNGYYGGLQFSAETWAGAGGTAYAPTADQATKEQQIEIAENVLAMQGSGAWPNCGGPLG

SEQ ID NO: 1530 - protein, 425 aa, Corynebacterium diphtheriae; identical to SEQ ID NO: 1511

SEQ ID NO: 1531 - protein, 385 aa, Corynebacterium diphtheriae
MGNRQKAKINKGASSRAVPMRIVAGGVIASLAVGGVTAQQLKKDITVDLNGEHISLATFSRDVDGVLRQAGVNVGEKDLVYPAPSETVADNDTVTVRTSKQVSVVIDGVKKDVTTNAITVEELFSQLNDVPAALSSASLNVEKGARIPAEGMALDVVTPKIISLTTGDKTVFTQIAAATVADVLKERGIDVDADDVVMPALDTAVSKDMNIKVDKVDSREEKITEKFDEPATYIEDAEQLEGEETLVTPGTQGERTVTRKIVTVNGVETANEVVNEEIITPGVAATIKRGAKKPTTASAAAVASGSVWDQLAQCESGGNWSINTGNGFTGGLQFVDSTWLGLGGGVYAPQAYLATREQQIAIAEKVLAAQGWGAWPACTAKLGLR

SEQ ID NO: 1532 - protein, 207 aa, Corynebacterium diphtheriae
MARHARKTASTKAKFAASTVAFGTAATLLAPTASAAPDSDWDRLAGCEAGGNWAINTGNGFFGGLQFTASTWNAYGGGQYAPTANGATREQQIAVAEKVLAGQGWGAWPACSAKLGLNSAPTPRDVVANAPAPVQAAVAGAQEYAAQAGLNTEELAVDALYNAIKVRLAGTGLGIPPQIEAFYQANRTNFNGFYMANRGAIDFIFSM

SEQ ID NO: 1533 - protein, 207 aa, Corynebacterium ulcerans
MARHARKSASALAKIAASTVAVGSAATLFAPTASAAPDSDWDRLAGCESGGNWAINTGNGYYGGIQFSASTWKGFGGGQYAPTADKATREQQIAVAEKVLASQGWGAWPSCSAKLGLNSAPTPRDSVASAPAPLQQIVDDAQNYAAASGQNADKLAVDAVYKVVKERLAGYGIGVHPEIDAFYQANNNNFDAFYQANRQVIDTVMGM

SEQ ID NO: 1534 - protein, 383 aa, Corynebacterium ulcerans
MGTRQKSRINRVNSSRSIPLRLATGGVLASLAVGGVAVTQVKKDITVDVNGEQLSLATMSDTVEEALSKAGVTVGDKDIVYPGLTEKISNQDTITVRTSKQVSVAIDGVEKDLTTNATTVEELFEQLDGVNATLSAAALNMDKDSKIPREGLSLDVVTPKIISVTDAGKTVFTQIAAATVKDVLAERGIKVDSDDIVTPALDAPVTKNMDVKIDRVDIQEVVANEPFGEPANYVDDAELPEGEEAEVSAGTPGERTVTRKVTKVNGEETANEVIDEKVITPAVAATIKRGTKKAASAPAVANGSVWDQLAQCESTGNWAINTGNGFSGGLQFTDSTWAGFGGTAYAPRAHLATREQQIAVAQKVQAAQGWGAWPACTSKMGLR

SEQ ID NO: 1535 - protein, 425 aa, Corynebacterium ulcerans
MADIMHVFAREILDSRGNPTVEAEVFLDDGAHGIAGVPSGASTGIHEAHELRDGGDRYLGKGVLNAVNNINEEIADAIAGAEADDQRLIDQAMIALDGTENKSRLGANAILGVSMAVAKAAAESAGLPLYRYVGGPNAHLLPVPMMNIVNGGAHADSGVDVQEFMIAPIGAESFSEALRMGAEVYHSLKSVIKSKGLSTGLGDEGGFAPSVESTKAALDLIVEAIEKAGMKPGADIALALDVASSEFFKDGKYHFEGGEHTAEEMAKVYADLIEQYPIVSIEDPLQEDDWEGYTNLTAAIGDKVQIVGDDFFVTNPARLQEGIDKKAANALLVKVNQIGTLTETFDAVDLAHRNGYRTMMSHRSGETEDTTIADLSVALGCGQIKTGAPARSERVAKYNQLLRIEQELGDAAVYAGRSAFPRFRD

SEQ ID NO: 1536 - protein, 375 aa, Corynebacterium glucuronolyticum
MNESTYARPVKIAAGGVLATVVAGGVFAVGNTKTITLDIDGQSTELSTMSASVGDALQSVGFEAKDSDLVSPSPADKLVDGTHITVRSAKPVALVVDGVQHEVTSNALTVSELLQHFNDGEKASITKAAKISSSPEQVIPAGGFTVKVTNPKIVSVDDAGRVVYDSIAAETVGDVLEKRGISLGAEDVVTPSVDTPLKDVSSIKVDRVRTSNVISDEEYTAEPTYTEDPESPEGEETEVSPAEPGRKTVTRKIVFVNGQEVSNEVLQETVTAPSTGAVIARGTKKAPAAASVAAGSVWDSIAQCESGGNWAISTGNGYYGGLQFNVGTWSAYGGGEYAPTANLATRDQQIAIAQKVQAAQGWGAWPACTASLGIR

SEQ ID NO: 1537 - protein, 425 aa, Corynebacterium glucuronolyticum
MTYIEDLTAREILDSRGNPTVEVDVVLADGAFGRAAVPSGASTGVHEAHELRDGGDRYQGKGVEKAVANVDDKIADAIVGIDATDQRLVDNAMIELDGSENKSNLGANAILGVSMAVARAAAQSADLPLYRYIGGPTANILPVPMMNILNGGAHADSGVDVQEFMIAPIGFDSFREALRAGAEVYHTLKSVIKEKGLSTGLGDEGGFAPSVDSTKAALDLIVEAIKKAGFEPGKDIALALDVASSEFYKDGKYHFEGGEHTAEEMAKVYEDLIANYPIVSIEDPLQEDDWEGYTTLTATIGDKVQIVGDDFFVTNPARLKEGIEKKAANALLVKVNQIGSLTETFDAVEMAHRAGYHTMMSHRSGETEDTTIADLAVALGCGQIKTGAPARSERVAKYNRLLRIEEELGSAAHYAGAEAFPRHNK

SEQ ID NO: 1538 - protein, 214 aa, Corynebacterium glucuronolyticum
MARHSAPKKTTFAKIAASATAVAAATTIATPAAQAAPDSDWDRLAQCEAGGNWSINTGNGYHGGLQFSPSTWSAHGGREFAPYAYQATREQQIAVAERILASQGWGAWPACSARLGLNSAPTPRNAPSNESSALESTENIVEEVVQSSSDDKLPVDVLFNLVVNRLAAVGIQVPAEVHGMYDFHRQDIQNFYAANAQFIDANLPQVSAAVKNAQ

SEQ ID NO: 1539 - protein, 207 aa, Corynebacterium diphtheriae; identical to SEQ ID NO: 1532

SEQ ID NO: 1540 - protein, 385 aa, Corynebacterium diphtheriae
MGNRQKAKINKGASSRAVPMRIVAGGVIASLAVGGVTAQQLKKDITVDLNGEHISLATFSRDVDGVLRQAGVNVGEKDMVYPAPSETVADNDTVTVRTSKQVSVVIDGVKKDVTTNAITVEELFSQLNDVPAALSSASLNVEKGARIPAEGMALDVVTPKIISLTTGDKTVFTQIAAATVADVLKERGIDVDADDVVMPALDTAVSKDMNIKVDKVDSREEKITEKFDEPATYIEDAEQLEGEETLVTPGTQGERTVTRKIVTVNGVETANEVVNEEIITPGVAATIKRGAKKPTTASAAAVASGSVWDQLAQCESGGNWSINTGNGFTGGLQFVDSTWLGLGGGVYAPQAYLATREQQIAIAEKVLAAQGWGAWPACTAKLGLR

SEQ ID NO: 1541 - protein, 109 aa, Corynebacterium diphtheriae; identical to SEQ ID NO: 1529

SEQ ID NO: 1542 - protein, 425 aa, Corynebacterium diphtheriae; identical to SEQ ID NO: 1511

SEQ ID NO: 1543 - protein, 169 aa, Corynebacterium diphtheriae; identical to SEQ ID NO: 1528

SEQ ID NO: 1544 - protein, 425 aa, Corynebacterium pseudogenitalium
MADIIHTFAREILDSRGNPTVEAEVFLDDGARGVAGVPSGASTGVHEAHELRDGGERYQGKGVLKAVENINEKIADEIAGFEADDQRLIDQALIKLDGTDNKSELGANAILGVSIAAAKAAAESAALPLYRYIGGPNAHVLPVPMMNILNGGAHADSGVDVQEFMIAPIGAESFAEALRMGAEVYHALKAVLKDKGLSTGLGDEGGFAPSVDSTKAALDVIVDAIKKAGFEPGKDVALALDVASSEFFKDGKYHFEGGEHTAEEMSKVYEDLIDQYPIVSIEDPLQEDDWDGYTTLTAAIGDKVQIVGDDFFVTNPARLQEGIEKKAANALLVKVNQIGTLTETFDAVELAHRNGYRTMMSHRSGETEDTTIADLAVALNCGQIKTGAPARSERVAKYNQLLRIEQELGDGAVYAGRSAFPRFKA

SEQ ID NO: 1545 - protein, 109 aa, Corynebacterium pseudogenitalium
MRSKKTMLTVSAAALGLAGLAAPAATAAPASAWDQVAACESGGDWHINTGNGYQGGLQFNPQTWAANGGTQYAPTADQATREQQIAVAENVLATQGAGAWPNCGGPVAG

SEQ ID NO: 1546 - protein, 393 aa, Corynebacterium pseudogenitalium
MSPHQIKRLNNSRSLPLRLATGGVLGTLAVGGVVAVAAQKDVTVDINGDKVELATFAKDVDGVLEAAGVQVSEEDIVSPAPSESVGDGDEISVRTAKPVAVTIDGVQQQLSTTDLTVSDLLGNLNGVVKGASVKSGDADVDEDAQLEEGMDLEVVSPKIVKINDGGKVTYTKIAAKTVEDVLKARNIDVDDDDRVFPSKDTKVTEGMSIKVDQVSTTTYDSEEEFDAEPNFVDDPELEEGTEEVREEGVKGKRVITHKLVMKDGAKESNDVIKEKVTVEPKAATIARGTKKAEEEKPEEGGNSGAAAPAVADGSVWDSIAQCEATGNWAINTGNGFSGGLQFTPSTWAAFGGTEYAPEAWQASREQQIAVAEKVQAAQGWGAWPACTSKLGLR

SEQ ID NO: 1547 - protein, 209 aa, Corynebacterium pseudogenitalium
MGRHSAKNRMAAKFTAGTVAFGAAAAIMAPTASAAPDSDWDRLAQCEAGGNWHINTGNGYQGGLQFNPQTWQANGGGQFAATADQATREQQIVVAERVLASQGWGAWPACSASLGLNSAPTQRTAPSAAPKAPAQAPAPVKQAAAQKSDELAVDALYNTIKNAANSYGLALPAQFTELYKANRHDFNNFYSANRNIIDPIAQMIENITR

SEQ ID NO: 1548 - protein, 425 aa, Corynebacterium pseudotuberculosis
MADIMHVFAREILDSRGNPTVEAEVFLDDGAHGIAGVPSGASTGIHEAHELRDGGDRYLGKGVLNAVNNINEEIADAVAGAEADDQRLIDQAMIALDGTENKSRLGANAILGVSMAVAKAAAESAGLPLYRYIGGPNAHLLPVPMMNIVNGGAHADSGVDVQEFMIAPIGAESFSEALRMGAEVYHSLKSVIKSKGLSTGLGDEGGFAPSVESTKAALDLIVEAIEKAGMKPGTDIALALDVASSEFFKDGKYHFEGGEHTAEEMAKVYADLIEQYPIVSIEDPLQEDDWEGYTNLTAAIGDKVQIVGDDFFVTNPVRLQEGIDKKAANALLVKVNQIGTLTETFDAVDLAHRNGYRTMMSHRSGETEDTTIADLSVALGCGQIKTGAPARSERVAKYNQLLRIEQELGDAAVYAGRSAFPRFRN

SEQ ID NO: 1549 - protein, 271 aa, Corynebacterium pseudotuberculosis
MMQKQRIIYNGVRRNLMLATSIAFTAGLVYGGGMLEPSMNSLILPSASAAVTGFPRPVPPLENIDLERKASVTIKIPDSSSGTNAGLPGYEVTVILLKTDPINTSEGYAKASKLTVEQAKKLEELRHYSGVTDAKGEANFSELVPGAYLVTTKSPKPGDRKPQEEVLIAPIIGENGEWDYSFTAVMKFKNNPKPGPTLPPWVPPVTQTTPPPTKDEQPPASDNPASKQNKKREALPLTGASVVGLIVISLSLIAGGFFLLVSRKNGENSTY

SEQ ID NO: 1550 - protein, 207 aa, Corynebacterium pseudotuberculosis
MARHARKSASALAKIAASTVAVGSAATLFAPAASAAPDSDWDRLAGCESGGNWAINTGNGYYGGIQFSASTWKGFGGGQYAPTADKATREQQIAVAEKVLASQGWGAWPSCSAKLGLNSAPTPRDSVASAPAPLQQIVDDAQNYAAASGQNADKLAVDAVYKAVKDRLAGYGIGVHPEIDAFYQANNNNFDAFYQANRQVIDTAMGM

SEQ ID NO: 1551 - protein, 383 aa, Corynebacterium pseudotuberculosis
MGTRQKSRINRVNSSKSIPLRLATGGVLASLAVGGVAVTQVKKDITVDVNGEQLTLATMSGTVEEALAKAGVTVGDKDIVYPGLTEKISNQDTIKVRTSKQVSVAIDGVEKNLTTNATTVEELFTQLDGLNATLSSAALNLDKDSKIPREGLSLDVVTPKIISVTEAGKTVFTQIAAATVKDVLAERGIKVDQDDIVTPALDAPVTKNMDVKIDRVDVQEVVANEPFGEPAHYVEDAELPEGEEAEVSAGTPGERTVTRKVTKVNGEETANEVIDEKVITPAVAATVKRGTKKAASAPAVADGSVWDQLAQCESTGNWAINTGNGFSGGLQFTDSTWAGFGGTAYAPRAHLATREQQIAIAQKVQASQGWGAWPACTSKLGLR

SEQ ID NO: 1552 - protein, 109 aa, Corynebacterium accolens
MRTKKTLLTMAAATLGIAGIAAPAANAAPESAWDQVAACESGGDWHINTGNGYHGGLQFSQQTWAGSGGTQYAPTADQATKEQQIEIAENVLATQGAGAWPNCGGPVAG

SEQ ID NO: 1553 - protein, 425 aa, Corynebacterium accolens
MAGIIHAFGREILDSRGNPTVEAEVFLEDGAHGVAGVPSGASTGVHEAHELRDGGDRYLGKGVQKAVENINEEIGDEIAGLEADDQRLIDQALIKLDGTDNKSRLGANAILGVSIATAKAAAESAALPLYRYIGGPNAHVLPVPMMNILNGGSHADSGVDVQEFMIAPIGAETFTEALSIGAGVYHSLKAVLKDKGLSTGLGDEGGFAPSVDSTRAALDVIVEAIKKAGFEPGKDVALALDVASSEFYEDGKYHFEGGEHTAEEMSKVYEELINEYPIVSIEDPLQEDDWEGYTTLTAAIGDKVQIVGDDFFVTNPARLQEGIDKKAANALLVKVNQIGTLTETFDAVELAHRNGYRTMMSHRSGETEDTTIADLAVALNCGQIKTGAPARSERVAKYNQLLRIEQELGDAAVYAGRAAFPRFNA

SEQ ID NO: 1554 - protein, 206 aa, Corynebacterium accolens
MGRHSAKTNHFAAKFTAGTVALGAAAAIMAPNAAAAPDSDWDRLAQCESGGDWHINTGNGYHGGLQFNAQTWQAYGGGEFAPTANQATREQQIVIAERTLANQGWGAWPACSASLGLNSAPTERTAPSAPAEAPQPVQQAVENKSDELAVDAVYNLIKDTANAYGLQLPAQFTDFYHANRHDFDAFYSANRNVIDPVAQLVENFSR

SEQ ID NO: 1555 - protein, 1363 aa, Corynebacterium accolens
MVTVPGVKAEAAEPTDFTPNSTLGNELKKEEKDPQHFAADYSWGLLVWAGEPAGPGFNNGGNKNNDVGWAWCIEPHAKTPLNTFEAYKKKNATKLEFDERYHDAVINLGRKMEAAAVRGDKKSAANYYVYLLMFLNSPQNPKYLPFKTIVGNSKDYFPGFTGSHEDFTALTGYKIEGTEAMPQLVKDSTVEIAKQPADAFITVVHPNNKRNSKAQSVIPVDQPGLPDEPDNGGNSEEPTTSSEENPSDETTPENPGGETSPNETTENPEPSDSEETTPKDTTSETTPDKTTDVVPNPEPTPTTSEQQKDLEPKIETEASIKDGNRVEKGATVIDTVTYEDLVPGKHYTLKAKLISKADGKTVLGESSTELVPDESAGKKDVEIVVNDKADPAVDSAVAFEKLVSTEVDKDGKDTSNSTDENTIATHENINDEKQTVNTEWKPEIHTNADFDNATQVKAGVTVKDTVEYTDLVPGKEYTLKAELRNKAVNDKGEHEVVGKGEATFTPDKSAGEQVVDIKVKDDVEGVIKAAVAFEDLYSKQVDENGKETPSSDEEKIAEHRDIEDEAQTVTSKMKPSIGTKAEKAEGDEIKSGTVITDKVEYQDLVPGKEYTLNAELRSKVKDENGDYAVIGHGEKTFVPSASKGSEEVEITVDEGVIETVDEAVAFEYLTSTAVNKDGEDSNTGKKNDIADHTDINDKDQTVKSEKPSETTTPQTTTTTEEIPGKPGDGGEGETSAPSSEDSSTPKTSETCESEEPGDSESEKPSESEEPSSSESSEPSESESVETTSSEASETSESDKPSDCESTTPSKPDEPGEPTDGNDEKTPKVSTNADFEGDLREVVAGAKVVDQVSYEGLVPNKEYALDAQLISKEDRKTVLGETKGHKFTPKSANGTEAVTIVVNEDVTEPVEAAVAFETLTSTEVDKHGENKPTDEDNPNHVGEHKDINDDDQTVTSEGSEKTPKITTNADFEEGSHAVIAGAKIVDEITYEGLVPGKEYTLNAELINKQDGMTVLGAGDKTFVPEKSAGSVEVEITVDDDVTEPVEAAVAFEELTSIQVDKNGEETPDVEQPNEIAEHKDIDDADQTVISHGDEDTTSSEDEPWISTNADFAHGSHEVVAGAEVVDEVSYEGLVPGKEYTLNAELINKQDGMTVLGTGHKTFVPEKSTGSVEVEITVNDDVTEPVEAAVAFEELTSTQVDKNGEETPDAEQSNEIAEHKDITDEDQTVASKDSETPGKPSKGKIPWWAILIPGIGLGKIIHDRHHSHDHSTEQPKEQPKDQSEEHSKKQDSEGQGDHNAPESNGEDKPGDAGQHAGKEHHGSEANGHVPGQTGNPLPSDAGRAEIKSVPSGATQLESGMQSYIQ

SEQ ID NO: 1556 - protein, 391 aa, Corynebacterium accolens
MAPHHIKRINNSRSLPLRLATGGVLSTLAVGGVVAVAAQKDLVVDVNGDKVELATFAKDVDGVLQAAGVQVGEEDIVSPAPSESVADGDEISVRTAKPVAVSIDGEQQQLSTTDLTVSDLLNNLQGVNPGAAVKSGEDDVDKDAQLKDGMDLEVVSPKIIKINDGGKNTYTKIAAKTVGDVLKERGIKLGEDDRVFPAKEEKVTEGMSIKVERIDIQTEDVTEEFDAEPNFVDDPELEAGAEEVREQGEKGKREITRKVVLKNGKKESEEVIKDEVVVGPKPATIARGTKQAEPEPQGGNSGAAAPAVADGSVWDAIAQCESNGNWSINTGNGFSGGLQFAPSTWAGLGGTEYAPEAWQATREQQIAVAQKVQAAQGWGAWPACTAKLGLR

SEQ ID NO: 1557 - protein, 385 aa, Corynebacterium diphtheriae; identical to SEQ ID NO: 1531

SEQ ID NO: 1558 - protein, 425 aa, Corynebacterium diphtheriae; identical to SEQ ID NO: 1511

SEQ ID NO: 1559 - protein, 207 aa, Corynebacterium diphtheriae; identical to SEQ ID NO: 1532

SEQ ID NO: 1560 - protein, 169 aa, Corynebacterium diphtheriae
MRFFYDTEFIEDGKTIDLVSIGIVCEDGREYYAVSTDADHSRANKWVRDNVLDKMPNPSSTLWKSNATIRQEVYEFLTSTPGNTELWAWVGAYDHVVLAQLWGDMRGLPKELPRYTHELKQYWEMAGRPRLPKLPEGNHDALVDARHNLQKFKICAESLPLNKRNVVNR

SEQ ID NO: 1561 - protein, 560 aa, Corynebacterium diphtheriae; identical to SEQ ID NO: 1522

SEQ ID NO: 1562 - protein, 109 aa, Corynebacterium diphtheriae; identical to SEQ ID NO: 1529

SEQ ID NO: 1563 - protein, 183 aa, Corynebacterium glutamicum
MKNAKLFLALVSAPLILAGCSSTDTGTAESTISSETASAVDATTSTSSSTATSAVIDDDPVFDIIDIVLTQHPDGIITDIDREDSSDQYEVDVVVGQEVLELDVTTSGQIHTDDRDNDDDDDIREAHAATVTAAQAIGLALDQYPDGIIDSVELDEDDGQLRWKIDLDDTSGNDLADVEIAAV

SEQ ID NO: 1564 - protein, 192 aa, Corynebacterium glutamicum
MGRHSTKTSSAFTKLAASTIAFGAAATIMAPSASAAPDSDWDRLAQCESGGNWAINTGNGYHGGLQFSASTWAAYGGQEFATYAYQATREQQIAVAERTLAGQGWGAWPACSASLGLNSAPTQRDLSATTSTPEPAAAPAVAEYNAPAANIAVGSTDLNTIKSTYGAVTGTLAQYGITVPAEVESYYNAFVG

SEQ ID NO: 1565 - protein, 374 aa, Corynebacterium glutamicum
MAPHQKSRINRINSTRSVPLRLATGGVLATLLIGGVTAAATKKDIIVDVNGEQMSLVTMSGTVEGVLAQAGVELGDQDIVSPSLDSSISDEDTVTVRTAKQVALVVEGQIQNVTTTAVSVEDLLQEVGGITGADAVDADLSETIPESGLKVSVTKPKIISINDGGKVTYVSLAAQNVQEALELRDIELGAQDRINVPLDQQLKNNAAIQIDRVDNTEITETVSFDAEPTYVDDPEAPAGDETVVEEGAPGTKEVTRTVTTVNGQEESSTVINEVEITAAKPATISRGTKTVAANSVWDQLAQCESGGNWAINTGNGFSGGLQFHPQTWLAYGGGAFSGDASGASREQQISIAEKVQAAQGWGAWPACTASLGIR

SEQ ID NO: 1566 - protein, 425 aa, Corynebacterium glutamicum; identical to SEQ ID NO: 1513

SEQ ID NO: 1567 - protein, 425 aa, Corynebacterium genitalium
MADIMLTYAREIMDSRGNPTVEVEVFLDDGSHGIAAVPSGASTGEHEAHELRDGGDRYGGKGVQNAVTNVNETIADAIAGIEADDQRVLDLAMIELDGSDNKKNLGANAILGVSMANAKAAADSAGLPLYRYIGGPNAHVLPVPMMNILNGGAHADSGVDVQEFMIAPIGADTFTEALRQGAEVYHALKSVIKDKGLSTGLGDEGGFAPSVDSTRAALDLIVEAIEKAGYKPGADIALALDVASSEFFENGSYNFEGGQHSAEEMAKVYAELVEAYPIVSIEDPLDENDWGGYVKLTEELGDKVQIVGDDFFVTNPDRLAKGIEQNAANALLVKVNQIGTLTETFDAVELAHRNRYATMMSHRSGETEDTTIADLAVALSCGQIKTGAPARSERVAKYNRLIRIEEELGPAAVYAGRNAFPRYNK

SEQ ID NO: 1568 - protein, 380 aa, Corynebacterium genitalium
MSRHRRINKNSTTRAVIASGAIGAVVIGGATTAAAAQKTITVDLNGEETELNTFAGSVDGALEAAGVDVGDKDLVHPAPGESLSNGDTVTVRTAKPVGVRIDGGQVQQVTTTAATVNDFLGEMPGVAGGSAHDYSADQRVEDGMTIDVTSPKIVSITDGGKTTYTSAPARTVAELLAARGVVIDSNDRVTPSLNTPVTEDMAVKIERVDITQRTATEEFEADPTYVDDDSLAPGEEKVREKGEKGERKVTRRLVTVNGKVESDDVLKREETRKARPAVIARGKQQAGGNTGASAPAVAGGSVWDSIAQCESGGNWSINTGNGYYGGLQFAASTWSAYGGGQYAPTADQATREQQIAVAEKVQAAQGWGAWPACTASLGIR

SEQ ID NO: 1569 - protein, 206 aa, Corynebacterium amycolatum
MARHAAKTNTFASTSAKVALTGAILGAGAAIFAPTASAAPDSDWDRLAQCESGGNWHINTGNGYYGGLQFSAGTWNAFGGNEFASTADQASREEQIYVAEKVLAQQGWGAWPACSASLGLSSGPTDRPHPSQGAAPVRAQAAPAAAASDSKTDLIQQFADRLSNVDSLSDAQALIAEFRALTGQVELPQELVAAIPFDLSKLQGLI

SEQ ID NO: 1570 - protein, 231 aa, Corynebacterium genitalium
MPTGEDAHGSDYFTPVFLLPQLCNSTSAKALAGATAAIATTALVAPTASAAPDSDWDRLAQCEAGGNWHINTGNGYYGGLQFSASTWRAYGGGEFAPYAHQATREQQIAVAERTLASQGWGAWPACSRKLGLNSAPTPRTAPAAKPAPAPKPAAAPQPKKNNELEVDKLYKSLTRELNNRGLNVPPQVEATYKANRNDYNAFYQANKDLIDALLSGDAQAFIAAVNARLPR

SEQ ID NO: 1571 - protein, 424 aa, Corynebacterium amycolatum
MAAIIELNAREILDSRGNPTVEVEVLLEDGAVGRAAVPSGASTGVHEAHELRDGGDRYLGKGVEKAVRAVLEEIEDAIIGLEAEDQRLVDKTMIELDGTENKSRLGANAILGVSMAVAKAAAESAGLDLFRYVGGPNGHVLPVPMMNILNGGAHADSGVDVQEFMIAPIGAPTFKEALRVGAEVYHALKKVIKDKGLSTGLGDEGGFAPSVDSTKAALDLIVEAIEAAGYKLGDDVALALDVASSEFYKDGKYHFEGGEHTAEEMAAVYADLVENYAIVSIEDPLQEDDWEGYTKLTAQIGDKVQIVGDDFFVTNPKRLAEGIEKKAANALLVKVNQIGSLSETFEAVAMAHNAGYKTMMSHRSGETEDTTIADLAVGLNCGQIKTGAPARSERVAKYNQLLRIEEYLGDAAVYAGRSAFPRFK

SEQ ID NO: 1572 - protein, 612 aa, Corynebacterium genitalium
MYEVDAGSLLKPNKRSSLGVFQQVRDNPAMPERCGLNVALVVDLSGSMGSNGLRTIQGVVNSVASRLQGTDTNLGLFNFAENSPAKRNGSNLSSPVSVSTQSGQAAIKKWVDGLAIPTEREGQATNWQEALYQVAQYNEQNPSDRYDVVYMITDGNPTVRKDNAFADVRMRFSTADGSATEFRDVEGAIGAANMVKAQGTRIVAVGIPSNWRGVITSRDDQLAVSDENLKAISGGSGYQGRERSLRAADFAQFESSAVMQQAIINSLNTCAITVERRFYEGEDPNGPPTPENTRGTNEETVSGQWSFHSEETPPSGRVTTEDKIPNAWNRRRDNYMSEFALEKQTTYPKVVIREDPSKIPEGWVRMDAEGGKRAQCFDPRGAPVEVNNLPAGGNPAQHPKNTTDDGLTNDFSLTNVPVSGVHCIVYYQAKPADQPFKFKLNKVDSMDNTISLDGAQFALTGLDKDNAGEKKPITVPGAVKGEFHWDKLATGRYELRETKPADHGYVMLSEPVYFRVATAKEGNKEVTKLYLLAGKDDRTGREVADPDKIETFPVTHFGQTKVGNEVQVTMKVANTKGGTLPKTGGHGVYAQMLFGLVLLLTGAFTARRRSAA

SEQ ID NO: 1573 - protein, 406 aa, Corynebacterium genitalium
MSNSYNPNNPYGSQQPDWTSGGADSSGGSTRYTGGYGAGQYGAGAGQEYGAGQYGAGQYGAGQYGAGQYGAGQYGAGAGQYGTGQYGAGQYGTGAGQQYGVDQSGAGAAAPYEQNQTQSLFQNQGQGQYGFDQPQYGPPQQPGGSKLNILGIISIALAVLGTIMSFFPATLVFGWLLLPIALVVGIIGLVMKDMSKGPAIAGVITAVVGGLIALTVFFVAASSTSDSAAEDAGDAAPADGASAGGAADNGKDKGKSKAKGSDAGKSRENPLPLGSTITQGDWEVTINSVNLDATDEIMEENPFSDEPKDGMVHILVNMTAKYIGDDPQGESPLIFVSYVSPEGKTYESHEVTLVEPDMFDLSTTLYNGADTSGNIGVSIPIEGKEEGTIVVEADLYSGEKVFYAVK

SEQ ID NO: 1574 - protein, 217 aa, Corynebacterium genitalium
MGRHRKQNSKAVSAKALAGATAAIATTALVAPTASAAPDSDWDRLAQCEAGGNWHINTGNGYYGGLQFSASTWRAYGGGEFAPYAHQATREQQIAVAERTLASQGWGAWPACSRKLGLNSAPTPRTAPAAKPAPAPKPAAAPQPKKNNELEVDKLYKSLTRELNNRGLNVPPQVEATYKANRNDYNAFYQANKDLIDALLSGDAQAFIAAVNARLPR

SEQ ID NO: 1575 - protein, 379 aa, Corynebacterium amycolatum
MSAAKKRHLNRANDGVSTSSKIAAGGLVAAVALGGTVAASNYDTITVEIDGKVEQIATWSKDDKAILEKAGVETAGGDLVQRQGDLTDGGKLVYRSAKPVTMIVDGKPQEHKTNAITTDELIEGLKKQGLISDKDKVEVEKGEISAKGVELDVVRAKNIVLHDDAKDIDLTVPAMTVGDVLAQRGIELREDDTVEPGLDAPVTEGMRIALSRLIDKTITETEEIPAHENIIEDDSMFEDERIVEQEGEPGQVERQVKVTSRDGEELGREVLEEKELKAPGISTIRQGTKSRIAAPAAGYGVWDQLAQCESGGDWAIDTGNGFSGGLQFTDSTWAAYGGTEYAPRASQASREQQIAVAERVQAGQGWGAWPACTASMGLR

SEQ ID NO: 1576 - protein, 108 aa, Corynebacterium amycolatum
MRFSGKFIASAAVAAGMIAAPTAAANAASVSAWDQVAACESGGNWQTNTGNGYYGGLQFSQQTWSGHGGDQYAPTADQATKEQQIEIGERVLASQGAGAWPNCGGPLG

SEQ ID NO: 1577 - protein, 425 aa, Corynebacterium pseudotuberculosis
MADIMHVFAREILDSRGNPTVEAEVFLDDGAHGIASVPSGASTGIHEAHELRDGGDRYLGKGVLNAVNNINEEIADAVAGAEADDQRLIDQAMIALDGTENKSRLGANAILGVSMAVAKAAAESAGLPLYRYIGGPNAHLLPVPMMNIVNGGAHADSGVDVQEFMIAPIGAESFSEALRMGAEVYHSLKSVIKSKGLSTGLGDEGGFAPSVESTKAALDLIVEAIEKAGMKPGTDIALALDVASSEFFKDGKYHFEGGEHTAEEMAKVYADLIEQYPIVSIEDPLQEDDWEGYTNLTAAIGDKVQIVGDDFFVTNPVRLQEGIDKKAANALLVKVNQIGTLTETFDAVDLAHRNGYRTMMSHRSGETEDTTIADLSVALGCGQIKTGAPARSERVAKYNQLLRIEQELGDAAVYAGRSAFPRFRN

SEQ ID NO: 1578 - protein, 425 aa, Corynebacterium matruchotii
MADIMHVFAREILDSRGNPTVEAEVHLDDFSVGIAGVPSGASTGVHEAHELRDGGDRYQGKGVLEAVKHVNNEIADKIVGFEADDQRVIDQTLIELDGTENKSKLGANAILGVSMAVAKAAAESSNLPLYRYIGGPNAHLLPVPMMNIVNGGAHADSGVDVQEFMIAPIGAETFAEALRLGAEVYHSLKSVVKSKGLSTGLGDEGGFAPSVGSTKEALDLIVEAIKKAGLEPGKDIALALDVASSEFYKDGKYHFEGGEHTAEEMVKVYEDLISSYPIVSIEDPLQEDDWEGYTNLTAKIGDRVQIVGDDFFVTNPARLAKGIEEKAANALLVKVNQIGTLTETFDAVDLAHRAGYRTMMSHRSGETEDTTIADLAVALGCGQIKTGAPARSERVAKYNRLLRIELELGTAAVYAGRSAFPRFKG

SEQ ID NO: 1579 - protein, 206 aa, Corynebacterium matruchotii
MARHARKTASKFAKFAASTVAVGTASAIFSPAAHAAPDSDWDRLAQCESGGNWAINTGNGFHGGLQFTASTWNAHGGQQYAPYAYQASREQQIAVAERVLASQGWGAWPACSAKLGLNSAPTPRDTVSNAPSPVQQAVENAIANAQNDAQANTLASDAIYGLVKDRLASYGIQVPGEVHAFYTANRGDFNAFYTANRQIIDTAVRG

SEQ ID NO: 1580 - protein, 382 aa, Corynebacterium matruchotii
MSHHQKSRLSRLNSSRSVPLRLATSGVLATLVVGGVAVAANKKDVVIDLNGDQLALATLSQDVGGALRSAGIEVADGDIVQPAADAKLGNDEKITVRTVKDVAVVVDGQKKVVKTNATTVGEMVSQLDSIGAAIKALGLSTPVDTKLQKSGMSVDVVTPKIVSITDGGKTSYVSLAAATVKDALAARGIELGPHDRVTPELTSAVSGNMKINIDRVTVDDVQVKEAYDEEPTFVDNPDAMQGVESVVEAGSPGEREVTRRITKVNGVESANDVVSQNVLVPAKKATISRGTKVSRVPTVPDGSVWDRLAQCESTGNWAINTGNGFHGGLQFTPQTWLAYGGGEYAPYAYQATREEQIAVAQKVQASQGWGAWPACTAKMGLR

SEQ ID NO: 1581 - protein, 207 aa, Corynebacterium pseudotuberculosis; identical to SEQ ID NO: 1550

SEQ ID NO: 1582 - protein, 383 aa, Corynebacterium pseudotuberculosis
MGTRQKSRINRVNSSKSIPLRLATGGVLASLAVGGVAVTQVKKDITVDVNGEQLTLATMSGTVEEALAKAGVTVGDKDIVYPGLTEKISNQDTIKVRTSKQVSVAIDGVEKNLTTNATTVEELFTQLDGLNATLSSAALNLDKDSKIPREGLSLDVVTPKIISVTEAGKTVFTQIAAATVKDVLAQRGIKVDQDDIVTPALDAPVTKNMDVKIDRVDVQEVVANEPFGEPAHYVEDAELPEGEEAEVSAGTPGERTVTRKVTKVNGEETANEVIDEKVITPAVAATVKRGTKKAASAPAVADGSVWDQLAQCESTGNWAINTGNGFSGGLQFTDSTWAGFGGTAYAPRAHLATREQQIAIAQKVQASQGWGAWPACTSKLGLR

SEQ ID NO: 1583 - protein, 270 aa, Corynebacterium pseudotuberculosis
MQKQRIIYNGVRRNLMLATSIAFTAGLVYGGGMLEPSTNSLILPSASAAVTGFPGAVSPLEGIDLERKASVTIKIPDSSSGTNAGLPGYEVTVILLKTDPINTSEGYTKASKLTVEQAKKLEELRRYSGVTDAKGEANFPELTPGAYLITAKSPKSGDPEPQEEVLIVPIVGENGEWDYSFTAVMKFKNDPKPGPTLPPWVPPVTQTTPPPTKDEQPPASDNPASKQNKKREALPLTGASVVGLIVISLSLIAGGFFLLVSRKNGENSTY

SEQ ID NO: 1584 - protein, 207 aa, Corynebacterium pseudotuberculosis; identical to SEQ ID NO: 1550

SEQ ID NO: 1585 - protein, 425 aa, Corynebacterium pseudotuberculosis; identical to SEQ ID NO: 1548

SEQ ID NO: 1586 - protein, 255 aa, Corynebacterium pseudotuberculosis
MLATSIAFTAGLVYGGGMLEPSTNSLILPSASAAVTGFPGAVSPLEGIDLERKASVTIKIPDSSSGTNAGLPGYEVTVILLKTDPINTSEGYTKASKLTVEQAKKLEELRRYSGVTDAKGEANFPELTPGAYLITAKSPKSGDPEPQEEVLIVPIVGENGEWDYSFTAVMKFKNDPKPGPTLPPWVPPVTQTTPPPTKDEQPPASDNPASKQNKKREALPLTGASVVGLIVISLSLIAGGFFLLVSRKNGENSTY

SEQ ID NO: 1587 - protein, 383 aa, Corynebacterium pseudotuberculosis; identical to SEQ ID NO: 1582

SEQ ID NO: 1588 - protein, 536 aa, Corynebacterium diphtheriae
MGADDVVDSSKSFVMENFSSYHGTKPGYVDSIQKGIQKPKSGTQGNYDDDWKGFYSTDNKYDAAGYSVDNENPLSGKAGGVVKVTYPGLTKVLALKVDNAETIKKELGLSLTEPLMEQVGTEEFIKRFGDGASRVVLSLPFAEGSSSVEYINNWEQAKALSVELEINFETRGKRGQDAMYEYMAQACAGNRVRRSVGSSLSCINLDWDVIRDKTKTKIESLKEHGPIKNKMSESPNKTVSEEKAKQYLEEFHQTALEHPELSELKTVTGTNPVFAGANYAAWAVNVAQVIDSETADNLEKTTAALSILPGIGSVMGIADGAVHHNTEEIVAQSIALSSLMVAQAIPLVGELVDIGFAAYNFVESIINLFQVVHNSYNRPAYSPGHKTQPFLHDGYAVSWNTVEDSIIRTGFQGESGHDIKITAENTPLPIAGVLLPTIPGKLDVNKSKTHISVNGRKIRMRCRAIDGDVTFCRPKSPVYVGNGVHANLHVAFHRSSSEKIHSNEISSDSIGVLGYQKTVDHTKVNSKLSLFFEIKS

SEQ ID NO: 1589 - protein, 538 aa, Corynebacterium diphtheriae
MSRKLFASILIGALLGIGAPPSAHAGADDVVDSSKSFVMENFSSYHGTKPGYVDSIQKGIQKPKSGTQGNYDDDWKGFYSTDNKYDAAGYSVDNENPLSGKAGGVVKVTYPGLTKVLALKVDNAETIKKELGLSLTEPLMEQVGTEEFIKRFGDGASRVVLSLPFAEGSSSVEYINNWEQAKALSVELEINFETRGKRGQDAMYEYMAQACAGNRVRRSVGSSLSCINLDWDVIRDKTKTKIESLKEHGPIKNKMSESPNKTVSEEKAKQYLEEFHQTALEHPELSELKTVTGTNPVFAGANYAAWAVNVAQVIDSETADNLEKTTAALSILPGIGSVMGIADGAVHHNTEEIVAQSIALSSLMVAQAIPLVGELVDIGFAAYNFVESIINLFQVVHNSYNRPAYSPGHKTQPFLHDGYAVSWNTVEDSIIRTGFQGESGHDIKITAENTPLPIAGVLLPTIPGKLDVNKSKTHISVNGRKIRMRCRAIDGDVTFCRPKSPVYVGNGVHANLHVAFHRSSSEKIHSNEISSDSIGVLG

SEQ ID NO: 1590 - protein, 425 aa, Corynebacterium casei
MADILHVFAREIMDSRGNPTVEAEVFLDDGAHGTAGVPSGASTGVHEAHELRDGGDRYKGKGVLKAVENVNEEIADEIVGFEADDQRLIDQAMIALDGTDNKSRLGANAILGVSIAAAKAAAQSAGLPLYRYIGGPNAHILPVPMMNIVNGGAHADSGVDVQEFMIAPIGAETFSEALQVGAEVYHTLKSVIKDKGLSTGLGDEGGFAPSVDSTKAALDLIVEAVEKSGYKLGEDVALALDVASSEFYKDGKYHFEGGEHTAEEMSKVYAELIEQYPIVSIEDPLDEDDWAGYTALIAEVGDKVQIVGDDLFATNPERLQKGIDEKAANALLVKVNQIGTLSETFDAVDLAHRNGFRTMMSHRSGETEDTTIADLAVALGCGQIKTGAPARSERVAKYNQLIRIEQELDDAAVYAGRSAFPRFNK

SEQ ID NO: 1591 - protein, 210 aa, Corynebacterium casei
MGRHSAKTNSVGTKFAATTVAFGAAAALMAPTAAAAPDSDWDRLAQCESGGNWSINTGNGYHGGLQFSASTWQAFGGGEFAATANQASREQQIVVAERTLAQQGWGAWPACSAGLGLNSAPTERTAPSQESSAPAVPADAPAAVQQSAQNSSSDEVASDAVYSLVVDTLSNYGVQVPSVVTEAYKANRSDFNAFYSANRGTIDPIVALAG

SEQ ID NO: 1592 - protein, 382 aa, Corynebacterium casei
MSTTHHIKRINNTRSLPLRLATGGMLGTLAVGGVVAVNAQKDVTVDVNGELIELATFSTDVEGALQAAGIDYEGEDLIYPAPSESLGNGESITVRTAKPVAVTVDGEEKTMTSTALTVEDLLGTLDSVTPGAAVLTGDKEADAADKITDGMALEVVSPKIISIKDGGKVTYTSIAAKTVGDVLEARGIDVDADDRVSPGLDEEVAAGTQIVVDRVQVKEFELTEDFEAEPHYVDDDNMEKGEERVVEEGMSGERKRAIKQVFVNGKEESKDVVEENILTEPKPATIARGTKEPSTAPSVADGSVWDSLVQCEATGDWHINTGNGFSGGLQFTPSTWQAFGGGEYAAEAYQASREEQIAVAEKVQAAQGWGAWPACTAKMGLR

SEQ ID NO: 1593 - protein, 385 aa, Corynebacterium diphtheriae; identical to SEQ ID NO: 1531

SEQ ID NO: 1594 - protein, 109 aa, Corynebacterium diphtheriae; identical to SEQ ID NO: 1529

SEQ ID NO: 1595 - protein, 169 aa, Corynebacterium diphtheriae; identical to SEQ ID NO: 1528

SEQ ID NO: 1596 - protein, 207 aa, Corynebacterium diphtheriae; identical to SEQ ID NO: 1532

SEQ ID NO: 1597 - protein, 425 aa, Corynebacterium diphtheriae; identical to SEQ ID NO: 1511

SEQ ID NO: 1598 - protein, 383 aa, Corynebacterium pseudotuberculosis; identical to SEQ ID NO: 1582

SEQ ID NO: 1599 - protein, 270 aa, Corynebacterium pseudotuberculosis; identical to SEQ ID NO: 1583

SEQ ID NO: 1600 - protein, 207 aa, Corynebacterium pseudotuberculosis; identical to SEQ ID NO: 1550

SEQ ID NO: 1601 - protein, 425 aa, Corynebacterium pseudotuberculosis; identical to SEQ ID NO: 1548

SEQ ID NO: 1602 - protein, 425 aa, Corynebacterium glutamicum; identical to SEQ ID NO: 1513

SEQ ID NO: 1603 - protein, 560 aa, Corynebacterium diphtheriae; identical to SEQ ID NO: 1522

SEQ ID NO: 1604 - protein, 169 aa, Corynebacterium diphtheriae; identical to SEQ ID NO: 1528

SEQ ID NO: 1605 - protein, 425 aa, Corynebacterium diphtheriae
MADIMHVFAREILDSRGNPTVEAEVFLDDGSHGVAGVPSGASTGVHEAHELRDGGERYLGKGVLNAVNNVNEEIADAIAGAEADDQRLIDQAMIALDGTENKSRLGANAILGVSIAVAKAAAESAGLPLYRYIGGPNAHVLPVPMMNIVNGGAHADSGVDVQEFMIAPIGAESFSEALRMGAEVYHSLKSVIKSKGLSTGLGDEGGFAPSVESTKAALDLIVEAIEKAGFKPGADVALALDVASSEFYKDGKYHFEGGEHTAEEMAKVYEQLIAEYPIVSIEDPLQEDDWEGYTALTAAIGDKVQIVGDDFFVTNPARLKEGIEKKAANALLVKVNQIGTLTETFDAVDLAHRNGYRTMMSHRSGETEDTTIADLAVALGCGQIKTGAPARSERVAKYNQLLRIEQQLDDAAVYAGRSAFPRFQG

SEQ ID NO: 1606 - protein, 207 aa, Corynebacterium diphtheriae; identical to SEQ ID NO: 1532

SEQ ID NO: 1607 - protein, 385 aa, Corynebacterium diphtheriae
MGNRQKAKINKGASSRAVPMRIVAGGVIASLAVGGVTAQQLKKDITVDLNGEHISLATFSRDVDGVLKQAGVNVGEKDLVYPAPSETVADNDTVTVRTSKQVSVVIDGVKKDVTTNAITVEELFSQLNDVPAALSSASLNVEKGARIPAEGMSLDVVTPKIISLTTGDKTVFTQIAAATVADVLKERGIDVDTDDVVMPALDTAVSKDMNIKVDKVDSREEKITEKFDEPATYIDDAEQLEGEETLVTPGTQGERTVTRRIVTVNGAETANEVVNEEIITPGVAATIKRGTKKPTTASAAAVASGSVWDQIAQCESGGNWSINTGNGFTGGLQFVDSTWLGLGGGVYAPQAYLATREQQIAIAEKVLAAQGWGAWPACTAKLGLR

SEQ ID NO: 1608 - protein, 109 aa, Corynebacterium diphtheriae; identical to SEQ ID NO: 1529

SEQ ID NO: 1609 - protein, 383 aa, Corynebacterium pseudotuberculosis; identical to SEQ ID NO: 1551

SEQ ID NO: 1610 - protein, 207 aa, Corynebacterium pseudotuberculosis; identical to SEQ ID NO: 1550

SEQ ID NO: 1611 - protein, 425 aa, Corynebacterium pseudotuberculosis; identical to SEQ ID NO: 1548

SEQ ID NO: 1612 - protein, 109 aa, Corynebacterium diphtheriae; identical to SEQ ID NO: 1529

SEQ ID NO: 1613 - protein, 169 aa, Corynebacterium diphtheriae
MRFFYDTEFIEDGETIDLVSIGIVCEDGREYYAVSTDADHSRANKWVRDNVLDKMPNPSSTLWKSNATIRQEVYEFLTSTPGNTELWAWVGAYDHVVLAQLWGDMRGLPKELPRYTHELKQYWEMAGRPRLPKLPEGNHDALVDARHNLQKFKICAESLPLNKRNVVNG

SEQ ID NO: 1614 - protein, 207 aa, Corynebacterium diphtheriae; identical to SEQ ID NO: 1532

SEQ ID NO: 1615 - protein, 385 aa, Corynebacterium diphtheriae; identical to SEQ ID NO: 1531

SEQ ID NO: 1616 - protein, 425 aa, Corynebacterium diphtheriae
MADIMHVFAREILDSRGNPTVEAEVFLDDGSHGVAGVPSGASTGVHEAHELRDGGERYLGKGVLNAVNNVNEEIADAIAGAEADDQRLIDRAMIALDGTENKSRLGANAILGVSIAVAKAAAESAGLPLYRYIGGPNAHVLPVPMMNIVNGGAHADSGVDVQEFMIAPIGAESFSEALRMGAEVYHSLKSVIKSKGLSTGLGDEGGFAPSVESTKAALDLIVEAIEKAGFKPGADIALALDVASSEFYKDGKYHFEGGEHTAEEMAKVYEQLIAEYPIVSIEDPLQEDDWEGYTALTAAIGDKVQIVGDDFFVTNPARLKEGIEKKAANALLVKVNQIGTLTETFDAVDLAHRNGYRTMMSHRSGETEDTTIADLAVALGCGQIKTGAPARSERVAKYNQLLRIEQQLDDAAVYAGRSAFPRFQG

SEQ ID NO: 1617 - protein, 968 aa, Corynebacterium diphtheriae
MKDLSPRKRYGGLPLRAALALCTASALFLGIVVPGGFPVEAAQEVAEIDGAEDTARPEATPEDAAPSAVDPADSDASKVGSPAAPPAKPSDAKPEKVPAPENLQAPTEEGEPAPASSVSRLIGGDWRKKIVEKNPPMPQRCGLRIALVFDLSNSVGENGLENTKISGQKLIKDLSYTPTTIGIFNFGTEAPVANTKDEPRLDLTNPSDVQTALSTIQKFDYGNHNHSKDDPYTDSGGTNWEGALRNVRKAGVHYDVVYFVTDGVPTTNIKHLPENVDGKVLDGKTHDTGRVTHNGDITLAMEEANKIKEGGTRIEVIAVGSFDGKVPVLRDNVQYDGLTRWTRTDTIWSNAAEVRSGTFWAVPTGSQIREPDLRSVFEKRVKAGVLDYFHTHEKADYYVFRLEDELSSVPTGEPFSENIRVYDYRQKRNVNKLFEGNVYRSNYAVGHDIMQKISGPAAEDVHFISNYDQLATTLRDLATESCESALTVQKQIVDEHGEIIDANPKGWKFTDTDIEGNLEVIRRDGVSGNEQFTDESGLVSYNFKSQSRRQNGTLTITETQKDGFELKKVGSDNAKCTEVDITSNSASSAKSIKIENRGDLGFNVGIGTGKTVHCIVQNMKLDNTFKIKKVPHPDQDKDTDGDQLKAPVNTENEVTAYYDVEVTSNARRKLKLHAPVVDTMTFPQGMTIKNIEFFMGNKKIDDPALIAMKASMAPNVANFEFMPALFDEFEAQQMKKVEVRVTASVDERTRLSISDESYERCESSTPRTADRPKSMFNAVRLEGESEGEDPTFNNQACVDPELKLVDFTVQKIDGSDERVPLEGAEFTIFSGDAAVPQSWKEVVRMQPKPGEASTLVLPKGANVTPGKYLLVETKAPKSADGRQYSLLVRPITFMVDVKGGKTEVEILDGTPVATVDSDNLSIIRVVNVYVGTLPQTGGAGVGIIALLGMLLTLAGAFFARRSRGTSQA

SEQ ID NO: 1618 - protein, 291 aa, Corynebacterium ulcerans
VVLSLPFAEGSSSVEYINNWEQAKELSVELEINFETRGKRGQDAMYEYMAQSCAGNRVRRSVGSSLSCINLDWDAIRDKTKTKIESLKEHGSIKNKMSESPNKTVSEEKAKQYLEEFHQTALEHPELSELKTVTGVNSVFAGANYASWAVNVAQVVDSKTADNLEKTTAALSILPGIGSVMGIADGAVHHNTEEIVAQSIALSSLMVAQAIPLVGELVDLGFAAYNFVESIINLFQVVHNSYNRPAYSPGHKTQPFVHGGYAASWNTVEDSIIKTGFQGESGHDIKITAEN

SEQ ID NO: 1619 - protein, 560 aa, Corynebacterium ulcerans
MNRKLFASILIGAILGIGAPPLAHAGADDVDDSSKSFVMENFSSYHGTKPGYVDSIQKGIQKPKSGAQGNYDDDWKGFYSTDNKYDAAGYSVDNENPLSGKAGGVVKVTYPGLTKILALKVDNAETIKKELGLSLTEPLMEQVGTEEFIKRFGDGASRVVLSLPFAEGSSSVEYINNWEQAKALSVELEINFETRGKRGQDAMYEYMAQSCAGNRVRRSVGSSLSCINLDWDAIRDKTKTKIESLKEHGPIKNKMSESPNKIVSEEKAKQYLEEFHQTALEHPELSELKTVTGVNSVFAGANYASWAVNVAQVVDSKTADNLEKTTAALSILPGIGSVMGIADGAVHHNTEEIVAQSIALSSLMVAQAIPLVGELVDLGFAAYNFVESIINLFQVVHNSYNRPAYSPGHKTQPFVHGGYAASWNTVEDSIIKTGFQGESGHDIKITAENTPLPIAGVLLPTIPGKLDVNKSKTHISVNGRKIRMRCRAIDDATTFCRPKTPVYVGNGVHANLHVAFHRSSSEKIHSDETPLSSIDVLGYQKTVDHTKVNSKLSLFAEVKS

SEQ ID NO: 1620 - protein, 291 aa, Corynebacterium ulcerans
VVLSLPFAEGSSSVEYINNWEQAKELSVELEINFETRGKRGQDAMYEYMAQSCAGNRVRRSVGSSLSCINLDWDAIRDKTKTKIESLKEHGPIKNKMSESPNKTVSEEKAKQYLEEFHQTALEHPELSELKTVTGVNSVFAGANYASWAVNVAQVVDSKTADNLEKTTAALSILPGIGSVMGIADGAVHHNTEEIVAQSIALSSLMVAQAIPLVGELVDLGFAAYNFVESIINLFQVVHNSYNRPAYSPGHKTQPFVHGGYAASWNTVEDSIIKTGFQGESGHDIKITAEN

SEQ ID NO: 1621 - protein, 560 aa, Corynebacterium ulcerans
MNRKLFASILIGALLGIGAPPSAHAGADDVVDSSKSFVMENFSSYHGTKPGYVDSIQKGIQKPKSGTQGNYDDDWKGFYSTDNKYDAAGYSVDNENPLSGKAGGVVKVTYPGLTKILALKVDNAETIKKELGLSLTEPLMEQVGTEEFIKRFGDGASRVVLSLPFAEGSSSVEYINNWEQAKELSVELEINFETRGKRGQDAMYEYMAQSCAGNRVRRSVGSSLSCINLDWDAIRDKTKTKIESLKEHGPIKNKMSESPNKTVSEEKAKQYLEEFHRTALEHPELSELKTVTGVNSVFAGANYASWAVNVAQVVDSKTADNLEKTTAALSILPGIGSVMGIADGAVHHNTEEIVAQSIALSSLMVAQAIPLVGELVDLGFAAYNFVESIINLFQVVHNSYNRPAYSPGHKTQPFVHGGYAASWNTVEDSIIKTGFQGESGHDIKITAENTPLPIAGVLLPTIPGKLDVNKSKTHISVNGRKIRMRCRAIDDATTFCRPKTPVYVGNGVHANLHVAFHTSSSEKIHSDETPLSSIDVLGYQKTVDHTKVNSKLSLFAEVKS

SEQ ID NO: 1622 - protein, 560 aa, Corynebacterium ulcerans
MNRKLFASILIGAILGIGAPPLAHAGADDVVDSSKSFVMENFSSYHGTKPGYVDSIQKGIQKPKSGAQGNYDDDWKGFYSTDNKYDAAGYSVDNENPLSGKAGGVVKVTYPGLTKILALKVDNAETIKKELGLSLTEPLMEQVGTEEFIKRFGDGASRVVLSLPFAEGSSSVEYINNWEQAKELSVELEINFETRGKRGQDAMYEYMAQSCAGNRVRRSVGSSLSCINLDWDAIRDKTKTKIESLKEHGPIKNKMSESPNKTVSEEKAKQYLEEFHQTALEHPELSELKTVTGVNSVFAGANYASWAVNVAQVVDSKTADNLEKTTAALSILPGIGSVMGIADGAVHHNTEEIVAQSIALSSLMVAQAIPLVGELVDLGFAAYNFVESIINLFQVVHNSYNRPAYSPGHKTQPFVHGGYAASWNTVEDSIIKTGFQGESGHDIKITAENTPLPIAGVLLPTIPGKLDVNKSKTHISVNGRKIRMRCRAIDDATTFCRPKTPVYVGNGVHANLHVAFHRSSSEKIHSDETPLSSIDVLGYQKTVDHTKVNSKLSLFAEVKS

SEQ ID NO: 1623 - protein, 214 aa, Corynebacterium glucuronolyticum; identical to SEQ ID NO: 1538

SEQ ID NO: 1624 - protein, 375 aa, Corynebacterium glucuronolyticum; identical to SEQ ID NO: 1536

SEQ ID NO: 1625 - protein, 425 aa, Corynebacterium glucuronolyticum; identical to SEQ ID NO: 1537

SEQ ID NO: 1626 - protein, 207 aa, Corynebacterium ammoniagenes
MGSHSAKTNSVGTKFAATTIAFGAAAALMAPTAAAAPDSDWDRLAQCESGGDWNINTGNGYHGGLQFSAGTWQAHGGGEFAPTADQASREQQIVVAERTLASQGWGAWPACSSQLGLNSAPTDRSAPAPQPSAPADAPAVVQQSVQNSSSNEVASDQVYKLVVDTLNSYGVQVPSVVTDAYNANRGDFNAFYSANRGTIDPILAQVQ

SEQ ID NO: 1627 - protein, 303 aa, Corynebacterium ammoniagenes
MIKRLFPIAAAALLLAACGSAETTVDTSETTTTETSTVEVFPPHEEVEAPGVTLKLDSVTESDHLMLNAEGVKPGYLPEERQNPSDGAKFITVNTIVTNTGRGSMDLTCGFGIQAHLFNKDGQRYDPVQDLYRVPGNPECNDSLNPGFSIEMSWPFEIPESMEATEFGFANPETNYDDLTLVDVTDASREDTPGTEDSPPAQSPIEEPQAAVEEPSSNVVQSQNEGYYSSPDNPALAEQERLASIPYADGGTCPAYKCGYGTNSQGERNPSSGEIQTLHGCQDGYINDPELCSAVEWVENHEY

SEQ ID NO: 1628 - protein, 425 aa, Corynebacterium ammoniagenes
MADILHVFAREIMDSRGNPTVEAEVFLDDGAHGTAGVPSGASTGVHEAHELRDGGDRYQGKGVLKAVENVNEEIADELVGFEADDQRLIDQAMIALDGTENKSRLGANAILGVSIAAAKAAAQSAGLPLYRYIGGPNAHILPVPMMNILNGGAHADSGVDVQEFMIAPIGAETFSEALQVGAEVYHSLKAVIKDKGLSTGLGDEGGFAPSVDSTKAALDLIVEAVEKSGYKLGEDIALALDVASSEFYKDGKYHFEGGEHTAEEMTKVYAELIEQYPIVSIEDPLDEDDWAGYSTLIAAVGEKVQIVGDDLFATNPTRLQRGIDEKAANALLVKVNQIGTLSETFDAVDLAHRNGFRTMMSHRSGETEDTTIADLAVALGCGQIKTGAPARSERVAKYNQLIRIEQELDDAAVYAGRSAFPRFQK

SEQ ID NO: 1629 - protein, 364 aa, Corynebacterium ammoniagenes
MLGTLAVGGVVAVNTQKDVTVDVNGERIELATFSSDIEGALQAAGIDYEGDDLIYPAPSESLDNGESITVRTAKPVAVTVDGEVKTMNSTALTVEDLLGTMDGVLPGAAVLAGNQEADADEKITDGMELEVVSPKIVSIKDGGKVTYTSIAAKTVGDVLQERGIKVDADDRVSPGVDEKLTAGTKIVIDRVETEEFDVTEDFDAEPNYVDDENLAKGEERVVEEGMSGERQRTIKKVTVNGQEESKDVIKETVLTEPKPATIARGTKEEAAKPSGAAAPAVAGGSVWDELAQCEATGDWHINTGNGYSGGLQFNAQTWQAYGGGEYAPEAYQASREQQIAVAEKVQAAQGWGAWPACTSSMGLR

SEQ ID NO: 1630 - protein, 207 aa, Corynebacterium diphtheriae; identical to SEQ ID NO: 1532

SEQ ID NO: 1631 - protein, 385 aa, Corynebacterium diphtheriae
MGNRQKAKINKGASSRAVPMRIVAGGVIASLAVGGVTAQQLKKDITVDLNGEHISLATFSRDVDGVLRQAGVNVGEKDLVYPAPSETVADNDTVTVRTSKQVSVVIDGVKKDVTTNAITVEELFSQLNDVPAALSSASLNVEKGARIPAEGMALDVVTPKIISLTTGDKTVFTQIAAATVADVLKERGIDVDADDVVMPALDTAVSKDMNIKVDKVDSREEKITEKFEEPATYIEDAEQLEGEETLVTPGTQGERTVTRKIVTVNGVETANEVVNEEIITPGVAATIKRGAKKPTTASAAAVASGSVWDQLAQCESGGNWSINTGNGFTGGLQFVDSTWLGLGGGVYAPQAYLATREQQIAIAEKVLAAQGWGAWPACTAKLGLR

SEQ ID NO: 1632 - protein, 425 aa, Corynebacterium diphtheriae; identical to SEQ ID NO: 1511

SEQ ID NO: 1633 - protein, 109 aa, Corynebacterium diphtheriae
MRFSAQKTALIVAATGGLAAAIAPAAGAASVSQWDQVAACESGGNWQINTGNGYYGGLQFSAETWAGAGGTAYAPTADQATKEQQIQIAENVLAMQGSGAWPNCGGPLG

SEQ ID NO: 1634 - protein, 169 aa, Corynebacterium diphtheriae
MRFFYDTEFIEDGKTIDLVSIGIVCEDGREYYAVSTDADHSRANKWVRDNVLDKMPNPSSTLWKSNATIRQEVYEFLTSTPGNTELWAWVGAYDHVVLAQLWGDMRGLPKELPRYTHELKQYWEMAGRPRLPKLPEGNHDALVDARHNLQKFKICAESLPLNKRNVVNG

SEQ ID NO: 1635 - protein, 425 aa, Corynebacterium diphtheriae; identical to SEQ ID NO: 1511

SEQ ID NO: 1636 - protein, 385 aa, Corynebacterium diphtheriae; identical to SEQ ID NO: 1531

SEQ ID NO: 1637 - protein, 207 aa, Corynebacterium diphtheriae; identical to SEQ ID NO: 1532

SEQ ID NO: 1638 - protein, 109 aa, Corynebacterium diphtheriae; identical to SEQ ID NO: 1529

SEQ ID NO: 1639 - protein, 169 aa, Corynebacterium diphtheriae; identical to SEQ ID NO: 1528

SEQ ID NO: 1640 - protein, 381 aa, Corynebacterium lipophiloflavum
MAAKRINSTTSATRRVLAGSVAGAVIVGGAATAAAAAQKNVTVDVNGEATTVRTYSDDVEGALQAAGVEVGASDLVYPAPSDALQSGTTVTVRTAKPVALVIDGAEQQLTSTAATVADLVSEAGITAASALSAHPDQPLTDGMTIDVTTPKIVSINDGGNVVYTSEAAKTVGDLLAARGITFDTNDRLNVPLSAPLEPNMRIVLDRVDVSETSESVEFDAPAKVVEDANLPAGTEEVREPGAKGEKKVLYRTVTVNGVVESSGPAGEEEIRPAVPATVVRGTKAAATATAAAAGAPSVAGGSVWDQIAQCESGGNWSINTGNGYYGGLQFNAGTWAAYGGTQYAPTADLATREQQIAIAEKTQAAQGWGAWPACTAKLGLR

SEQ ID NO: 1641 - protein, 212 aa, Corynebacterium lipophiloflavum
MGRHSKQTASFATKALAGTAAAAALTGIMAPAAHAAPDSDWDRLAQCEAGGNWSINTGNGYYGGLQFSASTWRAYGGDQFAPYAHQATREQQIIVAERTLASQGWGAWPACSARLGLNSAPTNRDAQAAPAPAPAPAAAPAPAAAPSAAPQVDALYHAIVARLNENNIAVPAELHTAYAANRDDYSNFYLANKALIDAVLAGDINAVIAELV

SEQ ID NO: 1642 - protein, 274 aa, Corynebacterium lipophiloflavum
MSTSYTAPVGPAQPVAPVEPPQRTTVGIIALVCAIAGFIFGCIPGAFILGWILLPIGFILGITGLFMKAKKGTAVAAVIVSIVGTIVSVIVFLFAVGRTFDESFNQDVFVAGPESAVAPVAEGSAAQGGSAAGSTRDNPLPIGATVENEEWSVTLNSVDLDATDAVTAENPVNDQPGPDQTYALANVTITYKGDNPQGSMPMPLIEYVTPDGHSVTSFDTLVVAPDALDTLTSLYSGASVSGNEAFLIPAGTAGEDVLAIQPDLLSKKAFFAVR

SEQ ID NO: 1643 - protein, 424 aa, Corynebacterium lipophiloflavum
MADIIHAFAREIMDSRGNPTVEAEVFLDDGARGIAGVPSGASTGVHEAHELRDGDERYEGKGVRKAVDNVNEEIADAIAGIEADDQRLIDQTMIELDGTDNKSRLGANAILGVSMAVAKAAAESAGLPLYRYIGGPNAHILPVPMMNILNGGAHADSGVDVQEFMIAPLGAETFEEALRMGAEVYHALKSVLKAKGLSTGLGDEGGFAPSVDSTKAALDVIVEAVEKAGYTLGDDIALALDVASSEFYEDGVYNFEGGKHSSAEMIKVYAELVEQYPIVSIEDPLDEDDWDGYVELTAQIGDKVQIVGDDFFVTNPKRLAEGIEKKAANALLVKVNQIGTLTETFDAVDLAHRNGYRTMMSHRSGETEDTTIADLAVALGCGQIKTGAPARSERVAKYNQLLRIEQELGDAAVYAGRSAFPRFK

SEQ ID NO: 1644 - protein, 203 aa, Corynebacterium efficiens
MFTRKLFTLTAVAGLSLSLAACGDDSGDSDATATETTVVTSEDETTDDPATTEETADNGVATETQTAVSDADATADRDIVFDAIDLVMAEHADGIIIDIDREDDTEAYEIDVVVGEEVIELNVDTAAGEVRESDRDNDDAEDVRRAQEATVTVADAITQALEAHPDGVVDEASLEDEDGRLEWQIDLDDVERNDLAEFTVLAN

SEQ ID NO: 1645 - protein, 421 aa, Corynebacterium efficiens
MHVFAREIMDSRGNPTVEAEVFLDDGSHGVAGVPSGASTGVHEAHELRDGGDRYLGKGVLKAVENVNEEIGDELAGLEADDQRLIDAAMIKLDGTENKSRLGANAILGVSMAVAKAAADSAGLPLFRYIGGPNAHVLPVPMMNIINGGAHADSGVDVQEFMIAPIGFDSFSEALRAGAEVYHALKKVINEKGLSTGLGDEGGFAPSVESTRAALDLIVEAIKKAGFEPGKDIALALDVASSEFFKDGKYHFEGGEHTAEEMANVYAELVDEYPIVSIEDPLQEDDWDGYVALTAQIGDKVQIVGDDFFVTNPARLKEGIAKKAANSILVKVNQIGTLTETFDAVDMAHRAGYTSMMSHRSGETEDTTIADLAVALNCGQIKTGAPARSDRVAKYNQLLRIEQLLGDAAVYAGRSAFPRFQG

SEQ ID NO: 1646 - protein, 109 aa, Corynebacterium tuberculostearicum; identical to SEQ ID NO: 1545

SEQ ID NO: 1647 - protein, 393 aa, Corynebacterium tuberculostearicum
MSPHQIKRLNNSRSLPLRLATGGVLGTLAVGGVVAVAAQKDVTVDINGDKVELATFAKDVDGALEAAGVQVSEEDIVSPAPSESVGDGDEISVRTAKPVAVTIDGVQQQLSTTDLTVSDLLGNLDGVVKGASVKSGDADVDEDAQLEEGMDLEVVSPKIVKINDGGKVTYTKIAAKTVEDVLKARNIDVDDDDRVFPSKDTKVTEGMSIKVDQVSTTTYDSEEEFDAEPNFVDDPELEEGTEEVREEGVKGKRVITHKLVMKDGAKESNDVIKEKVTVEPKAATIARGTKKAEEEKPEEGGNSGAAAPAVADGSVWDSIAQCEATGNWSINTGNGFSGGLQFTPSTWAAFGGTEYAPEAWQASREQQIAVAEKVQAAQGWGAWPACTSKLGLR

SEQ ID NO: 1648 - protein, 209 aa, Corynebacterium tuberculostearicum; identical to SEQ ID NO: 1547

SEQ ID NO: 1649 - protein, 425 aa, Corynebacterium tuberculostearicum
MADIIHTFAREILDSRGNPTVEAEVFLDDGARGVAGVPSGASTGVHEAHELRDGGERYQGKGVLKAVENINEKIADEIAGFEADDQRLIDQALIKLDGTDNKSELGANAILGVSIAAAKAAAESAALPLYRYIGGPNAHVLPVPMMNILNGGAHADSGVDVQEFMIAPIGAESFAEALRMGAEVYHALKAVLKDKGLSTGLGDEGGFAPSVDSTKAALDVIVDAIKKAGFEPGKDVALALDVASSEFFKDGKYHFEGGEHTAEEMSKVYEDLIDQYPIVSIEDPLQEDDWEGYTALTAAIGEKVQIVGDDFFVTNPARLQEGIEKKAANALLVKVNQIGTLTETFDAVELAHRNGYRTMMSHRSGETEDTTIADLAVALNCGQIKTGAPARSERVAKYNQLLRIEQELGDGAVYAGRSAFPRFKA

SEQ ID NO: 1650 - protein, 425 aa, Corynebacterium diphtheriae; identical to SEQ ID NO: 1511

SEQ ID NO: 1651 - protein, 109 aa, Corynebacterium diphtheriae; identical to SEQ ID NO: 1529

SEQ ID NO: 1652 - protein, 207 aa, Corynebacterium diphtheriae; identical to SEQ ID NO: 1532

SEQ ID NO: 1653 - protein, 169 aa, Corynebacterium diphtheriae; identical to SEQ ID NO: 1528

SEQ ID NO: 1654 - protein, 385 aa, Corynebacterium diphtheriae; identical to SEQ ID NO: 1531

SEQ ID NO: 1655 - protein, 425 aa, Corynebacterium striatum
MADIIHVFAREILDSRGNPTVEAEVFLDDGAHGVAGVPSGASTGVHEAHELRDGGERYLGKGVLKAVENVNEEIADEIAGFEADDQRLIDQALIALDGTENKSRLGANAILGVSIAAAKAAAESAALPLYRYIGGPNAHVLPVPMMNIVNGGAHADSGVDVQEFMIAPIGAESFAEALRMGAEVYHSLKSVIKEKGLSTGLGDEGGFAPEAESTKAALDLIVEAIKKAGFEPGKDIALALDVASSEFFKDGKYHFEGGEHTAEEMAKVYEELINEYPIVSIEDPLQEDDWEGYTKLTATIGDKVQIVGDDFFVTNPARLAEGIEKKAANALLVKVNQIGTLTETFDAVELAHRNGYRTMMSHRSGETEDTTIADLAVALNCGQIKTGAPARSERVAKYNQLLRIEQELGEGAVYAGRSAFPRFQG

SEQ ID NO: 1656 - protein, 361 aa, Corynebacterium matruchotii
MATSGVLATLVVGGVAVAANKKDVVIDLNGDQLALATLSQDVGGALRSAGIEVADGDIVQPAADAKLGNDEKITVRTVKDVAVVVDGQKKVVKTNATTVGEMVSQLDSIGAAIKALGLSTPVDTKLQKSGMSVDVVTPKIVSITDGGKTSYVSLAAATVKDALAARGIELGPHDRVTPELTSAVSGNMKINIDRVTVDDVQVKEAYDEEPTFVDNPDAMQGVESVVEAGSPGEREVTRRITKVNGVESANDVVSQNVLVPAKKATISRGTKVSRVPTVPDGSVWDRLAQCESTGNWAINTGNGFHGGLQFTPQTWLAYGGGEYAPYAYQATREEQIAVAQKVQASQGWGAWPACTAKMGLR

SEQ ID NO: 1657 - protein, 111 aa, Corynebacterium striatum
MRSKKKFATLSAAAAMGVAALATPAANAAPVSAWDQVAACESGGNWLINTGNGYYGGLQFSAQTWSGFGGQQYAPTADQATKEQQIAVAEQVLAAQGAGAWPNCGGPVGGY

SEQ ID NO: 1658 - protein, 421 aa, Corynebacterium matruchotii
MHVFAREILDSRGNPTVEAEVHLDDFSVGIAGVPSGASTGVHEAHELRDGGDRYQGKGVLEAVKHVNNEIADKIVGFEADDQRVIDQTLIDLDGTENKSKLGANAILGVSMAVAKAAAESSNLPLYRYIGGPNAHLLPVPMMNIVNGGAHADSGVDVQEFMIAPIGAETFAEALRLGAEVYHSLKSVVKSKGLSTGLGDEGGFAPSVGSTKEALDLIVEAIKKAGLEPGKDIALALDVASSEFYKDGKYHFEGGEHTAEEMVKVYEDLISSYPIVSIEDPLQEDDWEGYTNLTAKIGDRVQIVGDDFFVTNPARLAKGIEEKAANALLVKVNQIGTLTETFDAVDLAHRAGYRTMMSHRSGETEDTTIADLAVALGCGQIKTGAPARSERVAKYNRLLRIELELGTAAVYAGRSAFPRFKG

SEQ ID NO: 1659 - protein, 379 aa, Corynebacterium striatum
MNQIKRINSSRSLPLRLATGGVLGTLAVGGVVAVSAQKDITLDVNGDKIELATFAGNVDEALQAAGVNVGGEDLVYPAPSEKVADGDNITVRTSKPVAVSIDGVKQQLSSTDLKVSDLLGNLDGIAPGAAITSGDKKVTGDDNLTEGMELEVVSPKIVKINDGGKITYTNIAAKTVKDVIEERGIDVDEDDRVFPSMDTPIVNGMSIKVDQVSTTFYDATEEFEAEPTFVDDPELEEGNEEVRVEAVKGQRNVTRKLVMKDGAKESDEIVKEKVINEPVAATIARGTKKPAAAPAVADGSVWDSLAQCESTGNWAINTGNGFSGGLQFTPSTWAGFGGTAYAPEAWQATREQQIAVAEKVQAAQGWGAWPACTSKLGLR

SEQ ID NO: 1660 - protein, 206 aa, Corynebacterium matruchotii
MARHARKTASKFAKFAASTVAVGTASAIFSPAAHAAPDSDWDRLAQCESGGNWAINTGNGFHGGLQFTASTWNAHGGQQYAPYAYQASREQQIAVAERVLASQGWGAWPACSAKLGLNSAPTPRDTVSNAPSPVQQAVENAIANAQNDAQANTLASDAVYNLVKDRLASYGIQVPGEVHAFYTANRGDFNAFYTANRQIIDTAVRG

SEQ ID NO: 1661 - protein, 83 aa, Corynebacterium striatum
MLYVGSKYPSNVAVGSREAKAVFRGSTPQWAPPWQVTATYAVGDIVASRGGFWECIKAHSSKNIYEPGSDYGSQDYYWRMYRP

SEQ ID NO: 1662 - protein, 202 aa, Corynebacterium striatum
MTHDETNTKGEIMSIEQIKESIQQLTDDEVEKLGVWIYGDERERRATLKAVEEAQAEVVKELQDAGKLPLPDALTDPEKLPAAISDVPEWVNPGVDHSMMYREGDIVRHNGRIVRSTHKGLNHWEPGAHGVDEHIWADITDRYTTSQPEEPGTGEVRPFAPGLDVAEGDIVAYEGAHYRVRSAHTTATHWPPDQAHALFEKL

SEQ ID NO: 1663 - protein, 207 aa, Corynebacterium striatum
MGRHSAKNNSFATKFAASTVAFGAAAAIMAPTASAAPDSDWDRLAGCESGGNWAINTGNGYYGGLQFSGQTWSAFGGGQYAPTANQATREQQIAIAEKVLASQGWGAWPACSASLGLNSAATPRNLDAAPAAPAAAPAAVKQAAAQPSDELAVDALYAFVEDTAAKYGLSIPVEFANQYKANRHDFNAFYSANRNFIDPIAQLVGNL

SEQ ID NO: 1664 - protein, 109 aa, Corynebacterium accolens; identical to SEQ ID NO: 1552

SEQ ID NO: 1665 - protein, 206 aa, Corynebacterium accolens
MGRHSAKTNHFAAKFTAGTVALGAAAAIMAPNAAAAPDSDWDRLAQCESGGDWHINTGNGYHGGLQFNAQTWQAYGGGEFAPTANQATREQQIVIAERTLANQGWGAWPACSASLGLNSAPTERTAPSAPAEAPQPVQQAVENKSDELAVDAVYNLVKDTANAYGLQLPAQFTDFYHANRHDFNAFYSANRNVIDPVAQLVENFSR

SEQ ID NO: 1666 - protein, 391 aa, Corynebacterium accolens
MAPHHIKRINNSRSLPLRLATGGVLSTLAVGGVVAVAAQKDLVVDVNGDKVELATFAKDVDGALQAAGVQVGEEDIVSPAPSESVADGDEISVRTAKPVAVSIDGEQQQLSTTDLTVSDLLNNLQGVNPGAAVKSGEDDVDKDAQLKDGMDLEVVSPKIIKINDGGKNTYTKIAAKTVGDVLKERGIKLDEEDRVFPAKEEKVTEGMSIKVERIDIQTEDVTEEFDAEPHFVDDPELEAGAEEVREQGEKGKREITRKVVLKNGKKESEEVIKDEVIVGPKPATIARGTKQAEPEPQGGNSGAAAPAVADGSVWDAIAQCESNGNWSINTGNGFSGGLQFAPSTWAGLGGTEYAPEAWQATREQQIAVAQKVQAAQGWGAWPACTAKLGLR

SEQ ID NO: 1667 - protein, 425 aa, Corynebacterium accolens
MAGIIHAFGREILDSRGNPTVEAEVFLEDGAHGVAGVPSGASTGVHEAHELRDGGDRYLGKGVQKAVENINEEIGDEIAGLEADDQRLIDQALIKLDGTDNKSRLGANTILGVSIATAKAAAESAALPLYRYIGGPNAHVLPVPMMNILNGGSHADSGVDVQEFMIAPIGAETFTEALSIGAGVYHSLKAVLKDKGLSTGLGDEGGFAPSVDSTRAALDVIVEAIKKAGFEPGKDVALALDVASSEFYEDGKYHFEGGEHTAEEMSKVYEELINEYPIVSIEDPLQEDDWEGYTTLTAAIGDKVQIVGDDFFVTNPARLQEGIDKKAANALLVKVNQIGTLTETFDAVELAHRNGYRTMMSHRSGETEDTTIADLAVALNCGQIKTGAPARSERVAKYNQLLRIEQELGDAAVYAGRSAFPRFNA

SEQ ID NO: 1668 - protein, 183 aa, Corynebacterium glutamicum
MKNAKLFLALVSTPLLLASCSSTDSGTAESTISSETASAVDATTSTSSSTATSAAIDDDPVFDIIDIVLAQYPDGIITDIDREDSSDQYEVDVIVGQEVLELDVTTSGQISVDDRDNDDDDDIREAHAATVTAAQAIGLALDQYPDGIIDSVELDEDDGQLKWKIDLDDTSGNDLADVEIAAV

SEQ ID NO: 1669 - protein, 374 aa, Corynebacterium glutamicum
MAPHQKSRINRINSTRSVPLRLATGGVLATLLIGGVTAAATKKDIIVDVNGEQMSLVTMSGTVEGVLAQAGVELGDQDIVSPSLDSSISDEDTVTVRTAKQVALVVEGQIQNVTTTAVSVEDLLQEVGGITGADAVDADLSETIPESGLKVSVTKPKIISINDGGKVTYVSLAAQNVQEALELRDIELGAQDRINVPLDQQLKNNAAIQIDRVDNTEITETVSFDAEPTYVDDPEAPAGDETVVEEGTPGTKEVTRTVTTVNGQEESSTVINEVEITAAKPATISRGTKTVAANSVWDQLAQCESGGNWAINTGNGFSGGLQFHPQTWLAYGGGAFSGDASGASREQQISIAEKVQAAQGWGAWPACTASLGIR

SEQ ID NO: 1670 - protein, 193 aa, Corynebacterium glutamicum
MGRHSTKTSSAFTKLAASTIAFGAAATIMAPSASAAPDSDWDRLAQCESGGNWAINTGNGYHGGLQFSASTWAAYGGQEFATYAYQATREQQIAVAERTLAGQGWGAWPACSASLGLNSAPTQRDLSATTSTPEPAAAAPAVAEYNAPAANIAVGSTDLNTIKSTYGAVTGTLAQYGITVPAEVESYYNAFVG

SEQ ID NO: 1671 - protein, 425 aa, Corynebacterium glutamicum; identical to SEQ ID NO: 1513

SEQ ID NO: 1672 - protein, 509 aa, Corynebacterium glutamicum
MTSKSSAFRRLTAAVGTVAVAVAGVISMGQVASAQQATAVGPDQPGAPTHGSLTVHKYVGQEGNAGTGEEISVPGGQPLEGAEFTIWRLGTNDGDSCEPIDLANTNDWAQVPTGAAPRELSAVQNDFCLVDGGTARTTNSAGEYTFGNLDLGLYYVQETDAPANIVSRTAPFYVSIPLPHAQQNWLYDVHVYPKNQEVDAPTKTINSDSDQAGKGLTVGSVVEWTISQTVPALNDGEQYTSATIWDVLNPAELEYAGTTSVSLNGTPLVEGTDYTIDAGVVSWSLTEKKLAEIKAGDTIEVVFTTTVLAVTETGDIDNPGSEGPDKPGYGSEFNGGTTPGGTTPHTYWGQLTVNKGDTGMVNKLAGAEFAVFNNAENGVCAPEAPETDAIATGVSDAEGVVRWNDVTPDNPLGLWIANSSDGEIANPNKDYCLYETKAPSGYVAGPVQKVNITPGTTAKLVVDFENTKKDGPNLPLTGGQGTLMMTIGGLALMLVGAGAVYALRRRNEA

SEQ ID NO: 1673 - protein, 169 aa, Corynebacterium diphtheriae; identical to SEQ ID NO: 1528

SEQ ID NO: 1674 - protein, 385 aa, Corynebacterium diphtheriae; identical to SEQ ID NO: 1531

SEQ ID NO: 1675 - protein, 425 aa, Corynebacterium diphtheriae; identical to SEQ ID NO: 1616

SEQ ID NO: 1676 - protein, 425 aa, Corynebacterium diphtheriae; identical to SEQ ID NO: 1511

SEQ ID NO: 1677 - protein, 169 aa, Corynebacterium diphtheriae; identical to SEQ ID NO: 1528

SEQ ID NO: 1678 - protein, 207 aa, Corynebacterium diphtheriae; identical to SEQ ID NO: 1532

SEQ ID NO: 1679 - protein, 1032 aa, Corynebacterium diphtheriae
MQLNSGMCDGKKTGIKGSMHFKNRHSFHVIFGLLAALFLVFYFSFSSGVLKVKAEEMGSATRPVEDEQGEASTFDLEPKVDEDGLSDTSNDGMSPHAFRAGSLDGEQLVSRMVEPSLPAPYQYPNLYEYAVSVDKKGKANQIILSGDFRLSQQTFNNYAGYFKIYINQQEIPNVEWNVEDGRLTANFSSVPVNPEARIYIRLAGAVWNGSYFEGPYSAMNVSVHGARRLRQKTFLIDPMKGSWTTQTSIPNPPTPKRCGLNIALVFDVSNSLNYQDGVRHSRDAATAVISALKGTPTTLGMYAFATGSPVGDIQPPNSHGNYPKIANVEALDLSTDAGYDQAVGQIRTLRTGEDVGGTNWEAALLRVAEAETRYDIVYFITDGVPTTNEELFPRNLNERLFNGWAGDPGHVTHNVDITRGITAANAVKATGARLETLAVNLPNYEIPVLNDDVRISSNNYGSGRVIRDKSYIFASQESWDRLTRSGYSWVQQRGASSNPLRIYFNNHDTTWSHAQSIVDKLGGADAVTMLENYAALPEKIRKMAMESCEGTVIVEKQIVDDKGEIIPRSVVEGWRFTADAVQSDTDKIWLVDENESPTDQRTTLTNLDGITQYRFKTASPHKSGSVRITETQQEGFVLHQQDGHNARCIVDGKPLSGAQYKDDGELGFRVDISTARVVTCVVQNKFKPTFKVEKTPLEDQNPALDGKQSRAPIDSSGSVVAYYEVKVTNNSINSSELSAPVIDKITFPAEMSVTKVEFYYENRKISDDSHIAAQGAADRPPLTYEIKPALFGTFKGNESKTVEVRVTAMVDKPTQIEIAKKKNGNYQWCESPRPISPDNPRSMFNSVTLAGEHEPPNPQVNNQACVDPEIQMAEISLIKVDSQDNSVVLEGAEFTIFRNSGTVDAPQVGERVLTLGAQPSAKGTLSGTIPVGTYLLVETKAPVGEKGQYELLPQPVPFHVELQSGKTHITILNGHNHPQVTVAESNTAMIKVADVHLGQLPKTGGVGVGLFAAFGALLICIGILLARRKKHY

SEQ ID NO: 1680 - protein, 109 aa, Corynebacterium diphtheriae; identical to SEQ ID NO: 1529

SEQ ID NO: 1681 - protein, 109 aa, Corynebacterium diphtheriae; identical to SEQ ID NO: 1529

SEQ ID NO: 1682 - protein, 207 aa, Corynebacterium diphtheriae
MARHARKTASTKTKFAASTVAFGTAATLLAPTASAAPDSDWDRLAGCEAGGNWAINTGNGFFGGLQFTASTWNAYGGGQYAPTANGATREQQIAVAEKVLAGQGWGAWPACSAKLGLNSAPTPRDVVANAPAPVQAAVAGAQEYAAQAGLNTEELAVDALYNAIKVRLAGTGLGIPPQIEAFYQANRTNFNGFYMANRGAIDFIFSM

SEQ ID NO: 1683 - protein, 385 aa, Corynebacterium diphtheriae; identical to SEQ ID NO: 1531

SEQ ID NO: 1684 - protein, 393 aa, Corynebacterium jeikeium
MSPKKKSHLHRINNTSSTPLRIATGGMLATLVVGGGVAVAGQKSVTLDVNGDIIQASTMSGDVEGALKSAGVEIDNRAMVTPALDEAISDNSKITVRSARTVALTIDGKQEKIDTTALTVGSLLDQIGRSDAASNLSEARNQEIPLDGMELEIVTPKKFTLNDGGEDGRMSLPARTVGEIFEMRGTPLGKDDKVTPAANTPLKEGMHVEVTRIANREETKVEEIPAPERVKEDPNMPEGEEKVVEKGAPGKARVVATVRTVNGEEVSRKEKSSKEITAPKERVIIRGTKKTDKGEGKDKGSNTGAAAPAVANGSVWDQLAQCEAGGDWSINTGNGFSGGLQFTPSTWAAFGGTEYAPAAHMATREQQIAVAERVQAGQGWGAWPACTSKMGLR

SEQ ID NO: 1685 - protein, 200 aa, Corynebacterium jeikeium
MIDLTTYSEDQLLDLQQALADERKRRAALPAVEEAAREAKEEVVAEVTERLAEKDVKLKPPAKADTKVRPWKPWHPLDTATHFYYGDLATNGGKTWRDVLDKTRTQLNVWEPGSPGIDERYWVEVTEDKPEPETGEQPDEPTEDNPADETEPATPEWKPNTTVKPGERYTHQGATYEVIQGHTTQAGWEPPAVPALWQKV

SEQ ID NO: 1686 - protein, 109 aa, Corynebacterium diphtheriae; identical to SEQ ID NO: 1529

SEQ ID NO: 1687 - protein, 169 aa, Corynebacterium diphtheriae
MRFFYDTEFIEDGETIDLVSIGIVREDGREYYAVSTDADHSRANKWVRDNVLDKMPNPSSTLWKSNATIRQEVYEFLTSTPGNTELWAWVGAYDHVVLAQLWGDMRGLPKELPRYTHELKQYWEMAGRPRLPKLPEGNHDALVDARHNLQKFKICAESLPLNKRNVVNG

SEQ ID NO: 1688 - protein, 207 aa, Corynebacterium diphtheriae; identical to SEQ ID NO: 1532

SEQ ID NO: 1689 - protein, 385 aa, Corynebacterium diphtheriae; identical to SEQ ID NO: 1607

SEQ ID NO: 1690 - protein, 116 aa, Corynebacterium jeikeium
MNKSVKTAFARIGMAAGLVAAPAAAAAVAAPAAQAAPVSAWDQVAQCESGGNWKINTGNGYYGGLQFSAQTWAGFGGTKYAPTANQATKAQQIEIAEKVLAKQGAGAWPNCGKVLG

SEQ ID NO: 1691 - protein, 425 aa, Corynebacterium jeikeium
MALILNIDAREIIDSRGNPTVEVDVLLDDGSFGRAAVPSGASTGVHEAHELRDGGERYQGKGVLNAVKNVIEDIDEELMGVEADDQRLIDQLMRDLDGTENKSKLGANAILGVSMAVARAAAESADLPLFRYVGGPNAHVLPVPMMNILNGGAHADSGVDVQEFMIAPIGAETFSEALRVGAEVYHTLKKVIKDKGLSTGLGDEGGFAPSVDSTKAALDLIVEAIEKAGFKVGEDVALALDVASSEFFKDGKYHFEGGEHTAEEMAKVYEGLIEEYPIVSIEDPLQEDDWEGYTALTAKIGDKVQIVGDDFFVTNPQRLAKGIEEKAANALLVKVNQIGTLTETFDAVELAHRNGYRSMMSHRSGETEDTTIADLAVALNCGQIKTGAPARSERVAKYNQLLRIEEILGDAAVYAGRSAFPRFTK

SEQ ID NO: 1692 - protein, 560 aa, Corynebacterium diphtheriae; identical to SEQ ID NO: 1522

SEQ ID NO: 1693 - protein, 208 aa, Corynebacterium jeikeium
MARHAKTSSFTTAARLSVAGVAVAATSALLAPTASAAPDSDWDRLAQCESGGNWSINTGNGFHGGLQFSPSTWAGYGGKQYAPYAYQATREQQIAVAERVLAGQGWGAWPACSAKLGLNSKPTPRNAAAKPKAKPAAPAPVVQKAVRDLSRNSNALAVDKFYDALVKRIEELGYSVPKEVTDYYNANKHSLNHTYKQYSAQLQAVLPH

SEQ ID NO: 1694 - protein, 425 aa, Corynebacterium diphtheriae
MADIMHVFAREILDSRGNPTVEAEVFLDDGSHGVAGVPSGASTGVHEAHELRDGGERYLGKGVLNAVNNVNEEIADAIAGAEADDQRLIDQAMIALDGTENKSRLGANAILGVSIAVAKAAAESAGLPLYRYIGGPNAHVLPVPMMNIVNGGAHADSGVDVQEFMIAPIGAESFSEALRMGAEVYHSLKSVIKSKGLSTGLGDEGGFAPSVESTKAALDLIVEAIEKAGFKPGADIALALDVASSEFYKDGKYHFEGGEHTAEEMAKVYEQLIAEYPIVSIEDPLQEDDWEGYTALTAAIGDKVQIVGDDFFVTNPARLKEGIEKRAANALLVKVNQIGTLTETFDAVDLAHRNGYRTMMSHRSGETEDTTIADLAVALGCGQIKTGAPARSERVAKYNQLLRIEQQLDDAAVYAGRSAFPRFQG

SEQ ID NO: 1695 - protein, 207 aa, Corynebacterium pseudotuberculosis; identical to SEQ ID NO: 1550

SEQ ID NO: 1696 - protein, 425 aa, Corynebacterium pseudotuberculosis; identical to SEQ ID NO: 1548

SEQ ID NO: 1697 - protein, 383 aa, Corynebacterium pseudotuberculosis; identical to SEQ ID NO: 1551

SEQ ID NO: 1698 - protein, 270 aa, Corynebacterium pseudotuberculosis
MQKQRIIYNGVRRNLMLATSIAFTAGLVYGGGMLEPSMNSLILPSASAAVTGFPRPVPPLENIDLERKASVTIKIPDSSSGTNAGLPGYEVTVILLKTDPINTSEGYAKASKLTVEQAKKLEELRHYSGVTDAKGEANFSELVPGAYLVTTKSPKPGDRKPQEEVLIAPIIGENGEWDYSFTAVMKFKNNPKPGPTLPPWVPPVTQTTPPPTKDEQPPASDNPASKQNKKREALPLTGASVVGLIVISLSLIAGGFFLLVSRKNGENSTY

SEQ ID NO: 1699 - protein, 193 aa, Corynebacterium glutamicum; identical to SEQ ID NO: 1670

SEQ ID NO: 1700 - protein, 366 aa, Corynebacterium glutamicum
MKDYAVHTRGLVSLLSLIFLFVLSGCGGNATTADEAAESDVVTSSSAPPSKRALDVGEAVEIPGVVLTVNSVTQSDQLMLYSEGSARGSEPREQRNAASGEKFVSVDTTVKNSSSDPWDLSCGHVLQTWLLEDELDDQQGDQEKKFSPIDNLDQISGNPECGVLLEVGTEIEMTWSFTIPDDIEITHFGFSLSDSTSNDLAIISLGGAIETSSAITTTEVIAPENDTETLLEITPVDCQVGLGPIVTSWSDGTVGGWSQHCQDVHDEVLAGEVAANTPVCDGVVCTYPSGATMPDPNAPQIPSDTSGAVCDENQCVYPNGYIARIGDPNVPNYLKPGNSPWVQGQIDFQNCLDSGKTIEQCREELN

SEQ ID NO: 1701 - protein, 374 aa, Corynebacterium glutamicum; identical to SEQ ID NO: 1565

SEQ ID NO: 1702 - protein, 183 aa, Corynebacterium glutamicum
MKNAKLFLALISAPLILAGCSSTDTGTAESTISSETASAVDATTSTSSSTATSAVIDDDPVFDIIDIVLAQYPDRIITDIDREDSSDQYEVDVVVGQEVLELDVTTSGQIHTDDRDNDDDDDIREAHAATVTAAQAIGLALDQYPDGIIDSVELDEDDGQLKWKIDLDDTSGNDLADVEIAAV

SEQ ID NO: 1703 - protein, 197 aa, Corynebacterium efficiens
MLFMGRHSAKTATPFVKMAATTVAFGAAAVAFAPAASAAPDSDWDRLANCESGGNWAINTGNGYHGGLQFSPSTWRAYGGDEFAPFAYQATREQQIAVAERTLAGQGWGAWPACSSKLGLNSAPTPRNLNPAPAPAPAPAAPAEYRATVDTNTNPVVGSSDLNTVQGIYDAVSGTLAQYGVQVPAEIQAHYNAFIGR

SEQ ID NO: 1704 - protein, 390 aa, Corynebacterium efficiens
MAIHQKSRINQLNGTRSVPLRLATGGMLATLLIGGVTVATAKKDVIIDVNGEQIALTTLSGTVEGALEQAGVELGAQDFVSPAPDSSLTSESVVTVRTAKQVALVVDGREETLTTTAVSVEDLLGELDEISPADAIDADPDTTIPDSGLQLKVTKPKIISINDGGRVVYTSIAADTVGEVLERRGITIDEDDRLNLDANHRITTNTEIIIDRVETSEVTETVDIAAPVTYVDDPEADKGTETVVTEGTPGAKEITRQIVTVNGVEAENTVLREVELTAATPTTIKRGTKAAPATVSSSTSGSAAPSVAGGSVWDALAQCESNGNWSINTGNGFSGGLQFHPQTWQAYGGGQYAPTAAGASREQQIAIAQKVQAAQGWGAWPACTAKLGIR

SEQ ID NO: 1705 - protein, 228 aa, Rhodococcus equi
MRVFQGAAAGRVRTAAVVGAALVALVGCGNDDGGAATTTSAAAATSTSAKASTTSASGASGASEASGASGNTATSPTSASAATGAPSLAPGWNAKVFEHAGRTALAAVPGSSLVSIEENSDGSWVVDLINADGVAVEVGISPDGDRVIAGPSVTGEPTPGTDVAELDYTAATGVVLTEVPGGRITDLQLVVEKGGTYVWEADVVDASGARRAVDVDAVSGRVLQNAPR

SEQ ID NO: 1706 - protein, 102 aa, Rhodococcus equi
MFSHSRAASRAARSAIAVICSAVVGSGALVLGAGTAAAQETPPGPAILGVELDEEDGRPTVEIDYVNLQGERREIDVDLQTGRITEDEPDDEATAPASTLPG

SEQ ID NO: 1707 - protein, 205 aa, Rhodococcus equi
MLRQNGSTSRTRTATLAITGAALVALAGCGGNDDGWQDPTSTTGTTTGTTTGAGTGTPDAAPGTQALARAGATAVAAVPEGVLVSIEAEHDRTWEAQVVTPDGIEHHVDVSADGATVLGTPRIEEEDEADRAKHRDRVQAATLDYNAATAVLLTEVPGGAVTELDLDSANGTTVWEADVIDESGTKHEVTVDAATGTVLANTTGR

SEQ ID NO: 1708 - protein, 375 aa, Rhodococcus equi
MSPLSKINSSRSPLMYGVVAATLVTLTVGGGVAVAQHKTVTVDVDGELITVGTMSSKVDGALAAAGYSVGEHDVVAPASDSDLDDGDTVVLRRGREVALTVDGRQRTVWTTALTVDEALNQFRLAGDVHVSANRSQRLPLEGSDLDVLSPRTVKLIDGTSAPVDVRLAAPTVGDFLAAHGTPLEQADTVEPAAETPLADGMEVAVTRGRVETRVLTEPVAPPEQRIEDPSMNMSRTVVENPGTAGVADVTYEVTTVNGVETGRKPVASTVTVPAQPKVVRVGAKPGTEVPPVQNGATWDALAQCEATGNWAINTGNGFYGGVQFDQNTWERQGGLKYAPRADLATREEQIAIASRTQQTQGWGAWPSCTSKLGLR

SEQ ID NO: 1709 - protein, 428 aa, Rhodococcus equi
MAIIEQVGAREILDSRGNPTVEVEVLLEDGSFARAAVPSGASTGEHEAVELRDGGDRYLGKGVQKAVESVLGEIAPAIIGLDATEQRTVDQALLDADGTPDKSRLGANALLGASLAVARAGAESSGLELFRYVGGPNAHVLPVPMMNILNGGAHADTGVDVQEFMVAPIGAPTFKESLRWGAEVYHSLKSVLKAKGLSTGLGDEGGFAPDVAGTKEALDLISEAVAKTGLKLGTDIALALDVAATEFYTDGTGYKFEGKIRTAEEMGAFYAELLTQFPLVSIEDPLSEDDWAGWVALTEQIGNKIQLVGDDLFVTNPERLEEGIAKGAANALLVKVNQIGTLTETLDAVDLAHRSGYKTMMSHRSGETEDTTIADLAVAVGSGQIKTGAPARSERVAKYNQLLRIEESLGDAARYAGELAFPRFAFEA

SEQ ID NO: 1710 - protein, 109 aa, Rhodococcus equi
MAKFDIKRTIGTVAATAALVAAPFALSTGTANAASGNWDAVAQCESSGNWAANTGNGFYGGLQFTASTWQSFGGSGMAHQNSREEQIRVAENVLAGQGRGAWPVCGQYL

SEQ ID NO: 1711 - protein, 134 aa, Rhodococcus equi
MRDRTVGALRAAPAGTLTISTERTPSMPKSITRLLGGLAASTAAVAAPLVVSTGTAHAASGDWDAVAQCESGGNWSANTGNGYYGGLQFSAGTWSAHGGSGLPHNNSREEQIRVAEGVLASSGPGAWPSCGQYL

SEQ ID NO: 1712 - protein, 195 aa, Rhodococcus equi
MTSFTIKRAMGAVVATGAVVAIPLALGTGTASAAGSHDWSGVAECESSGNWSANTGNGYYGGLQFSQSTWEAYGGTGSASNASQAEQIRVAENVLDGQGVGAWPVCGQYLTGGSTATGSVESIAQEAPAQVTAPAPVQQQVAEWAQTVPAGVGNYVVQLGDTLSQIAQNHGVSLANLVAQVQNPDLIFPGQTLSI

SEQ ID NO: 1713 - protein, 202 aa, Rhodococcus equi
MSAPQQFPHPQQPGYTPPPPAKKNWFGRHKVLTSLGVAVVAIIAIVAATGGSGDGPTREDREAGAAVERPSDARIGTPVRDGKFEFVVHGVEAGVPTVGTNEYLTEKAQGQFVLVRMTVRNIGDREQSFTTSAQKMVDAQGRQYSVDDMATFTLDQGVPFEQINPGNSVDATIVFDVPAGTVPAVLEVHDSVFSGGESILLQ

SEQ ID NO: 1714 - protein, 249 aa, Rhodococcus equi
MHANRRSLLRHFRRRSFTRSATAVVAGSAALLLAGAVGTAGAAVTQQENTSAHTVSFDGWDLTVEQTGQSINSVQPLSGNQFTRDLFASQRALATVSGNGGSPYTGGTLEVGYQIGYQADVSNGAVITGNAGVTPGAVFIPEVSENLILTADPEVPAVVELFNGQALELGVETPVEGNLSTQIAPGTIATVPVQKKECKSTQCAITLRDVHLEVNHALGTVSVRSYAIFTASTDIADDVVVSYGPPVIV

SEQ ID NO: 1715 - protein, 210 aa, Rhodococcus equi
MSGRHRKPTTTGRTVAKVAVTGAIMGVGGVAFAGTANAAPDSDWDRLAQCEASGNWGINTGNGYQGGLQFSPSTWTGHGGGQFAATADKATREQQIVVAERVLASQGWGAWPSCSSKLGLSSAPSQRSVPATPAPAPVTPAPVATTPAAPAAPSAVQAAFAGIDALLDAAANNGIVIHQDVLNAYDAAKSFDFNQVAMQNIAGIANQSQS

SEQ ID NO: 1716 - protein, 183 aa, Rhodococcus equi
MTNTSFTKRALGWAAVTGALVAVPFAAGTATASAATHNWDGVAQCESGGNWGINTGNGYYGGLQFSQSTWTANGGTGSPHTASKEEQIRVAENTLASQGPGAWPTCGQYLTTAEPAPIAEPAPAPAEAPAPAPMQAPSAADLVDQAVRLAGDAAAQHGYGDQFQQLLDTHGGAVTDVKAALTR

SEQ ID NO: 1717 - protein, 375 aa, Rhodococcus equi
MSPFARINTARSPLLYVVVAALFATLLVGGGLVVTQHKTITLDVDGDQISLSTLRSEVGSVLDNAGYPIGEHDVVAPSVDAKLSDGDTVVLRRAREIVLTVDGERRTVWSTALTVDDAMRQLNFAGDAYASASRGQRIPLDGIEFDVVNAKAVRISDNGAPHADVRVAAPTVGALLDVTNVPLEQADTVVPAPETPLTDGLEIVVTRNRTETRTETQPIQAPENRVDDPGLEQGKTTVENPGTPGERTVTVTVTTVNGAETDRRELSSVVVREPAPAVVRVGTKPKPSAPAVASGSVWDSLAQCEATGNWAISNGNGFYGGLQFSQSTWAAYGGTQYAPTADRASREQQIAVAEKVQAAQGWGAWPSCSSKLGLR

SEQ ID NO: 1718 - protein, 383 aa, Corynebacterium pseudotuberculosis; identical to SEQ ID NO: 1551

SEQ ID NO: 1719 - protein, 425 aa, Corynebacterium pseudotuberculosis; identical to SEQ ID NO: 1548

SEQ ID NO: 1720 - protein, 207 aa, Corynebacterium pseudotuberculosis; identical to SEQ ID NO: 1550

SEQ ID NO: 1721 - protein, 270 aa, Corynebacterium pseudotuberculosis; identical to SEQ ID NO: 1698

SEQ ID NO: 1722 - protein, 112 aa, Corynebacterium urealyticum
MRKSVKTNLTRLAMAAGVIAAPALVAPTANAASVDQWDQVAACESGGDWHINTGNGYYGGLQFSAQTWAGFGGTQYAPTADQATKEQQIEIAEKVLAGQGAGAWPNCGGPVA

SEQ ID NO: 1723 - protein, 255 aa, Corynebacterium urealyticum
MFSAQSRTLTASRTSARRTIEAREHETNGFRPVTAPATGRETQEKMGRHSKRNSISTVGRIAVAGAALSAGAAAFAPAASAAPDSDWDRLAQCEAGGNWQINTGNGYHGGLQFSPSTWNAYGGQKYAPYAYQASREQQIAVAEKVLAGQGWGAWPSCSAQLGLNSAPTQRDVPAKKAAPQATAKKAVSQLAQQKDVLAIDKVYQQIVERFEAAGLAVPAPVEEFYKAHRVNLNNHLNAHNARVAQAQQILNQFGL

SEQ ID NO: 1724 - protein, 386 aa, Corynebacterium urealyticum
MSPKKKSSLHRINNTNSTPLRLATGGMLATLVVGGGVAAAAHKNITLDVNGEIIEASSVTGNVGDILEKNGVEVNPKDLVSPAPSESVSNNDTIKVRSAKQVALIIDGKRENVDTTSVTVEEMLRQVGKYDEIATGSLSAGMNTKIPAEGMDLDVTTSKYFTLNDGGKQGRMKLPARTVGDIFELRGTPLGEDDIVTPSADTPLREGMHIDVVRVSKKDHTFERTVAAPEREIEDANLPEGERKVVKEGKDGKERVKLLVTRHNGKVTDRKVLEREELEAPVEAVVKVGTKPKKPAGPDAPAVANGSVWDELAQCESTGNWSINTGNGFSGGLQFTPSTWAGFGGTEYAPAAHMATREQQIAVAERVQAAQGWGAWPACTAKMGLR

SEQ ID NO: 1725 - protein, 112 aa, Corynebacterium resistens
MRKNVKTNLTRFALAAGVVAAPALVAPAANAASVGQWDQVAACESGGDWHINTGNGYQGGLQFSPQTWAGHGGTQYAPTADQATKAQQIEIAEKVLASQGAGAWPNCGGPVG

SEQ ID NO: 1726 - protein, 425 aa, Corynebacterium resistens
MAEIMQIIAREILDSRGNPTVEVEVGLDDGSIGRAAVPSGASTGVHEAHELRDGDERYLGKGVLKAVENVIDEIDDELVGMEADDQRLIDEAMIELDGTDNKSRLGANAILGVSMAVAHAAAESTGLHLFRYVGGPNAHVLPVPMMNILNGGAHADSGVDVQEFMIAPIGAETFSDALRMGTEVYHQLKKVIKDKGLSTGLGDEGGFAPSVDSTKAALDLIVEAIEGAGYKLGEEIALALDVASSEFYKDGKYHFEGGEHTAEEMAKVYEELIDQYPIVSIEDPLQEDDWEGYTNLTAAIGDKVQIVGDDFFVTNPARLQEGIEKKAANALLVKVNQIGTLTETFDAVDLAHRNGYRTMMSHRSGETEDTTIADLAVALNCGQIKTGAPARSERVAKYNQLLRIEQYLDDAAVYAGRSAFPRFQG

SEQ ID NO: 1727 - protein, 394 aa, Corynebacterium resistens
MSPKKKSSLHRINNTSSTPLRVATGGMLATLVVGGGVAVAGQKDVTVDVNGKIIEASTMSGTVEGALKSAGVNVNDRSMVTPALGDSIGDSDTITVRTPRQVSLVVDGRKQTVDTTALTVGSLLDQLGRTDAAELLSDARGERIPEEGMTLEVTTPKKFTLNDGGEFGKMSLPAHTVGDIFKLRGTPLGKDDIVKPSADTVLKDGMHVDVTRVVKKRVVEDRAVEAPVKVKEDSNLAEGEEKVVRKGKPGKVRDIFTVRTENGNEISRELVKTREITKPQVRIVIRGTKADDGDASSRKAGGNTGASAPAVAGDSVWDQIAQCESTGNWAINTGNGFSGGLQFTPSTWAGFGGTEYAPAAHMATREQQIAVAKRVQAAQGWGAWPACTSKLGLR

SEQ ID NO: 1728 - protein, 261 aa, Corynebacterium resistens
MPKGRGSSDLRLDTNHHGWPLPPHRETKRTVQVHSKSSRVSLARTRRETVETMGRHTKQNSFSTTARLTLAGMAVVGASAAIAPAASAAPDSDWDRLAQCEAGGNWQINTGNGFHGGLQFSPSTWNAHGGQKYAPYAYQATREQQIAVAEKVLASQGWGAWPACSAKLGLNSAPTPRTAAAKPKAAPKPAPAPAVQKAVKDLAAQKNTLAVDAVWDKVVKRIEAAGYSVPPQLTHFYKAHRHQLNAFYNANKHAVHAVIPR

SEQ ID NO: 1729 - protein, 271 aa, Corynebacterium pseudotuberculosis; identical to SEQ ID NO: 1549

SEQ ID NO: 1730 - protein, 207 aa, Corynebacterium pseudotuberculosis; identical to SEQ ID NO: 1550

SEQ ID NO: 1731 - protein, 425 aa, Corynebacterium pseudotuberculosis; identical to SEQ ID NO: 1548

SEQ ID NO: 1732 - protein, 383 aa, Corynebacterium pseudotuberculosis; identical to SEQ ID NO: 1551

SEQ ID NO: 1733 - protein, 207 aa, Corynebacterium pseudotuberculosis; identical to SEQ ID NO: 1550

SEQ ID NO: 1734 - protein, 383 aa, Corynebacterium pseudotuberculosis; identical to SEQ ID NO: 1551

SEQ ID NO: 1735 - protein, 425 aa, Corynebacterium pseudotuberculosis; identical to SEQ ID NO: 1548

SEQ ID NO: 1736 - protein, 271 aa, Corynebacterium pseudotuberculosis; identical to SEQ ID NO: 1549

SEQ ID NO: 1737 - protein, 266 aa, Tsukamurella paurometabola
MPSRTTHALIGATAALAAALTVAPVATAAPSPAPKPASDTKPKPDDQFADSSRTVVTRDGWKMVVTKTSEALRSVPPLNRSPQSFEAFSTIGGEATVAVADPKKPPKSKVKSAVLTTGLQVGCAVTADSLTVGGSISNATNVGVTPSVTANLTGTATGQGGTSGGSGGGSVSAGVTPGISATVGDTLTETGSISGVIKPGTSKDIPYAKKNLEGPDAATYTREVRVAVDNCIGGVQVRSYATIALQTDRTDDSITTYGKPIFITRP

SEQ ID NO: 1738 - protein, 222 aa, Tsukamurella paurometabola
MGKPLSMSGRHRKQSTTGRTAAKVAATGALLGGATLAFSAPAANAAPDSQWDQVAKCESGGNWSINTGNGYHGGLQFSPSTWSAYGGQKYAPTANQASKAQQIAIAEKVLAGQGKGAWPSCGTGLGAATQRDVPTESAASPAKPAVQKPAVQKPAIQKPAAQKPAAQKPAAQKPAAPKPAVKPGQSVNAAYIQQVISQAQNGGQQVDPAVLAMLQQAAAKGY

SEQ ID NO: 1739 - protein, 107 aa, Tsukamurella paurometabola
MKNIRKTLGMMAISGAIVAAPVAFGTGAANAGSVNWDAIAACESGGNWSTNTGNGYYGGLQFSPSTWRANGGSGLPHNASRAEQIRVAENVLASQGIGAWPSCGGRG

SEQ ID NO: 1740 - protein, 485 aa, Tsukamurella paurometabola
MPELDADNTTTADQRDGAQSGPEVLPATGQRTAEFDVARVQRRISGIDGSTVDLQVDQEILDLEAEVYGDEAADIATAEAEPATVEEPATVEEPATDEAPETESAPSKSRLQGVATRLENGPVRALTGAMLVAVMAGGGTAAAMYTEVTVTVDGQPREVSTMSRSVKSILNSAGIAAGADDKVTPALNQSVSSDQPITVQHARDIAVNVNGTVRTVKTTDLSMGAALASAGLGDPKNFVSVPADAPVPLDGAAVSVVTPVPLVVTDSGTKVEASAAGRTVGEYLAKMGAPLIQQDSVTPAASAPIRPGMTINVVRNRVTDVTVSEPYTAPPKKIDDPKLTNGKTEIKDPGKPGKQDVQYREHVVNGKVVSREKLSSTVTEPGVPGVTAVGTAPGAPYVPQGSVWDKLVQCESTGNWSINTGNGFYGGVQFDYGTWLRHGGGKYAPRADLATREEQIDIARKTLKAQGWGAWPSCSSKLGLSGNSE

SEQ ID NO: 1741 - protein, 428 aa, Tsukamurella paurometabola
MSEIIQVGAREILDSRGNPTVEVEIVLADGSFARAAVPSGASTGEHEAVELRDGGERYGGKGVTKAVEGVLEVIAPEVIGIPADEQRIIDQTLLDLDGTPDKSRLGANALLGVSLAASKAAAESAALPLFRYLGGPNAHILPVPMMNILNGGAHADSGVDVQEFMVAPIGAETFKESLRWGTEVYHSLKSVLKSKGLNTGLGDEGGFAPSVGGTREALELISEAIGKTGLKLGSDVALALDVAATEFYTAGSGYKFEGKVLSAAEMGEFYAKLITEFPLVSIEDPLSEDDWEGWVDLTDAVGDKIQLVGDDLFVTNPERLEDGIARGAGNALLVKVNQIGTLTETLDAVALAHNNGYKTMMSHRSGETEDTTIADLAVAVGSGQIKTGAPARSERVAKYNQLLRIEEELGDAARYAGDTAFPRFEFTS

SEQ ID NO: 1742 - protein, 382 aa, Corynebacterium aurimucosum
MSPKKQIKRINNSRSLPLRMATGGVLGTLAVGGVVAVGAQKDITLDVNGETTELATFAGDVNAALEAAGVNVGGEDVVYPALSEQVSDGDSITVRTAKPVAVTIDGVEKQLSSTDLTVSDLLGGLDGIAPGAAITSGSKTVKEDETVTEGMNLEVTSPKIIKLSDGGSVSYASVAAKTVEDVLEARGITVGKDDRVSPALDTPVKAGTAITVDRVEISEEEKMEDFDAPANFVDDPELEEGTEEVREEGTPGSRTVTRKIVKVNGKEESNEIIKEDVRNEAVAAVIARGTKPKSTAPAVAEGSVWDALAQCEATGNWSINTGNGFSGGLQFTPSTWAAFGGTEYAPQAWQASREQQIAVAQKVQAAQGWGAWPACTSKLGLR

SEQ ID NO: 1743 - protein, 105 aa, Corynebacterium aurimucosum
METVTETAVATGTDADDAQQPADTAAVGDAGNAVDSGKLTGDEAFEKALAHAGVDAQAVTEKEVDYDDGDDGKGPHWEIEFKANGQEHELGVDAASGAVTQHEVD

SEQ ID NO: 1744 - protein, 220 aa, Corynebacterium aurimucosum
MGRHSAKNKSIATKFAASTVAVGAAAAIMAPNAAAAPDSDWDRLAQCESGGNWAINTGNGYHGGLQFNAQTWQAYGGGEFAPTANLATREQQIAVAERTLAQQGWGAWPACSASLGLNSAPTPRNVSAAPAPAATQVKEETAPQAPAEAPKAVHEAAEEPTDELAVDALYTLIEDTATQYGLTIPASFTEQYKANRHDFNAFYSANRHVIDPLAQVLAAR

SEQ ID NO: 1745 - protein, 207 aa, Corynebacterium variabile
MNSRYTRTTLAALTASVLSVGALAACGDDSDDAKSTVTVTQSAPADNTSGSDSTAATTTSQSDGSGSSDHTDARTSAVDAAGALEAALDAKPGSYAVEVDEEDGRAWEITLVADGKGVEVTVDNATGEVTGEQSTDLDAEQREAPSVTAAEAVDAALAEKPGTLDSLDLDQDNGTIVWDATVIDGTREWDIVIDASSGDILRANQDD

SEQ ID NO: 1746 - protein, 333 aa, Corynebacterium variabile
MTNPTGPVEPGDQNPQGPQDPQGQSYPQGMPGQPGQQSQPYYQSAPGQPGQSYSQWPQDQQYYQGQPGYPGQQYPQYGQPQTKEKNTVGLIGLIIAVIGFIFACIPGALILGWILLPIGFIVSLVSLFLKGKKPGLGIAGLIVSVVGTVVGFSVFFLVVDDVVDDALDEIGSGGDVSVAVPEGAETDGDGDAGTRENPYPLGSTVTDKDWSVTINSVDLDAAAAINGENSYNDPAPEGMTYILVNVTINYIGDSDGGEMPWTTVDYVTPDGNTISSTDNFVMAPDSLDTISELYKGGSTSGNIALAVPQETVGDGVLAVSPGMLSGKTFVSVR

SEQ ID NO: 1747 - protein, 203 aa, Corynebacterium variabile
MGRHNTRTRLTSTKRLAVAGIAVAGIGAALAPAATAAPDSDWDALAQCEAGGNWAINTGNGFHGGLQFSPSTWNGYGGQEFAPYAYQASRQEQIVVGERVLAGQGWGAWPSCSSQLGLSSAPTERSAPAAAPASQNQVQQLNAADDVLEIDAVWKQLNDEAAARGIAVPKEVTDAYNANRNALNDQYSAALDGFNAAATALKF

SEQ ID NO: 1748 - protein, 376 aa, Corynebacterium variabile
MKNKSTLHRINHTRSVPLRVATGGMLATLVVGGAVVATNHKDVTLDVNGKILKASTVRGDVESILSSEGVDVSDGDLVTPGLSESVSDGSHVTVRFARQVALVVDGQSRTVDTTKMTVSELLDELDIDADSTTASASAIPLDGMELDITSPKIFTLNDGQPDETPARLTMSAPTVADVLEMRGAPLGKEDVVTPSADTPVTDDMHIDVTRKTSEEVTEEQEIAPPEKVIEDPDMAKGEEEVIEEGTAGTARVTVRVHTLNGVETNRDELKREEIKPATERVVRRGTGSSAPSVSDGSVWDQLAQCEATGDWSINTGNGFSGGLQFTPSTWAAFGGTEYAPEAYMASREEQIAVAEKVQAAQGWGAWPACTSSMGMR

SEQ ID NO: 1749 - protein, 428 aa, Corynebacterium variabile
MAEIMQINARDILDSRGNPTVEVEVFLEDGSIGRADVPSGASTGVHEAHELRDGGDRYLGKGVQQAVDFVNGEIDEALAGYEADDQRLIDTKLIELDGTDNKSRLGANAILGVSLAVAKAAAESANLHLFRYVGGPNGHVLPVPMMNILNGGAHADSGVDVQEFMIAPIGAETFSEALRTGAEVYHSLKKVIKDKGLSTGLGDEGGFAPSVGSTREALDLIDEAVSAAGYTLGKDVALALDVAASEFYDNDKGVYNFEGGQHSAAEMAQVYKELVEEYALVSIEDPLNEDDWEGWATLTAEIGDKVQLVGDDLFVTNPARLQEGIDKNVANALLVKVNQIGTLTETLDAVALAHNNGYRSMMSHRSGETEDTTIADLAVALNCGQIKTGAPARSERVAKYNQLLRIESYLEGAATYAGASAFPRFTAK

SEQ ID NO: 1750 - protein, 260 aa, Corynebacterium kroppenstedtii
MGQHSKNTNRISTGAKVALSGLAITASGIAVAPSASAAPDSDWDRLAQCESGGNWGINTGNGFQGGLQFAPSTWSAYGGTEYAATANQATREQQITVGERVLAEQGWNAWPACSAQLGLSSAPSQRDNAYANGAQAAVQPAAAPVEEAAPAENAAPAAQAPADVADEAPTPQKAVTDLAATQSIASLDQVFDAIQAAFNKAGIPMPAVITDYYHAHHDELVGAYNQAIGAAVNGYAEATAQATKIYDAVEKNFHSSRSAA

SEQ ID NO: 1751 - protein, 388 aa, Corynebacterium kroppenstedtii
MSTQKKSRIHRINHTSSTPVRVATGGMLATLVVGGAVAVNAQKNLILNVNGETSHVSAMSGDVKSILASHDVDLKDGDFVSPAANSSVKDKQEITVRTARPVTLTVDGVQKTIQSTALTVKDFLNQVGTINPDDYVSAQGSTKIPESGMKLEVVPLKDITLDDGGQLGDMKVPAVTVKDFLDRRGIKLGADDKVTPELGKKLVSGDKITIERNKTEDQTVKEAVEPTVRYVDDPNSPKGSETVVKPGKAGEREVTYTVKSRNGQEVQRWEKASKILSEATEKVISRGTKAAVASTKSSSASAPAVAGGSVWDSIAQCESGGKWNTSTGNGFSGGLQFTDQTWQAFGGGAYAPTAAGATREQQIAVANKVQAAQGWGAWPACTSKLGIR

SEQ ID NO: 1752 - protein, 560 aa, Corynebacterium diphtheriae; identical to SEQ ID NO: 1522

SEQ ID NO: 1753 - protein, 207 aa, Corynebacterium diphtheriae; identical to SEQ ID NO: 1532

SEQ ID NO: 1754 - protein, 169 aa, Corynebacterium diphtheriae; identical to SEQ ID NO: 1528

SEQ ID NO: 1755 - protein, 385 aa, Corynebacterium diphtheriae; identical to SEQ ID NO: 1531

SEQ ID NO: 1756 - protein, 109 aa, Corynebacterium diphtheriae; identical to SEQ ID NO: 1529

SEQ ID NO: 1757 - protein, 230 aa, Corynebacterium efficiens
MGVTVRSNNFIWFPEPALGRDRREGVPMFTRKLFTLTAVAGLSLSLAACGDDSGDSDATATETTVVTSEDETTDDPATTEETADNGVATETQTAVSDADATADRDIVFDAIDLVMAEHADGIIIDIDREDDTEAYEIDVVVGEEVIELNVDTAAGEVRESDRDNDDAEDVRRAQEATVTVADAITQALEAHPDGVVDEASLEDEDGRLEWQIDLDDVERNDLAEFTVLAN

SEQ ID NO: 1758 - protein, 220 aa, Corynebacterium glutamicum
MLKAQRTRFPLSLLIPPFCHLKQPLIFISYSLHRVEYMKNAKLFLALISAPLILAGCSSTDTGTAESTISSETASAVDATTSTSSSTATSAVIDDDPVFDIIDIVLAQYPDRIITDIDREDSSDQYEVDVVVGQEVLELDVTTSGQIHTDDRDNDDDDDIREAHAATVTAAQAIGLALDQYPDGIIDSVELDEDDGQLKWKIDLDDTSGNDLADVEIAAV

SEQ ID NO: 1759 - protein, 220 aa, Corynebacterium glutamicum
MLKAQRTRFPLSLLIPPFCHLKQPLIFISYSLHRVEYMKNAKLFLALISAPLILAGCSSTDTGTAESTISSETASAVDATTSTSSSTATSAVIDDDPVFDIIDIVLAQYPDGITTDIDREDSSDQYEVDVVVGQEVLELDVTTSGQIHTDDRDNDDDDDIREAHAATVTAAQAIGLALDQYPDGIIDSVELDEDDGQLRWKIDLDDTSGNDLADVEIAAV

SEQ ID NO: 1760 - protein, 357 aa, Corynebacterium glutamicum
MPLRLATGGVLATLLIGGVTAAATKKDIIVDVNGEQMSLVTMSGTVEGVLAQAGVELGDQDIVSPSLDSSISDEDTVTVRTAKQVALVVEGQIQNVTTTAVSVEDLLQEVGGITGADAVDADLSETIPESGLKVSVTKPKIISINDGGKVTYVSLAAQNVQEALELRDIELGAQDRINVPLDQQLKNNAAIQIDRVDNTEITETVSFDAEPTYVDDPEAPAGDETVVEEGAPGTKEVTRTVTTVNGQEESSTVINEVEITAAKPATISRGTKTVAANSVWDQLAQCESGGNWAINTGNGFSGGLQFHPQTWLAYGGGAFSGDASGASREQQISIAEKVQAAQGWGAWPACTASLGIR

SEQ ID NO: 1761 - protein, 199 aa, Corynebacterium glutamicum
MRGKLFMGRHSTKTSSAFTKLAASTIAFGAAATIMAPSASAAPDSDWDRLAQCESGGNWAINTGNGYHGGLQFSASTWAAYGGQEFATYAYQATREQQIAVAERTLAGQGWGAWPACSASLGLNSAPTQRDLSATTSTPEPAAAAPAVAEYNAPAANIAVGSTDLNTIKSTYGAVTGTLAQYGITVPAEVESYYNAFVG

SEQ ID NO: 1762 - protein, 361 aa, Corynebacterium glutamicum
MHTRGLVSLLSLIFLFVLSGCGGNATTADEAAESDVVTSSSAPPSKRALDVGEAVEIPGVVLTVNSVTQSDQLMLYSEGSARGSEPREQRNAASGEKFVSVDTTVKNSSSDPWDLSCGHVLQTWLLEDELDDQQGDQEKKFSPIDNLDQISGNPECGVLLEVGTEIEMTWSFTIPDDIEITHFGFSLSDSTSNDLAIISLGGAIETSSAITTTEVIAPENDTETLLEITPVDCQVGLGPIVTSWSDGTVGGWSQHCQDVHDEVLAGEVAANTPVCDGVVCTYPSGATMPDPNAPQIPSDTSGAVCDENQCVYPNGYIARIGDPNVPNYLKPGNSPWVQGQIDFQNCLDSGKTIEQCREELN

SEQ ID NO: 1763 - protein, 374 aa, Corynebacterium glutamicum; identical to SEQ ID NO: 1565

SEQ ID NO: 1764 - protein, 366 aa, Corynebacterium glutamicum
MKDYAVHTRGLVSLLSLIFLFVLSGCGGNATTADEAAESDVVTSSSAPPSKRALDVGEAVEIPGVVLTVNSVTQSDQLMLYSEGSARGSEPREQRNAASGEKFVSVDTTVKNSSSDPWDLSCGHVLQTWLLEDELDDQQADQEKKFSPIDNLDQISGNPECGVLLEVGTEIEMTWSFTVPDDIEITHFGFSLSDSTSNDLAIISLGGAIETSSAITTTEVIAPENDTETLLEITPVDCQVGLGPIVTSWSDGTVGGWSQHCQDVHDEVLAGEVAANTPVCDGVVCTYPSGATMPDPNAPQIPSDTSGAVCDENQCVYPNGYIARIGDPNVPNYLKPGNSPWVQGQIDFQNCLDSGKTIEQCREELN

SEQ ID NO: 1765 - protein, 208 aa, Corynebacterium jeikeium
MARHAKTSSFTTAARLSVAGVAVAATSALLAPTASAAPDSDWDRLAQCESGGNWSINTGNGFHGGLQFSPSTWAGYGGKQYAPYAYQATREQQIAIAERVLAGQGWGAWPACSAKLGLNSKPTPRNAAAKPKAKPAAPAPVVQKAVRDLSRNSNALAVDKFYDALVKRIEELGYSVPKEVTDYYNANKHSLNHTYKQYSAQLQAVLPH

SEQ ID NO: 1766 - protein, 1221 aa, Corynebacterium jeikeium
MLTSQHPQRRLSSAALRIISIFFCLVLAAAGMICIAENGFVPPAAAQGTTAPAALVSPPEVPPPPEAKPDIPLEQRQRLNCYESMFGECTAESIQAIIDQAGTTPTAIGLSYNYSKISKTVTIPSGADIMFMSDGWEPELVRDHGFTDSMIEVKEGARLVLGSGGADSQTVKILNKTGKFNTETSSPTIRVEGELVVNTAEITGARGLSGAHVGAITGIGQKALITLNKGAKVSDNHRAQDSGSTQNGAGNIAVSDGAVLVMNDGEVSHGKGSDQNNGYGEAGGIGAYTGARVYINGGEIKFNSGWAGGIIGFSWPWNLAEAQANKDSHRNFIQINGGEISYNNSGFSGGGVLAFGNTVVEMNGGKISSNNSANGGGVGTFDDYVSGANGSYAEESSTGKDSGLSPEEWSKLSPAAFVMKGGEVVDNTATRTGGGVNVVSNQVHLLGGNISENKAWQQGGGVYVSTKSYTAHLSNALVSENEATRKHPGADQSAAIGGGLWVCPTGTIKMYVNEGGAIIDNTAESYGADIAHDNLGRVSALELWLSNRILGGGDAMYFRDGGKSWDRYNTDSPDSQIEEIFKNRTLQERGLKTVAVADVKGSAQKAAKLTISENKAPRGGGIGSNGGVVFGHGDEDVTDLEVLKAWANADDTPYTGEKPESISLQLMHGDHKVGDPVKVTPDEKGDWKYTFANLPEVKEGEPPYSVKELAVDGFETLVSEPVRSAAGRTQLVVNAKRPNLSIEKSWEGQGDDKLPESIKVDVLQTVDCKTETYKQVELTAQNEWKTELKDVPRFLDGKEVSYSVKESDVPGYTPTYATIERTADKFIARLTNTRDSTELKVKKVWIGQDAVEIDPAVAKGRLPEEVTVHVVQAVNGKEADYGDSIKLNADNKWSATVRDLPTHVDGKEAQYSVREDKVEGFKTDYTSFGDAFTVVNKAEPTFLEVTKKWEDVTGDLPQEVTVHVVQTVDGKQTDYGDPLKLSAENDWHAKVENLPQFVNGKPVTYSVREDAVDGYTSKVSGEGPEFTVTNRPDTPPTPLTTGVSVDKQWLDADGNVLDADAAATMPEVTVHVVQTVDGKSVDYGDPIALNADNNWSAEVDGLPASVDGKEATYSVREDAVDGYTSKVSGEGPEFTVTNRPDTPPSTPPSTPPSTPPSTPPSTPPSTPPTTTSSTPVPPTPSQSGRGGGLALTGSSVLPVLALGALLTALGSTLVAMMRRRS

SEQ ID NO: 1767 - protein, 391 aa, Corynebacterium jeikeium
MSPKKKSHLHRINNTSSTPLRIATGGMLATLVVGGGVAVAGQKSVTLDVNGDIIQASTMSGDVEGALKSAGVEIDNRAMVTPALDEAIGDNSKITVRSARTVALTIDGKQEKIDTTALTVGSLLDQIGRSDAASNLSEARNQEIPLDGMELEIVTPKKFTLNDGGQDGRMSLPARTVGEIFEMRGTPLGKEDKVTPAADTPLKEGMHVEVTRISDRDETKVEEIPAPERVKEDPNMPEGEEKVVEKGAPGKARVVATVRTINGQEVSRKEKSSKEITTPKERVIIRGTKKADKAEDKGSNTGAAAPAVANGSVWDQLAQCEAGGDWSINTGNGFSGGLQFTPSTWAAFGGTEYAPAAHMATREQQIAVAERVRAGQGWGAWPACTSKLGLR

SEQ ID NO: 1768 - protein, 116 aa, Corynebacterium jeikeium; identical to SEQ ID NO: 1690

SEQ ID NO: 1769 - protein, 207 aa, Corynebacterium ulcerans; identical to SEQ ID NO: 1533

SEQ ID NO: 1770 - protein, 547 aa, Corynebacterium ulcerans
MYGLDNLLKFAVSANKSVRSQSKEDIVLNKFSRTTRTAAVAAIAGLSLSLSMPVAFAEEPVAVAAATASDSPLVNPNAKGSLTIHKYADPERVGTPTGTIKDAESISGEKLDGVEFTIYKIKDIDLTTNDGIAAAAKKTAADYITAGVVDADKVTEIKKETTRDGKVVLSDLSLGAYLVVETGPLPGYTPAIPFVAYVPMTEGNSGDNQGVKWNYDVHAFPKNFKEEKPSKTVEDKDQNADGAVVYTVSGTVRRLAEGEKLTQFEITDQVDKKLQVTDVKVFLGDVELSKDSYEDPAFTENNVHVKLTAQGLSQLVTGSKVSVKITTKVLNSIEDLKVENSATVYQNKPGGQQDTTGTPTPTVRTYWGGVQFKKVDKERGGLSGAEFRIIRSASETCEDVNVKDTKSIESSSVNGLQNGKVSQLFTSEEDGKALITGLHVNDFADNAVVDPASTYCLVETKAPKGKELLSKAIPFQLKAEPGATAENREYKLASIKVGDVDGEVVNIDDTTPQLPLTGGAGIGILAALGALIIGAGAWLARRNSAKN

SEQ ID NO: 1771 - protein, 383 aa, Corynebacterium ulcerans
MGTRQKSRINRVNSSRSIPLRLATGGVLASLAVGGVAVTQVKKDITVDVNGEQLSLATMSDTVEEALSKAGVTVGDKDIVYPGLTEKISNQDTITVRTSKQVSVAIDGVEKDLTTNATTVEELFEQLDGVNATLSAAALNMDKDSKIPREGLSLDVVTPKIISVTDAGKTVFTQIAAATVKDVLAERGIKVDNDDIVTPALDAPVTKNMDVKIDRVDIQEVVANEPFGEPANYVDDAELPEGEEAEVSAGTPGERTVTRKVTKVNGEETANEVIDEKVITPAVAATIKRGTKKAASAPAVANGSVWDQLAQCESTGNWAINTGNGFSGGLQFTDSTWAGFGGTAYAPRAHLATREQQIAVAQKVQAAQGWGAWPACTSKMGLR

SEQ ID NO: 1772 - protein, 425 aa, Corynebacterium ulcerans; identical to SEQ ID NO: 1535

SEQ ID NO: 1773 - protein, 383 aa, Corynebacterium pseudotuberculosis; identical to SEQ ID NO: 1551

SEQ ID NO: 1774 - protein, 425 aa, Corynebacterium pseudotuberculosis; identical to SEQ ID NO: 1548

SEQ ID NO: 1775 - protein, 270 aa, Corynebacterium pseudotuberculosis; identical to SEQ ID NO: 1698

SEQ ID NO: 1776 - protein, 207 aa, Corynebacterium pseudotuberculosis; identical to SEQ ID NO: 1550

SEQ ID NO: 1777 - protein, 247 aa, Escherichia coli
MKMRAVAVFTGMLTGVLSVAGLLSAGAYAAGGEGNMSASATETNARVFSLHLGATRVVYNPASSGETLTVINDQDYPMLVQSEVLSEDQKSPAPFVVTPPLFRLDGQQSSRLRIVRTGGEFPPDRESLQWICVKGIPPKEGDRWAEGKDGEKKADKVSLNVQLSVSSCIKLFVRPPAVKGRPDDVAGKVEWQRAGNRLKGVNPTPFYINLSTLTVGGKEVKEREYIAPFSSREYPLPAGHRVRFSGR

SEQ ID NO: 1778 - protein, 859 aa, Escherichia coli
MRDTSSGRMRTGVTGLALAVMVACVMFRAESGIARTYSFDAAMLKGGGKGVDLTLFEEGGQLPGIYPVDIILNGSRVDSQEMAFHAERDAEGRPYLKTCLTREMLARYGVRIEEYPALFRASGEGRGASVAEEACADLTAIPQATESYQFAAQQLVLGIPQVAPSAAEGDWPEALWDDGIPAFLLNWQANAGRSEYRGYGKRVTDSYWVSLQPGINIGPWRVRNLTTWNRSSGQSGKWESSYIRAERGLNGIKSRLTLGEDYTPSDIFDSVPFRGAMMSSDESMVPYNLREFAPVVRGIARTQARIEVRQNGYLIQSQTVAPGAFALTDLPVTGSGSDLQVTVLESDGTAQVFTVPFTTPAIALREGYLKYNVTAGQYRSSDDAVEHTSLGQVTAMYGLPWGLTVYGGLQGADDYQSAALGLGWSLGRLGAVSLDTTHSRGQQKGHDYETGDTWRIRYNKSFELTGTSFTAASYQYSSDGYHTLPDVLDTWRDDRYAYRHTENRSRRTTLSLSQSLGQWGYVGLNGSRDEYRDRPHRDYFGASYSTSWNNISLSVNWSRNRNSGGYYGGWSRTEDSVSMWMSVPLGRWFGGADNDISTTAQMQRSTGQDTRYEAGLNGRAFDRRLYWDVREQMVPGSESHADTSRLNLTWYGTYGELTGMYSYSSTMRQLNAGMSGSMVAHSEGVTFGQRTGDTVALIAAPGVSGASVGGWPGVRTDFRGYTLAGYASPYQENVLTLDPTTFPEDAEVPQTDSRVVPTKGAVVRAGFRTRVGGRALVSLARQDGTPLPFGAVVTVEGERGQAAGSAGVVGDRGEVYLSGLKESGKLKAQWGENSLCHADYRLPEEKGPAGIFLTRTVCM

SEQ ID NO: 1779 - protein, 1039 aa, Escherichia coli
MKRHLNTCYRLVWNHMTGAFVVASELARARGKRGGVAVALSLAAVTSLPVLAADIVVHPGETVNGGTLANHDNQIVFGTTNGMTISTGLEYGPDNEANTGGQWVQDGGTANKTTVTSGGLQRVNPGGSVSDTVISAGGGQSLQGRAVNTTLNGGEQWMHEGAIATGTVINDKGWQVVKPGTVATDTVVNTGAEGGPDAENGDTGQFVRGDAVRTTINKNGRQIVRAEGTANTTVVYAGGDQTVHGHALDTTLNGGYQYVHNGGTASDTVVNSDGWQIVKNGGVAGNTTVNQKGRLQVDAGGTATNVTLKQGGALVTSTAATVTGINRLGAFSVVEGKADNVVLENGGRLDVLTGHTATNTRVDDGGTLDVRNGGTATTVSMGNGGVLLADSGAAVSGTRSDGKAFSIGGGQADALMLEKGSSFTLNAGDTATDTTVNGGLFTARGGTLAGTTTLNNGAILTLSGKTVNNDTLTIREGDALLQGGSLTGNGSVEKSGSGTLTVSNTTLTQKAVNLNEGTLTLNDSTVTTDVIAQRGTALKLTGSTVLNGAIDPTNVTLASGATWNIPDNATVQSVVDDLSHAGQIHFTSTRTGKFVPATLKVKNLNGQNGTISLRVRPDMAQNNADRLVIDGGRATGKTILNLVNAGNSASGLATSGKGIQVVEAINGATTEEGAFVQGNRLQAGAFNYSLNRDSDESWYLRSENAYRAEVPLYASMLTQAMDYDRIVAGSRSHQTGVNGENNSVRLSIQGGHLGHDNNGGIARGATPESSGSYGFVRLEGDLMRTEVAGMSVTAGVYGAAGHSSVDVKDDDGSRAGTVRDDAGSLGGYLNLVHTSSGLWADIVAQGTRHSMKASSDNNDFRARGWGWLGSLETGLPFSITDNLMLEPQLQYTWQGLSLDDGKDNAGYVKFGHGSAQHVRAGFRLGSHNDMTFGEGTSSRAPLRDSAKHSVSELPVNWWVQPSVIRTFSSRGDMRVGTSTAGSGMTFSPSQNGTSLDLQAGLEARVRENITLGVQAGYAHSVSGSSAEGYNGQATLNVTF

SEQ ID NO: 1780 - protein, 842 aa, Escherichia coli
MKTSSFIIVILLCFRIENVIAHTFSFDASLLNHGSGGIDLTLLEKGGQLPGIYPVDIILNGSRIDSRDIFFYTKKNRHGEYYLKPCLTRDILINYGVKTEEYPNLFRQNSEKNRDSSDCADLSVIPQATEDYHFIKQQLILGIPQVAIRPPLTGIAHETMWDDGISAFLLNWQVEGSHWEYRSNTRNSSDNFWASLEPGINLGSWRIRNLTTWNKSSGQSGKWESSYIRVERGLNNIKSRLTFGDDYTPSDIFDSVPFRGGMLGSDENMVPYNQREFAPVVRGIARTQARIEVRQNGYLIQSRIVSPGAFALTDLPVTGNGGDLQVWVLESDGTIQTFNVPFTTPAIALREGYLKYNVTVGEYRPSDDSIEGAYLGQLTAMYGLPWSLTAFGGIQVSEHYQGNALGLGLSLGGFGSISLDTIYSRGQQKGYSNEIGKTWRVRYDKSFELTGTSFAAGYQDSSAGYHSLADVLDTYRNGTAYRSYDNRIRRTTINISQALGEWGSVALNGGRDEYRDKVKQDYIGASYSNSWKGITFAVNWSRNNNIGDYYSNSLRTENNLNLWMSIPMKRWLGGDDKGVTATAQIQRITGQNTLYETGLNGRAFGQKLYWDIREQIVPGSKYDADTSLLNLRWSGGYGELTGMYSYNRNTRQMNVGTSGSMAIHSGGIAFGQKTDDTMALIAAPGIAGASVGGWPGVSTDFRGYTLVGHVSPYQENIITLDPTTFPDNTEVSQTDRRVIPTKGALVQAEFKTRVGNRALVTLTRKDGTLLPFGTVVTLERKTGEAFESAGVVDDKGKVYLSGLSEAGKLKAQWGTNSQCYADYKLPLKKGMSGIFLTRAVCM

SEQ ID NO: 1781 - protein, 252 aa, Escherichia coli
MKIRRIVSTIAIALSVFTFAHAQSFENVENNAKVFSLHLGATRMIYKPNSSGETLAVINEHNYPILVQANVLSEDQKNIAPFIITPPLFRLDALQSSRLRIVKTEGAFPIDRESLQWICVKAIPPKYEDKWAKEEVSGKKSDKATMNIQVSVSSCIKLFVRPADVKGQPDDVAGKIKWQKVGNKLKGVNPTPFYMDIAELRVGEKEITETHYIAPFSSYEYPMPVNGGGDVRWKVVTDYGGISKTFETGLNI

SEQ ID NO: 1782 - protein, 413 aa, Escherichia coli
MNKTLIAAAVAGIVLLASNAQAQTVPEGYQLQQVLMMSRHNLRAPLANNGSVLEQSTPNKWPEWDVPGGQLTTKGGVLEVYMGHYMREWLAEQGMVKSGECPPPYTVYAYANSLQRTVATAQFFITGAFPGCDIPVHHQEKMGTMDPTFNPVITDDSAAFSEQAVAAMEKELSKLQLTDSYQLLEKIVNYKDSPACKEKQQCSLVDGKNTFSAKYQQEPGVSGPLKVGNSLVDAFTLQYYEGFPMDQVAWGEIKSDQQWKVLSKLKNGYQDSLFTSPEVARNVAKPLVSYIDKALVTDRTSAPKITVLVGHDSNIASLLTALDFKPYQLHDQNERTPIGGKIVFQRWHDSKANRDLMKIEYVYQSAEQLRNADALTLQAPAQRVTLELSGCPIDADGFCPMDKFDSVLNEAVK

SEQ ID NO: 1783 - protein, 1286 aa, Escherichia coli
MNKAYSIIWSHSRQAWIVASELARGHGFVLAKNTLLVLAVVSTIGNAFAVNISGTVSSGGTVSSGETQIVYSGRGNSNATVNSGGTQIVNNGGKTTATTVNSSGSQNVGTSGATISTIVNSGGIQRVSSGGVASATNLSGGAQNIYNLGHASNTVIFSGGNQTIFSGGITDSTNISSGGQQRVSSGGVASNTTINSSGAQNILSEEGAISTHISSGGNQYISAGANATETIVNSGGFQRVNSGAVATGTVLSGGTQNVSSGGSAISTSVYNSGVQTVFAGATVTDTTVNSGGNQNISSGGIVSETTVNVSGTQNIYSGGSALSANIKGSQIVNSEGTAINTLVSDGGYQHIRNGGIASGTIVNQSGYVNISSGGYAESTIINSGGTLRVLSDGYARGTILNNSGRENVSNGGVSYNAMINTGGNQYIYSDGEATAAIVNTSGFQRINSGGTAPVQNSVVVTRTVSSAAKPFDAEVYSGGKQTVYLWRGIWYSNFLTAVWSMFPGTASGANVNLSGRLNAFAGNVVGTILNQEGRQYVYSGATATSTVGNNEGREYVLSGGITDGTVLNSGGLQAVSSGGKASATVINEGGAQFVYDGGQVTGTNIKNGGTIRVDSGASALNIALSSGGNLFTSTGATLPELTTMAALSVSQNHASNIVLENGGLLRVTSGGTATDTTVNSAGRLRIDDGGTINGTTTINADGIVAGTNIQNDGNFILNLAENYDFETELSGSGVLVKDNTGIMTYAGTLTQAQGVNVKNGGIIFDSAVVNADMAVNQNAYINISDQATINGSVNNNGSIVINNSIINGNITNDADLSFGTAKLLSATVNGSLVNNKNIILNPTKESAGNTLTVSNYTGTPGSVISLGGVLEGDNSLTDRLVVKGNTSGQSDIVYVNEDGSGGQTRDGINIISVEGNSDAEFSLKNRVVAGAYDYTLQKGNESGTDNKGWYLTSHLPTSDTRQYRPENGSYATNMALANSLFLMDLNERKQFRAMSDNTQPESASVWMKITGGISSGKLNDGQNKTTTNQFINQLGGDIYKFHAEQLGDFTLGIMGGYANAKGKTINYTSNKAARNTLDGYSVGVYGTWYQNGENATGLFAETWMQYNWFNASVKGDGLEEEKYNLNGLTASAGGGYNLNVHTWTSPEGITGEFWLQPHLQAVWMGVTPDTHQEDNGTVVQGAGKNNIQTKAGIRASWKVKSTLDKDTGRRFRPYIEANWIHNTHEFGVKMSDDSQLLSGSRNQGEIKTGIEGVITQNLSVNGGVAYQAGGHGSNAISGALGIKYSF

SEQ ID NO: 1784 - protein, 200 aa, Escherichia coli
MLAFCRSSLKSKKYFIILLALAAIAGLGTHAAWSSNGLPRIDNKTLARLAQQHPVVVLFRHAERCDRSTNQCLSDKTGITVKGTQDARELGNAFSADIPDFDLYSSNTVRTIQSATWFSAGKKLTVDKRLLQCGNEIYSAIKDLQSKAPDKNIVIFTHNHCLTYIAKNKRDATFKPDYLDGLVMHVEKGKVYLDGEFVNH

SEQ ID NO: 1785 - protein, 200 aa, Escherichia coli
MLAFCRSSLKSKKYFIILLALAAIAGLGTHAAWSSNGLPRIDNKTLARLAQQHPVVVLFRHAERCDRSTNQCLSDKTGITVKGTQDARELGNAFSADIPDFDLYSSNTVRTIQSATWFSAGKKLTVDKRFLQCGNEIYSAIKDLQRKAPDKNIVIFTHNHCLTYIAKDKRDATFKPDYLDGLVMHVEKGKVYLDGEFVNH

SEQ ID NO: 1786 - protein, 200 aa, Escherichia coli; identical to SEQ ID NO: 1785

SEQ ID NO: 1787 - protein, 200 aa, Escherichia coli; identical to SEQ ID NO: 1784

SEQ ID NO: 1788 - protein, 200 aa, Escherichia coli
MLAFCRSSLKSKKYFIILLALAAIAGLGTHAAWSSNGLPRIDNKTLGRLAQQHPVVVLFRHAERCDRSTNQCLSDKTGITVKGTQDARELGNAFSADIPDFDLYSSNTVRTIQSATWFSAGKKLTVDKRLLQCGNEIYSAIKDLQSKAPDKNIVIFTHNHCLTYIAKDKRDATFKPDYLDGLVMHVEKGKVYLDGEFVNH

SEQ ID NO: 1789 - protein, 200 aa, Escherichia coli
MLAFCRSSLKSKKYFIILLALAAIAGLGTHAAWSSNGLPRIDNKTLGRLAQQHPVVVLFRHAEHCDRSTNQCLSDKTGITVKGTQDARELGNAFSADIPDFDLYSSNTVRTIQSATWFSAGKKLTVDKRLLQCGNEIYSAIKDLQSKAPDKNIVIFTHNHCLTYIAKDKRDATFKPDYLDGLVMHVEKGKVYLDGEFVNH

SEQ ID NO: 1790 - protein, 200 aa, Escherichia coli
MLAFCRSSLKSKKYFIILLALAAIAGLGTHAAWSSNGLPRIDNKTLARLAQQHPVVVLFRHAERCDRSTNQCLSDKTGITVKGTQDARELGNAFSADIPDFDLYSSNTVRTIQSATWFSAGKKLTVDKRLLQCGNEIYSAIKNLQSKAPDKNIVIFTHNHCLTYIAKDKRDATFKPDYLDGLVMHVEKGKVYLDGEFVNH

SEQ ID NO: 1791 - protein, 200 aa, Escherichia coli; identical to SEQ ID NO: 1785

SEQ ID NO: 1792 - protein, 200 aa, Escherichia coli; identical to SEQ ID NO: 1784

SEQ ID NO: 1793 - protein, 200 aa, Escherichia coli
MLAFCRSSLKSKKYIIILLALAAIAGLGTHAAWSSNGLPRIDNKTLARLAQQHPVVVLFRHAERCDRSTNQCLSDKTGITVKGTQDARELGNAFSADIPDFDLYSSNTVRTIQSATWFSAGKKLTVDKRLLQCGNEIYSAIKDLQSKAPDKNIVIFTHNHCLTYIAKDKRDATFKPDYLDGLVMHVEKGKVYLDGEFVNH

SEQ ID NO: 1794 - protein, 200 aa, Escherichia coli; identical to SEQ ID NO: 1793

SEQ ID NO: 1795 - protein, 200 aa, Escherichia coli
MLAFCRSSLKSKKYFIILLALAAIAGLGTHAAWSSNGLPRIDNKTLARLAQQHPVVVLFRHAERCDRSTNQCLSDITGITVKGTQDARELGNAFSADIPDFDLYSSNTVRTIQSATWFSAGKKLTVDKRFLQCGNDIYSAIKDLQSKAPDKNIVIFTHNHCLTYIAKDKRDATFKPDYLNGLVMHVEKGKVYLDGEFVNH

SEQ ID NO: 1796 - protein, 200 aa, Escherichia coli; identical to SEQ ID NO: 1785

SEQ ID NO: 1797 - protein, 200 aa, Escherichia coli
MLAFCRSSLKSKKYFIILLALAAIAGLGTHAAWSSNGLPRIDNKTLARLAQQHPVVVLFRHAERCDRSTNQCLSDKTGITVKGTQDARELGNAFSADIPDFNLYSSNTVRTIQSATWFSAGKKLTVDKRFLQCGNEIYSAIKDLQRKAPDKNIVIFTHNHCLTYIAKDKRDATFKPDYLDGLVMHVEKGKVYLDGEFVNH

SEQ ID NO: 1798 - protein, 200 aa, Escherichia coli; identical to SEQ ID NO: 1785

SEQ ID NO: 1799 - protein, 200 aa, Escherichia coli; identical to SEQ ID NO: 1793

SEQ ID NO: 1800 - protein, 200 aa, Escherichia coli; identical to SEQ ID NO: 1793

SEQ ID NO: 1801 - protein, 200 aa, Escherichia coli
MLAFCRSSLKSKKYFIILLALAAIAGLGTHAAWSSNGLPRIDNKTLARLAQQHPVVVLFRHAERCDRSTNQCLSDKTGITVKGTQDARELGNAFSADIPDFDLYSSNTVRTIQSATWFSAGKKLTVDKRLLQCGNEIYSAIKDLQSKAPDKNIVIFTHNHCLTYIAKDKRDATFKPDYLDGLVMHVEKGKVYLDGEFVNH

SEQ ID NO: 1802 - protein, 200 aa, Escherichia coli; identical to SEQ ID NO: 1784

SEQ ID NO: 1803 - protein, 200 aa, Escherichia coli; identical to SEQ ID NO: 1801

SEQ ID NO: 1804 - protein, 200 aa, Escherichia coli; identical to SEQ ID NO: 1785

SEQ ID NO: 1805 - protein, 311 aa, Escherichia coli
MNKYLKYFSGTLVGLMLSTSAFAAAEYAVVLKTLSNPFWVDMKKGIEDEAKTLGVSVDIFASPSEGDFQSQLQLFEDLSNKNYKGIAFAPLSSVNLVMPVARAWKKGIYLVNLDEKIDMDNLKKAGGNVEAFVTTDNVAVGAKGASFIIDKLGAEGGEVAIIEGKAGNASGEARRNGATEAFKKASQIKLVASQPADWDRIKALDVATNVLQRNPNIKAIYCANDTMAMGVAQAVANAGKTGKVLVVGTDGIPEARKMVEAGQMTATVAQNPADIGATGLKLMVDAEKSGKVIPLDKAPEFKLVDSILVTQ

SEQ ID NO: 1806 - protein, 289 aa, Escherichia coli
MSTFKPLKTLTSRRQVLKAGLAALTLSGMSQAIAKDELLKTSNGHSKPKAKKSGGKRVVVLDPGHGGIDTGAIGRNGSKEKHVVLAIAKNVRSILRNHGIDARLTRSGDTFIPLYDRVEIAHKHGADLFMSIHADGFTNPKAAGASVFALSNRGASSAMAKYLSERENRADEVAGKKATDKDHLLQQVLFDLVQTDTIKNSLTLGSHILKKIKPVHKLHSRNTEQAAFVVLKSPSVPSVLVETSFITNPEEERLLGTAAFRQKIATAIAEGVISYFHWFDNQKAHSKKR

SEQ ID NO: 1807 - protein, 445 aa, Escherichia coli
MMYRIRNWLVATLLLLCTPVGAATLSDIQVSNGNQQARITLSFIGDPDYAFSHQSKRTVALDIKQTGVIQGLPLLFSGNNLVKAIRSGTPKDAQTLRLVVDLTENGKTEAVKRQNGSNYTVVFTINADVPPPPPPPPVVAKRVETPAVVAPRVSEPARNPFKTESNRTTGVISSNTVTRPAARATANTGDKIIIAIDAGHGGQDPGAIGPGGTREKNVTIAIARKLRTLLNDDPMFKGVLTRDGDYFISVMGRSDVARKQNANFLVSIHADAAPNRSATGASVWVLSNRRANSEMASWLEQHEKQSELLGGAGDVLANSQSDPYLSQAVLDLQFGHSQRVGYDVATSMISQLQRIGEIHKRRPEHASLGVLRSPDIPSVLVETGFISNNSEERLLASDDYQQQLAEAIYKGLRNYFLAHPMQSAPQGATAQTASTVTTPDRTLPN

SEQ ID NO: 1808 - protein, 417 aa, Escherichia coli
MSGSNTAISRRRLLQGAGAMWLLSVSQVSLAAVSQVVAVRVWPASSYTRVTVESNRQLKYKQFALSNPERVVVDIEDVNLNSVLKGMAAQIRADDPFIKSARVGQFDPQTVRMVFELKQNVKPQLFALAPVAGFKERLVMDLYPANAQDMQDPLLALLEDYNKGDLEKQVPPAQSGPQPGKAGRDRPIVIMLDPGHGGEDSGAVGKYKTREKDVVLQIARRLRSLIEKEGNMKVYMTRNEDIFIPLQVRVAKAQKQRADLFVSIHADAFTSRQPSGSSVFALSTKGATSTAAKYLAQTQNASDLIGGVSKSGDRYVDHTMFDMVQSLTIADSLKFGKAVLNKLGKINKLHKNQVEQAGFAVLKAPDIPSILVETAFISNVEEERKLKTATFQQEVAESILAGIKAYFADGATLARRG

SEQ ID NO: 1809 - protein, 417 aa, Escherichia coli; identical to SEQ ID NO: 1808

SEQ ID NO: 1810 - protein, 276 aa, Escherichia coli
MRRFFWLVAAALLLAGCAGEKGIVEKEGYQLDTRRQAQAAYPRIKVLVIHYTADDFDSSLATLTDKQVSSHYLVPAVPPRYNGKPRIWQLVPEQELAWHAGISAWRGATRLNDTSIGIELENRGWQKSAGVKYFAPFEPAQIQALIPLAKDIIARYHIKPENVVAHADIAPQRKDDPGPLFPWQQLAQQGIGAWPDAQRVNFYLAGRAPHTPVDTASLLELLARYGYDVKPDMTPREQRRVIMAFQMHFRPTLYNGEADAETQAIAEALLEKYGQD

SEQ ID NO: 1811 - protein, 757 aa, Escherichia coli
MGSPSLYSARKTTLALAVALSFAWQAPVFAHGGEAHMVPMDKTLKEFGADVQWDDYAQLFTLIKDGAYVKVKPGAQTAIVNGQPLALQVPVVMKDNKAWVSDTFINDVFQSGLDQTFQVEKRPHPLNALTADEIKQAVEIVKASADFKPNTRFTEISLLPPDKEAVWAFALENKPVDQPRKADVIMLDGKHIIEAVVDLQNNKLLSWQPIKDAHGMVLLDDFASVQNIINNSEEFAAAVKKRGITDAKKVITTPLTVGYFDGKDGLKQDARLLKVISYLDVGDGNYWAHPIENLVAVVDLEQKKIVKIEEGPVVPVPMTARPFDGRDRVAPAVKPMQIIEPEGKNYTITGDMIHWRNWDFHLSMNSRVGPMISTVTYNDNGTKRKVMYEGSLGGMIVPYGDPDIGWYFKAYLDSGDYGMGTLTSPIARGKDAPSNAVLLNETIADYTGVPMEIPRAIAVFERYAGPEYKHQEMGQPNVSTERRELVVRWISTVGNYDYIFDWIFHENGTIGIDAGATGIEAVKGVKAKTMHDETAKDDTRYGTLIDHNIVGTTHQHIYNFRLDLDVDGENNSLVAMDPVVKPNTAGGPRTSTMQVNQYNIGNEQDAAQKFDPGTIRLLSNPNKENRMGNPVSYQIIPYAGGTHPVAKGAQFAPDEWIYHRLSFMDKQLWVTRYHPGERFPEGKYPNRSTHDTGLGQYSKDNESLDNTDAVVWMTTGTTHVARAEEWPIMPTEWVHTLLKPWNFFDETPTLGALKKDK

SEQ ID NO: 1812 - protein, 377 aa, Escherichia coli
MFKTTLCALLITASCSTFAAPQQINDIVHRTITPLIEQQKIPGMAVAVIYQGKPYYFTWGYADIAKKQPVTQQTLFELGSVSKTFTGVLGGDAIARGEIKLSDPTTKYWPELTAKQWNGITLLHLATYTAGGLPLQVPDEVKSSSDLLRFYQNWQPAWAPGTQRLYANSSIGLFGALAVKPSGLSFEQAMQTRVFQPLKLNHTWINVPPAEEKNYAWGYREGKAVHVSPGALDAEAYGVKSTIEDMARWVQSNLKPLDINEKTLQQGIQLAQSRYWQTGDMYQGLGWEMLDWPVNPDSIINGSDNKIALAARPVKAITPPTPAVRASWVHKTGATGGFGSYVAFIPEKELGIVMLANKNYPNPARVDAAWQILNALQ

SEQ ID NO: 1813 - protein, 676 aa, Escherichia coli
MKLAACFLTLLPGFAVAASWTSPGFPAFSEQGTGTFVSHAQLPKGTRPLTLNFDQQCWQPADAIKLNQMLSLQPCSNTPPQWRLFRDGEYTLQIDTRSGTPTLMISIQNAAEPVASLVRECPKWDGLPLTVDVSATFPEGAAVRDYYSQQIAIVKNGQIMLQPAATSNGLLLLERAETDTSAPFDWHNATVYFVLTDRFENGDPSNDQSYGRHKDGMAEIGTFHGGDLRGLTNKLDYLQQLGVNALWISAPFEQIHGWVGGGTKGDFPHYAYHGYYTQDWTNLDANMGNEADLRTLVDSAHQRGIRILFDVVMNHTGYATLADMQEYQFGALYLSGDEVKKSLGERWSDWKPAAGQTWHSFNDYINFSDKTGWDKWWGKNWIRTDIGDYDNPGFDDLTMSLAFLPDIKTESTTASGLPVFYKNKMDTHAKAIDGYTPRDYLTHWLSQWVRDYGIDGFRVDTAKHVELPAWQQLKTEASAALREWKKANPDKALDDKPFWMTGEAWGHGVMQSDYYRHGFDAMINFDYQEQAAKAVDCLAQMDTTWQQMAEKLQGFNVLSYLSSHDTRLFREGGDKAAELLLLAPGAVQIFYGDESSRPFGPTGSDPLQGTRSDMNWQDVSGKSAASVAHWQKISQFRARHPAIGAGKQTTLLLKQGYGFVREHGDDKVLVVWAGQQ

SEQ ID NO: 1814 - protein, 237 aa, Escherichia coli
MRKITQAISAVCLLFALNSSAVALASSPSPLNPGTNVARLAEQAPIHWVSVAQIENSLAGRPPMAVGFDIDDTVLFSSPGFWRGKKTFSPESEDYLKNPVFWEKMNNGWDEFSIPKEVARQLIDMHVRRGDAIFFVTGRSPTKTETVSKTLADNFHIPATNMNPVIFAGDKPGQNTKSQWLQDKNIRIFYGDSDNDITAARDVGARGIRILRASNSTYKPLPQAGAFGEEVIVNSEY

SEQ ID NO: 1815 - protein, 329 aa, Escherichia coli
MHKFTKALAAIGLAAVMSQSAMAENLKLGFLVKQPEEPWFQTEWKFADKAGKDLGFEVIKIAVPDGEKTLNAIDSLAASGAKGFVICTPDPKLGSAIVAKARGYDMKVIAVDDQFVNAKGKPMDTVPLVMMAATKIGERQGQELYKEMQKRGWDVKESAVMAITANELDTARRRTTGSMDALKAAGFPEKQIYQVPTKSNDIPGAFDAANSMLVQHPEVKHWLIVGMNDSTVLGGVRATEGQGFKAADIIGIGINGVDAVSELSKAQATGFYGSLLPSPDVHGYKSSEMLYNWVAKDVEPPKFTEVTDVVLITRDNFKEELEKKGLGGK

SEQ ID NO: 1816 - protein, 260 aa, Escherichia coli
MKKSILALSLLVGLSTAASSYAALPETVRIGTDTTYAPFSSKDAKGDFVGFDIDLGNEMCKRMQVKCTWVASDFDALIPSLKAKKIDAIISSLSITDKRQQEIAFSDKLYAADSRLIAAKGSPIQPTLDSLKGKHVGVLQGSTQEAYANETWRSKGVDVVAYANQDLVYSDLAAGRLDAALQDEVAASEGFLKQPAGKDFAFAGSSVKDKKYFGDGTGVGLRKDDAELTAAFNKALGELRQDGTYDKMAKKYFDFNVYGD

SEQ ID NO: 1817 - protein, 243 aa, Escherichia coli
MKKVLIAALIAGFSLSATAAETIRFATEASYPPFESIDANNQIVGFDVDLAQALCKEIDATCTFSNQAFDSLIPSLKFRRVEAVMAGMDITPEREKQVLFTTPYYDNSALFVGQQGKYTSVDQLKGKKVGVQNGTTHQKFIMDKHPEITTVPYDSYQNAKLDLQNGRIDGVFGDTAVVTEWLKDNPKLAAVGDKVTDKDYFGTGLGIAVRQGNTELQQKLNTALEKVKKDGTYETIYNKWFQK

SEQ ID NO: 1818 - protein, 243 aa, Escherichia coli
MKKLVLAALLASFTFGASAAEKINFGVSATYPPFESIGANNEIVGFDIDLAKALCKQMQAECTFTNHAFDSLIPSLKFRKYDAVISGMDITPERSKQVSFTTPYYENSAVVIAKKDTYKTFADLKGKRIGMENGTTHQKYIQDQHPEVKTVSYDSYQNAFIDLKNGRIDGVFGDTAVVNEWLKTNPQLGVATEKVTDPQYFGTGLGIAVRPDNKALLEKLNNALAAIKADGTYQKISDQWFPQ

SEQ ID NO: 1819 - protein, 551 aa, Escherichia coli
MEFSFSPKRLVVAVAAALPLMASAADTPSTATARKGFAGYDHPNQYLVKPATTIADNMMPVMQHPAQDKETQQKLAELEKKTGKKPNVVVFLLDDVGWMDVGFNGGGVAVGNPTPDIDAVASQGLILTSAYSQPSSSPTRATILTGQYSIHHGILMPPMYGQPGGLQGLTTLPQLLHDQGYVTQAIGKWHMGENKESQPQNVGFDDFRGFNSVSDMYTEWRDVHVNPEVALSPDRSEYIKQLPFSKDDVHAVRGGEQQAIADITPKYMEDLDQRWMDYGVKFLDKMAKSDKPFFLYYGTRGCHFDNYPNAKYAGSSPARTSYGDCMVEMNDVFANLYKTLEKNGQLDNTLIVFTSDNGPEAEVPPHGRTPFRGAKGSTWEGGVRVPTFVYWKGMIQPRKSDGIVDLADLFPTALDLAGHPGAKVANLVPKTTFIDGVDQTSFFLGTNGQSNRKAEHYFLNGKLAAVRMDEFKYHVLIQQPYAYTQSGYQGGFTGTVMQTAGSSVFNLYTDPQESDSIGVRHIPMGVPLQTEMHAYMEILKKYPPRAQIKSD

SEQ ID NO: 1820 - protein, 617 aa, Escherichia coli
MRRFLTTLMILLVVLVAGLSALVLLVNPNDFRDYMVKQVAARSGYQLQLDGPLRWHVWPQLSILSGRMSLTAQGASQPLVRADNMRLDVALLPLLSHQLSVKQVMLKGAVIQLTPQTEAVRSEDAPVAPRDNTLPDLSDDRGWSFDISSLKVADSVLVFQHEDDEQVTIRNIRLQMEQDPQHRGSFEFSGRVNRDQRDLTISLNGTVDASDYPHDLTAAIEQINWQLQGADLPKQGIQGQGSFQAQWQESHKRLSFNQISLTANDSTLSGQAQVTLTEKPEWQLRLQFPQLNLDNLIPLNETANGENGAAQQGQSQSTLPRPVISSRIDEPAYQGLQGFTADILLQASNVRWRGMNFTDVATQMTNKSGLLEITQLQGKLNGGQVSLPGTLDATSINPRINFQPRLENVEIGTILKAFNYPISLTGKMSLAGDFSGADIDADAFRHNWQGQAHVEMTDTRMEGMNFQQMIQQAVERNGGDVKAAENFDNVTRLDRFTTDLTLKDGVVTLNDMQGQSPVLALTGEGMLNLADQTCDTQFDIRVVGGWNGESKLIDFLKETPVPLRVYGNWQQLNYSLQVDQLLRKHLQDEAKRRLNDWAERNKDSRNGKDVKKLLEKM

SEQ ID NO: 1821 - protein, 348 aa, Escherichia coli
MEFFKKTALAALVMGFSGAALALPNITILATGGTIAGGGDSATKSNYTVGKVGVENLVNAVPQLKDIANVKGEQVVNIGSQDMNDNVWLTLAKKINTDCDKTDGFVITHGTDTMEETAYFLDLTVKCDKPVVMVGAMRPSTSMSADGPFNLYNAVVTAADKASANRGVLVVMNDTVLDGRDVTKTNTTDVATFKSVNYGPLGYIHNGKIDYQRTPARKHTSDTPFDVSKLNELPKVGIVYNYANASDLPAKALVDAGYDGIVSAGVGNGNLYKSVFDTLATAAKTGTAVVRSSRVPTGATTQDAEVDDAKYGFVASGTLNPQKARVLLQLALTQTKDPQQIQQIFNQY

SEQ ID NO: 1822 - protein, 102 aa, Escherichia coli
MKKVLALVVAAAMGLSSAAFAAETATTPAPTATTTKAAPAKTTHHKKQHKAAPAQKAQAAKKHHKNAKAEQKAPEQKAQAAKKHARKHSHQQPAKPAAQPAA

SEQ ID NO: 1823 - protein, 102 aa, Escherichia coli
MKKVLALVVAAAMGLSSAAFAAETATTPAPTATTTKAAPAKTTHHKKQHKAAPAQKAQAAKKHHKNAKAEQKAPEQKAQAAKKHAKKHSHQQPAKPAAQPAA

SEQ ID NO: 1824 - protein, 102 aa, Escherichia coli
MKKVLALVVAAAMGLSSAAFAAETATTPAPTATTTKAAPAKTTHHKKQHKAAPAQKAQAAKKHHKNTKAEQKAPEQKAQAAKKHAGKHSHQQPAKPAAQPAA

SEQ ID NO: 1825 - protein, 102 aa, Escherichia coli
MKKVLALVVAAAMGLSSAAFAAETATTPAPTATTTKAAPAKTTHHKKQHKAAPAQKAQAAKKHHKNTKAEQKAPEQKAQAAKKHAKKHSHQQPAKPAAQPAA

SEQ ID NO: 1826 - protein, 102 aa, Escherichia coli; identical to SEQ ID NO: 1823

SEQ ID NO: 1827 - protein, 102 aa, Escherichia coli
MKKVLALVVAAAMGLSSAAFAAETAITPAPTATTTKAAPAKTTHHKKQHKAAPAQKAQAAKKHHKNAKAEQKAPEQKAQAAKKHAKKHSHQQPAKPAAQPAA

SEQ ID NO: 1828 - protein, 102 aa, Escherichia coli; identical to SEQ ID NO: 1824

SEQ ID NO: 1829 - protein, 102 aa, Escherichia coli
MKKVLALVVAAAMGLSSAAFAAETTTTPAPTATTTKAAPAKTTHHKKQHKAAPAQKAQAAKKHHKNTKAEQKAPEQKAQAAKKHAKKHSHQQPAKPAAQPAA

SEQ ID NO: 1830 - protein, 102 aa, Escherichia coli; identical to SEQ ID NO: 1829

SEQ ID NO: 1831 - protein, 102 aa, Escherichia coli; identical to SEQ ID NO: 1823

SEQ ID NO: 1832 - protein, 102 aa, Escherichia coli; identical to SEQ ID NO: 1823

SEQ ID NO: 1833 - protein, 102 aa, Escherichia coli; identical to SEQ ID NO: 1829

SEQ ID NO: 1834 - protein, 102 aa, Escherichia coli; identical to SEQ ID NO: 1829

SEQ ID NO: 1835 - protein, 102 aa, Escherichia coli
MKKVLALVVAAAMGLSSAAFAAETATTPAPTATTTKAAPAKTTHHKKQHKAAPAQKAQAAKKHHKNAKTEQKAPEQKAQAAKKHAKKHSHQQPAKPAAQPAA

SEQ ID NO: 1836 - protein, 102 aa, Escherichia coli
MKKVLGLVVAAAMGLSSAAFAAETATTPAPTATTTKAAPAKTTHHKKQHKAAPAQKAQAAKKHHKNTKAEQKAPEQKAQAAKKHAGKHSHQQPAKPAAQPAA

SEQ ID NO: 1837 - protein, 810 aa, Escherichia coli
MAMKKLLIASLLFSSATVYGAEGFVVKDIHFEGLQRVAVGAALLSMPVRTGDTVNDEDISNTIRALFATGNFEDVRVLRDGDTLLVQVKERPTIASITFSGNKSVKDDMLKQNLEASGVRVGESLDRTTIADIEKGLEDFYYSVGKYSASVKAVVTPLPRNRVDLKLVFQEGVSAEIQQINIVGNHAFTTDELISHFQLRDEVPWWNVVGDRKYQKQKLAGDLETLRSYYLDRGYARFNIDSTQVSLTPDKKGIYVTVNITEGDQYKLSGVEVSGNLAGHSAEIEQLTKIEPGELYNGTKVTKMEDDIKKLLGRYGYAYPRVQSMPEINDADKTVKLRVNVDAGNRFYVRKIRFEGNDTSKDAVLRREMRQMEGAWLGSDLVDQGKERLNRLGFFETVDTDTQRVPGSPDQVDVVYKVKERNTGSFNFGIGYGTESGVSFQAGVQQDNWLGTGYAVGINGTKNDYQTYAELSVTNPYFTVDGVSLGGRLFYNDFQADDADLSDYTNKSYGTDVTLGFPINEYNSLRAGLGYVHNSLSNMQPQVAMWRYLYSMGEHPSTSDQDNSFKTDDFTFNYGWTYNKLDRGYFPTDGSRVNLTGKVTIPGSDNEYYKVTLDTATYVPIDDDHKWVVLGRTRWGYGDGLGGKEMPFYENFYAGGSSTVRGFQSNTIGPKAVYFPHQASNYDPDYDYECATQDGAKDLCKSDDAVGGNAMAVASLEFITPTPFISDKYANSVRTSFFWDMGTVWDTNWDSSQYSGYPDYSDPSNIRMSAGIALQWMSPLGPLVFSYAQPFKKYDGDKAEQFQFNIGKTW

SEQ ID NO: 1838 - protein, 810 aa, Escherichia coli; identical to SEQ ID NO: 1837

SEQ ID NO: 1839 - protein, 810 aa, Escherichia coli; identical to SEQ ID NO: 1837

SEQ ID NO: 1840 - protein, 810 aa, Escherichia coli; identical to SEQ ID NO: 1837

SEQ ID NO: 1841 - protein, 810 aa, Escherichia coli; identical to SEQ ID NO: 1837

SEQ ID NO: 1842 - protein, 810 aa, Escherichia coli; identical to SEQ ID NO: 1837

SEQ ID NO: 1843 - protein, 810 aa, Escherichia coli; identical to SEQ ID NO: 1837

SEQ ID NO: 1844 - protein, 810 aa, Escherichia coli
MAMKKLLIASLLFSSATVYGAEGFVVKDIHFEGLQRVAVGAALLSMPVRTGDAVNDEDISNTIRALFATGNFEDVRVLRDGDTLLVQVKERPTIASITFSGNKSVKDDMLKQNLEASGVRVGESLDRTTIADIEKGLEDFYYSVGKYSASVKAVVTPLPRNRVDLKLVFQEGVSAEIQQINIVGNHAFTTDELISHFQLRDEVPWWNVVGDRKYQKQKLAGDLETLRSYYLDRGYARFNIDSTQVSLTPDKKGIYVTVNITEGDQYKLSGVEVSGNLAGHSAEIEQLTKIEPGELYNGTKVTKMEDDIKKLLGRYGYAYPRVQSMPEINDADKTVKLRVNVDAGNRFYVRKIRFEGNDTSKDAVLRREMRQMEGAWLGSDLVDQGKERLNRLGFFETVDTDTQRVPGSPDQVDVVYKVKERNTGSFNFGIGYGTESGVSFQAGVQQDNWLGTGYAVGINGTKNDYQTYAELSVTNPYFTVDGVSLGGRLFYNDFQADDADLSDYTNKSYGTDVTLGFPINEYNSLRAGLGYVHNSLSNMQPQVAMWRYLYSMGEHPSTSDQDNSFKTDDFTFNYGWTYNKLDRGYFPTDGSRVNLTGKVTIPGSDNEYYKVTLDTATYVPIDDDHKWVVLGRTRWGYGDGLGGKEMPFYENFYAGGSSTVRGFQSNTIGPKAVYFPHQASNYDPDYDYECATQDGAKDLCKSDDAVGGNAMAVASLEFITPTPFISDKYANSVRTSFFWDMGTVWDTNWDSSQYSGYPDYSDPSNIRMSAGIALQWMSPLGPLVFSYAQPFKKYDGDKAEQFQFNIGKTW

SEQ ID NO: 1845 - protein, 810 aa, Escherichia coli; identical to SEQ ID NO: 1837

SEQ ID NO: 1846 - protein, 810 aa, Escherichia coli; identical to SEQ ID NO: 1837

SEQ ID NO: 1847 - protein, 810 aa, Escherichia coli; identical to SEQ ID NO: 1837

SEQ ID NO: 1848 - protein, 810 aa, Escherichia coli; identical to SEQ ID NO: 1837

SEQ ID NO: 1849 - protein, 810 aa, Escherichia coli
MAMKKLLIASLLFSSATVYGAEGFVVKDIHFEGLQRVAVGAALLSMPVRTGDTVNDEDISNTIRALFATGNFEDVRVLRDGDTLLVQVKERPTIASITFSGNKSVKDDMLKQNLEASGVRVGESLDRTTIADIEKGLEDFYYSVGKYSASVKAVVTPLPRNRVDLKLVFQEGVSAEIQQINIVGNHAFTTDELISHFQLRDEVPWWNVVGDRKYQKQKLAGDLETLRSYYLDRGYARFNIDSTQVSLTPDKKGIYVTVNITEGDQYKLSGVEVSGNLAGHSAEIEQLTKIEPGELYNGTKVTKMEDDIKKLLGRYGYAYPRVQSMPEINDADKTVKLRVNVDAGNRFYVRKIRFEGNDTSKDAVLRREMRQMEGAWLGSDLVDQGKERLNRLGFFETVDTDTQRVPGSPDQVDVVYKVKERNTGSFNFGIGYGTESGVSFQAGVQQDNWLGTGYAVGINGTKNDYQTYAELSVTNPYFTVDGVSLGGRLFYNDFQADDADLSDYTNKSYGTDVTLGFPINEYNSLRAGLGYVHNSLSNMQPQVAMWRYLYSMGEHPSTSDQDNSFKTDDFTFNYGWTYNKLDRGYFPTDGSRVNLTGKVTIPGSDNEYYKVTLDTATYVPIDDDHKWVVLGRTRWGYGDGLGGKEMPFYENFYAGGSSTVRGFQSNTIGPKAVYFPHQARNYDPDYDYECATQDGAKDLCKSDDAVGGNAMAVASLEFITPTPFISDKYANSVRTSFFWDMGTVWDTNWDSSQYSGYPDYSDPSNIRMSAGIALQWMSPLGPLVFSYAQPFKKYDGDKAEQFQFNIGKTW

SEQ ID NO: 1850 - protein, 810 aa, Escherichia coli; identical to SEQ ID NO: 1837

SEQ ID NO: 1851 - protein, 810 aa, Escherichia coli; identical to SEQ ID NO: 1837

SEQ ID NO: 1852 - protein, 810 aa, Escherichia coli; identical to SEQ ID NO: 1837

SEQ ID NO: 1853 - protein, 810 aa, Escherichia coli; identical to SEQ ID NO: 1837

SEQ ID NO: 1854 - protein, 810 aa, Escherichia coli; identical to SEQ ID NO: 1837

SEQ ID NO: 1855 - protein, 810 aa, Escherichia coli; identical to SEQ ID NO: 1837

SEQ ID NO: 1856 - protein, 810 aa, Escherichia coli
MAMKKLLIASLLFSSATVYGAEGFVVKDIHFEGLQRVAVGAALLSMPVRTGDTVNDEDISNTIRALFATGNFEDVRVLRDGDTLLVQVKERPTIASITFSGNKSVKDDMLKQNLEASGVRVGESLDRTTIADIEKGLEDFYYSVGKYSASVKAVVTPLPRNRVDLKLVFQEGVSAEIQQINIVGNHAFTTDELISHFQLRDEVPWWNVVGDRKYQKQKLAGDLETLRSYYLDRGYARFNIDSTQVSLTPDKKGIYVTVNITEGDQYKLSGVEVSGNLAGHSAEIEQLTKIEPGELYNGTKVTKMEDDIKKLLGRYGYAYPRVQSMPEINDADKTVKLRVNVDAGNRFYVRKIRFEGNDTSKDAVLRREMRQMEGAWLGSDLVDQGKERLNRLGFFETVDTDTQRVPGSPDQVDVVYKVKERNTGSFNFGIGYGTESGVSFQAGVQQDNWLGTGYAVGINGTKNDYQTYAELSVTNPYFTVDGVSLGGRLFYNDFQADDADLSDYTNKSYGTDVTLGFPINEYNSLRAGLGYVHNSLSNMQPQVAMWRYLYSMGEHPSTSDQDNSFKTDDFTFNYGWTFNKLDRGYFPTDGSRVNLTGKVTIPGSDNEYYKVTLDTATYVPIDDDHKWVVLGRTRWGYGDGLGGKEMPFYENFYAGGSSTVRGFQSNTIGPKAVYFPYSPNGYDPSNDYACATQDGAKDLCKSDDAVGGNAMAVASLEFITPTPFISDKYANSVRTSFFWDMGTVWDTNWDSSQYSGYPDYSDPSNIRMSAGIALQWMSPLGPLVFSYAQPFKKYDGDKAEQFQFNIGKTW

SEQ ID NO: 1857 - protein, 810 aa, Escherichia coli; identical to SEQ ID NO: 1837

SEQ ID NO: 1858 - protein, 392 aa, Escherichia coli
MQLRKLLLPGLLSVTLLSGCSLFNSEEDVVKMSPLPTVENQFTPTTAWSTSVGSGIGNFYSNLHPALADNVVYAADRAGLVKALNADDGKEIWSVSLAEKDGWFSKEPALLSGGVTVSGGHVYIGSEKAQVYALNTSDGTVAWQTKVAGEALSRPVVSDGLVLIHTSNGQLQALNEADGAVKWTVNLDMPSLSLRGESAPTTAFGAAVVGGDNGRVSAVLMEQGQMIWQQRISQATGSTEIDRLSDVDTTPVVVNGVVFALAYNGNLTALDLRSGQIMWKRELGSVNDFIVDGNRIYLVDQNDRVMALTIDGGVTLWTQSDLLHRLLTSPVLYNGNLVVGDSEGYLHWINVEDGRFVAQQKVDSSGFQTEPVAADGKLLIQAKDGTVYSITR

SEQ ID NO: 1859 - protein, 344 aa, Escherichia coli
MAYSVQKSRLAKVAGVSLVLLLAACSSDSRYKRQVSGDEAYLEAAPLAELHAPAGMILPVTSGDYAIPVTNGSGAVGKALDIRPPAQPLALVSGARTQFTGDTASLLVENGRGNTLWPQVVSVLQAKNYTITQRDDAGQTLTTDWVQWNRLDEDEQYRGRYQISVKPQGYQQAVTVKLLNLEQAGKPVADAASMQRYSTEMMNVISAGLDKSATDAANAAQNRASTTMDVQSAADDTGLPMLVVRGPFNVVWQRLPAALEKVGMKVTDSTRSQGNMAVTYKPLSDSDWQELGASDPGLASGDYKLQVGDLDNRSSLQFIDPKGHTLTQSQNDALVAVFQAAFSK

SEQ ID NO: 1860 - protein, 245 aa, Escherichia coli [sequence omitted]

SEQ ID NO: 1861 - protein, 245 aa, Escherichia coli [sequence omitted]

SEQ ID NO: 1862 - protein, 245 aa, Escherichia coli [sequence omitted]

SEQ ID NO: 1863 - protein, 113 aa, Escherichia coli
MRCKTLTAAAAVLLMLTAGCSTLERVVYRPDINQGNYLTANDVSKIRVGMTQQQVAYALGTPLMSDPFGTNTWFYVFRQQPGHEGVTQQTLTLTFNSSGVLTNIDNKPALSGN

SEQ ID NO: 1864 - protein, 113 aa, Escherichia coli; identical to SEQ ID NO: 1863

SEQ ID NO: 1865 - protein, 552 aa, Escherichia coli
MKLGRYSLFLLCPLLASCSGNGFYKDNLGVIDKNILHADTSLLKSKNKEHYKSSDMVSKTDSIYIGNSSFQTYHGEPLPGKLEGVHGIILRSSTPLGFDEVLSMIQDSSGIPIVKHTTKDVISGGVSSKSLAATVAEKMNSATGGKSTDQFDHLLLEVSSEHQLMDVNYQGALSTFLDKVAANYNLYWTYESGRIAFSNEETKRFSISILPGGKYTSKNSISSDSNSSSGSSGSSGSSSSDSGAELKFDSDVDFWKDIENSIKLILGSDGSYSISTSTSSVIVRTSSANMKKINEYINTLNAQLERQVTIDVAIYNVTTTDSSDLAMSLEALLKHNGGVLGSVSTSNFAATSGTPSFTGYLNGNGDSSNQVLLNLLAEKGKVSVVTSASVTTMSGQPVPLKVGNDRTYVSEIGTVLSQSSTSTTASTSTVTSGFLMNLLPQVADDGNILLQYGVTLSELVGSNNGFDQATVNGTVIQLPNVDSTTFVQSSMLRNGNTLVLAGYEKKRNESVDQGVGTTSFKLLGGALNGSASRTVTVICITPRIIDLKASGE

SEQ ID NO: 1866 - protein, 552 aa, Escherichia coli; identical to SEQ ID NO: 1865

SEQ ID NO: 1867 - protein, 538 aa, Escherichia coli
MFRRNLITSAILLMAPLAFSAQSLAESLTVEQRLELLEKALRETQSELKKYKDEEKKKYTPATVNRSVSTNDQGYAANPFPTSSAAKPDAVLVKNEEKNASETGSIYSSMTLKDFSKFVKDEIGFSYNGYYRSGWGTASHGSPKSWAIGSLGRFGNEYSGWFDLQLKQRVYNENGKRVDAVVMMDGNVGQQYSTGWFGDNAGGENFMQFSDMYVTTKGFLPFAPEADFWVGKHGAPKIEIQILDWKTQRTDAAAGVGLENWKVGPGKIDIALVREDVDDYDRSLQNKQQINTNTIDLRYKDIPLWDKATLMVSGRYVTANESASEKDNQDNNGYYDWKDTWMFGTSLTQKFDKGGFNEFSFLVANNSIASNFGRYAGASPFTTFNGRYYGDHTGGTAVRLTSQGEAYIGDHFIVANAIVYSFGNDIYSYETGAHSDFESIRAVVRPAYIWDQYNQTGVELGYFTQQNKDANSNKFNESGYKTTLFHTFKVNTSMLTSRPEIRFYATYIKALENELDGFTFGDNKDDQFAVGAQAEIWW

SEQ ID NO: 1868 - protein, 538 aa, Escherichia coli
MFRRNLITSAILLMAPLAFSAQSLAESLTVEQRLELLEKALRETQSELKKYKDEEKKKYTPATVNRSVSTNDQGYAANPFPTSSAAKPDAVLVKNEEKNASETGSIYSSMTLKDFSKFVKDEIGFSYNGYYRSGWGTASHGSPKSWAIGSLGRFGNEYSGWFDLQLKQRVYNENGKRVDAVVMMDGNVGQQYSTGWFGDNAGGENYMQFSDMYVTTKGFLPFAPEADFWVGKHGAPKIEIQMLDWKTQRTDAAAGVGLENWKVGPGKIDIALVREDVDDYDRSLQNKQQINTNTIDLRYKDIPLWDKATLMVSGRYVTANESASEKDNQDNNGYYDWKDTWMFGTSLTQKFDKGGFNEFSFLVANNSIASNFGRYAGASPFTTFNGRYYGDHTGGTAVRLTSQGEAYIGDHFIVANAIVYSFGNDIYSYETGAHSDFESIRAVVRPAYIWDQYNQTGVELGYFTQQNKDANSNKFNESGYKTTLFHTFKVNTSMLTSRPEIRFYATYIKALENELDGFTFEDNKDDQFAVGAQAEIWW

SEQ ID NO: 1869 - protein, 538 aa, Escherichia coli; identical to SEQ ID NO: 1868

SEQ ID NO: 1870 - protein, 538 aa, Escherichia coli
MFRRNIITSAILLMAPLAFSAQSLAESLTVEQRLELLEKALRETQSELKKYKDEEKKKYTPATVNRSVSTNDQGYAANPFPTSRAAKPDAVLVKNEEKNASETGSIYSSMTLKDFSKFVKDEIGFSYNGYYRSGWGTASHGSPKSWAIGSLGRFGNEYSGWFDLQLKQRVYNENGKRVDAIVMMDGNVGQQYSTGWFGDNAGGENFMQFSDMYVTTKGFLPFAPEADFWVGKHGAPKIEIQMLDWKTQRTDAAAGVGLENWKVGPGKIDIALVREDVDDYDRSLQNKQQINTNTIDLRYKDIPLWDKVTLMVSGRYVTANESASEKDNQDNNGYYDWKDTWMFGTSLTQKFDKGGFNEFSFLVANNSIASNFGRYAGASPFTTFNGRYYGYHTGGTAVRLTSQGEAYIGDHFIVANAIVYSFGNDIYSYETGAHSDFESIRAVVRPAYIWDQYNQTGVELGYFTQQNKDANSNKFNESGYKTTLFHTFKVNTSMLTSRPEIRFYATYIKALENELDGFTFEDNKDDQFAVGAQAEIWW

SEQ ID NO: 1871 - protein, 538 aa, Escherichia coli
MFRRNIITSAILLMAPLAFSAQSLAESLTVEQRLELLEKALRETQSELKKYKDEEKKKYTPATVNRSVSTNDQGYAANPFPTSHAAKPDAVLVKNEEKNASETGSIYSSMTLKDFSKFVKDEIGFSYNGYYRSGWGTASHGSPKSWAIGSLGRFGNEYSGWFDLQLKQRVYNENGKRVDAIVMMDGNVGQQYSTGWFGDNAGGENFMQFSDMYVTTKGFLPFAPEADFWVGKHGAPKIEIQMLDWKTQRTDAAAGVGLENWKVGPGKIDIALVREDVDDYDRSLQNKQQINTNTIDLRYKDIPLWDKATLMVSGRYVSANESASEKDNQDNNGYYDWKDTWMFGTSLTQKFDKGGFNEFSFLVANNSIASNFGRYAGASPFTTFNGRYYGDHTGGTAVRLTSQGEAYIGDHFIVANAIVYSFGNDIYSYETGAHSDFESIRAVVRPAYIWDQYNQTGVELGYFTQQNKDANSNKYNESGYKTTLFHTFKVNTSMLTSRPEIRFYTTYIKALENELDGFTFEDNKDDQFAVGAQAEIWW

SEQ ID NO: 1872 - protein, 538 aa, Escherichia coli
MFRRNIITSAILLMAPLAFSAQSLAESLTVEQRLELLEKALRETQSELKKYKDEEKKKYTPATVNRSVSTNDQGYAANPFPTSRAAKPDAVLVKNEEKNASETGSIYSSMTLKDFSKFVKDEIGFSYNGYYRSGWGTASHGSPKSWAIGSLGRFGNEYSGWFDLQLKQRVYNENGKRVDAIVMMDGNVGQQYSTGWFGDNAGGENFMQFSDMYVTTKGFLPFAPEADFWVGKHGAPKIEIQMLDWKTQRTDAAAGVGLENWKVGPGKIDIALVREDVDDYDRSLQNKQQINTNTIDLRYKDIPLWDKATLMVSGRYVSANESASEKDNQDNNGYYDWKETWMFGTSLTQKFDKGGFNEFSFLVANNSIASNFGRYAGASPFTTFNGRYYGDHTGGTAVRLTSQGEAYIGDHFIVANAIVYSFGNDIYSYETGAHSDFESIRAVVRPAYIWDQYNQTGVELGYFTQQNKDANSNKYNESGYKTTLFHTFKVNTSMLTSRPEIRFYATYIKALENELDGFTFEDNKDDQFAVGAQAEIWW

SEQ ID NO: 1873 - protein, 538 aa, Escherichia coli; identical to SEQ ID NO: 1868

SEQ ID NO: 1874 - protein, 538 aa, Escherichia coli; identical to SEQ ID NO: 1868

SEQ ID NO: 1875 - protein, 538 aa, Escherichia coli; identical to SEQ ID NO: 1870

SEQ ID NO: 1876 - protein, 765 aa, Escherichia coli
MKWLCSVGIAVSLALQPALADDLFGNHPLTPEARDAFVTELLKKMTVDEKIGQLRLISVGPDNPKEAIREMIKDGQVGAIFNTVTRQDIRAMQDQVMELSRLKIPLFFAYDVLHGQRTVFPISLGLASSFNLDAVKTVGRVSAYEAADDGLNMTWAPMVDVSRDPRWGRASEGFGEDTYLTSTMGKTMVEAMQGKSPADRYSVMTSVKHFAAYGAVEGGKEYNTVDMSPQRLFNDYMPPYKAGLDAGSGAVMVALNSLNGTPATSDSWLLKDVLRDQWGFKGITVSDHGAIKELIKHGTAADPEDAVRVALKSGINMSMSDEYYSKYLPGLIKSGKVTMAELDDAARHVLNVKYDMGLFNDPYSHLGPKESDPVDTNAESRLHRKEAREVARESLVLLKNRLETLPLKKSATIAVVGPLADSKRDVMGSWSAAGVADQSVTVLTGIKNAVGENGKVLYAKGANVTSDKGIIDFLNQYEEAVKVDPRSPQEMIDEAVQTAKQSDVVVAVVGEAQGMAHEASSRTDITIPQSQRDLIAALKATGKPLVLVLMNGRPLALVKEDQQADAILETWFAGTEGGNAIADVLFGDYNPSGKLPMSFPRSVGQIPVYYSHLNTGRPYNADKPNKYTSRYFDEANGALYPFGYGLSYTTFTVSDVKLSAPTMKRDGKVTASVQVTNTGKREGATVVQMYLQDVTASMSRPVKQLKGFEKITLKPGETQTVSFPIDIEALKFWNQQMKYDAEPGKFNVFIGTDSARVKKGEFELL

SEQ ID NO: 1877 - protein, 85 aa, Escherichia coli
MKNVKTLIAAAILSSMSFASFAAVEVQSTPEGQQKVGTISANAGTNLGSLEEQLAQKADEMGAKSFRITSVTGPNTLHGTAVIYK

SEQ ID NO: 1878 - protein, 85 aa, Escherichia coli; identical to SEQ ID NO: 1877

SEQ ID NO: 1879 - protein, 85 aa, Escherichia coli; identical to SEQ ID NO: 1877

SEQ ID NO: 1880 - protein, 177 aa, Escherichia coli
MRLLPLVAAATAAFLVVACSSPTPPRGVTVVNNFDAKRYLGTWYEIARFDHRFERGLEKVTATYSLRDDGGLNVINKGYNPDRGMWQQSEGKAYFTGAPTRAALKVSFFGPFYGGYNVIALDREYRHALVCGPDRDYLWILSRTPTISDEVKQEMLAVATREGFDVSKFIWVQQPGS

SEQ ID NO: 1881 - protein, 177 aa, Escherichia coli; identical to SEQ ID NO: 1880

SEQ ID NO: 1882 - protein, 614 aa, Escherichia coli
MIKKASLLTACSVTAFSAWAQDTSPDTLVVTANRFEQPRSTVLAPTTVVTRQDIDRWQSTSVNDVLRRLPGVDITQNGGSGQLSSIFIRGTNASHVLVLIDGVRLNLAGVSGSADLSQFPIALVQRVEYIRGPRSAVYGSDAIGGVVNIITTRDEPGTEISAGWGSNSYQNYDVSTQQQLGDKTRVTLLGDYAHTHGYDVVAYGNTGTQAQTDNDGFLSKTLYGALEHNFTDAWSGFVRGYGYDNRTNYDAYYSPGSPLLDTRKLYSQSWDAGLRYNGELIKSQLITSYSHSKDYNYDPHFGRYDSSATLDEMKQYTVQWANNVIVGHGSIGAGVDWQKQTTTPGTGYVENGYDQRNTGIYLTGLQQVGDFTFEGAARNDDNSQFGRHGTWQTSAGWEFIEGYRFIASYGTSYKAPNLGQLYGFYGNPNLDPEKSKQWEGAFEGLTAGVNWRISGYRNDVSDLIDYDDHTLKYYNEGKARIKGVEATANFDTGPLTHTVSYDYVDARNAITDTPLLRRAKQQVKYQLDWQLYDFDWGITYQYLGTRYDKDYSSYPYQTVKMGGVSLWDLAVAYPVTSHLTVRGKIANLFDKDYETVYGYQTAGREYTLSGSYTF

SEQ ID NO: 1883 - protein, 614 aa, Escherichia coli
MIKKASLLTACSVTAFSAWAQDTSPDTLVVTANRFEQPRSTVLAPTTVVTRQDIDRWQSTSVNDVLRRLPGVDITQNGGSGQLSSIFIRGTNASHVLVLIDGVRLNLAGGSGSADLSQFPIALVQRVEYIRGPRSAVYGSDAIGGVVNIITTRDEPGTEISAGWGSNSYQNYDVSTQQQLGDKTRVTLLGDYAHTHGYDVVAYGNTGTQAQPDNDGFLSKTLYGALEHNFTDAWSGFVRGYGYDNRTNYDAYYSPGSPLVDTRKLYSQSWDAGLRYNGELIKSQLITSYSHSKDYNYDPHYGRYDSSATLDEMKQYTVQWANNIIIGHGNVGAGVDWQKQSTAPGTAYVKDGYDQRNTGIYLTGLQQVGDFTFEGAARSDDNSQFGRHGTWQTSAGWEFIEGYRFIASYGTSYKAPNLGQLYGFYGNPNLDPEKSKQWEGAFEGLTAGVNWRISGYRNDVSDLIDYDDHTLKYYNEGKARIKGVEATANFDTGPLTHTVSYDYVDARNAITDTPLLRRAKQQVKYQLDWQLYDFDWGITYQYLGTRYDKDYSSYPYQTVKMGGVSLWDLAVAYPVTSHLTVRGKIANLFDKDYETVYGYQTAGREYTLSGSYTF

SEQ ID NO: 1884 - protein, 614 aa, Escherichia coli
MIKKASLLTACSVTAFSAWAQDTSPDTLVVTANRFEQPRSTVLAPTTVVTRQDIDRWQSTSVNDVLRRLPGVDITQNGGSGQLSSIFIRGTNASHVLVLIDGVRLNLAGVSGSADLSQFPIALVQRVEYIRGPRSAVYGSDAIGGVVNIITTRDEPGTEISAGWGSNSYQNYDVSTQQQLGDKTRVTLLGDYAHTHGYDVVAYGNTGTQAQTDNDGFLSKTLYGALEHNFTDAWSGFVRGYGYDNRTNYDAYYSPGSPLLDTRKLYSQSWDAGLRYNGELIKSQLITSYSHSKDYNYDPHFGRYDSSATLDEMKQYTVQWANNVIVGHGSIGAGVDWQKQTTTPGTGYVENGYDQRNTGIYLTGLQQVGDFTFEGAARSDDNSQFGRHGTWQTSAGWEFIEGYRFIASYGTSYKAPNLGQLYGFYGNPNLDPEKSKQWEGAFEGLTAGVNWRISGYRNDVSDLIDYDDHTLKYYNEGKARIKGVEATANFDTGPLTHTVSYDYVDARNAITDTPLLRRAKQQVKYQLDWQLYDFDWGITYQYLGTRYDKDYSSYPYQTVKMGGVSLWDLAVAYPVTSHLTVRGKIANLFDKDYETVYGYQTAGREYTLSGSYTF

SEQ ID NO: 1885 - protein, 614 aa, Escherichia coli
MIKKASLLTACSVTAFSAWAQDTSPDTLVVTANRFEQPRSTVLAPTTVVTRQDIDRWQSTSVNDVLRRLPGVDITQNGGSGQLSSIFIRGTNASHVLVLIDGVRLNLAGVSGSADLSQFPIALVQRVEYIRGPRSAVYGSDAIGGVVNIITTRDHPGTEISAGWGSNSYQNYDVSTQQQLGDKTRVTLLGDYAHTHGYDVVAYGNTGTQAQPDNDGFLSKTLYGALEHNFTDVWSGFVRGYGYDNRTNYDAYYSPGLPLVDTRKLYSQSWDAGLRYNGELIKSQLITSYSHSKDYNYDPHYGRYDSSATLDEMKQYTVQWANNIIIGHGNIGAGVDWQKQSTAPGTAYVEDGYDQRNTGIYLTGLQQVGDFTFEGAGRSDDNSQFGRHGTWQTSAGWEFIEGYRFIASYGTSYKAPNLGQLYGTYGNPNLNPEKSKQWEGAFEGLTAGVNWRISGYRNDVSDLIDYDDHTLKYYNEGKARIKGVEATANFDTGPLTHTVSYDYVDARNAITDTPLLRRAKQQVKYQLDWQLYDFDWGITYQYLGTRYDKDYSSYPYQTVKMGGVSLWDLAVAYPVTSHLTVRGKIANLFDKDYETVYGYQTAGREYTLSGSYTF

SEQ ID NO: 1886 - protein, 614 aa, Escherichia coli
MIKKASLLTACSVTAFSAWAQDTSPDTLVVTANRFEQPRSTVLAPTTVVTRQDIDRWQSTSVNDVLRRLPGVDITQNGGSGQLSSIFIRGTNASHVLVLIDGVRLNLAGVSGSADLSQFPIALVQRVEYIRGPRSAVYGSDAIGGVVNIITTRDHPGTEISAGWGSNSYQNYDVSTQQQLGDKTRVTLLGDYAHTHGYDVVAYGNTGTQAQPDNDGFLSKTLYGALEHNFTDVWSGFVRGYGYDNRTNYDAYYSPGLPLVDTRKLYSQSWDAGLRYNGELIKSQLITSYSHSKDYNYDPHYGRYDSSATLDEMKQYTVQWANNIIIGHGNIGAGVDWQKQSTAPGTAYVEDGYDQRNTGIYLTGLQQVGDFTFEGAGRSDDNSQFGRHGTWQTSAGWEFIEGYRFIASYGTSYKAPNLGQLYGSYGNPNLNPEKSKQWEGAFEGLTAGVNWRISGYRNDVSDLIDYDDHTLKYYNEGKARIKGVEATANFDTGPLTHTVSYDYVDARNAITDTPLLRRAKQQVKYQLDWQLYDFDWGITYQYLGTRYDKDYSSYPYQTVKMGGVSLWDLAVAYPVTSHLTVRGKIANLFDKDYETVYGYQTAGREYTLSGSYTF

SEQ ID NO: 1887 - protein, 614 aa, Escherichia coli
  MOD_RES (609)..(609): Any amino acid
MIKKASLLTACSVTAFSAWAQDTSPDTLVVTANRFEQPRSTVLAPTTVVTRQDIDRWQSTSVNDVLRRLPGVDITQNGGSGQLSSIFIRGTNASHVLVLIDGVRLNLAGVSGSADLSQFPIALVQRVEYIRGPRSAVYGSDAIGGVVNIITTRDHPGTEISAGWGSNSYQNYDVSTQQQLGDKTRVTLLGDYAHTHGYDVVAYGNTGTQAQPDNDGFLSKTLYGALEHNFTDAWSGFVRGYGYDNRTNYDAYYSPGLPLVDTRKLYSQSWDAGLRYNGELIKSQLITSYSHSKDYNYDPHYGRYDSSATLDEMKQYTVQWANNIIIGHGNIGAGVDWQKQSTAPGTAYVEDGYDQRNTGIYLTGLQQVGDFTFEGAGRSDDNSQFGRHGTWQTSAGWEFIEGYRFIASYGTSYKAPNLGQLYGSYGNPNLNPEKSKQWEGAFEGLTAGVNWRISGYRNDVSDLIDYDDHTLKYYNEGKARIKGVEATANFDTGPLTHTVSYDYVDARNAITDTPLLRRAKQQVKYQLDWQLYDFDWGITYQYLGTRYDKDYSSYPYQTVKMGGVSLWDLAVAYPVTSHLTVRGKIANLFDKDYETVYGYQTAGREYTLXGSYTF

SEQ ID NO: 1888 - protein, 614 aa, Escherichia coli
MIKKASLLTACSVTAFSAWAQDTSPDTLVVTANRFEQPRSTVLAPTTVVTRQDIDRWQSTSVNDVLRRLPGVDITQNGGSGQLSSIFIRGTNASHVLVLIDGVRLNLAGVSGSADLSQFPIALVQRVEYIRGPRSAVYGSDAIGGVVNIITTRDEPGTEISAGWGSNSYQNYDVSTQQQLGDKTRVTLLGDYAHTHGYDVVAYGNTGTQAQTDNDGFLSKTLYGALEHNFTDAWSGFVRGYGYDNRTNYDAYYSPGSPLLDTRKLYSQSWDAGLRYNGELIKSQLITSYSHSKDYNYDPHYGRYDSSATLDEMKQYTVQWANNVIVGHGSIGAGVDWQKQTTTPGTGYVEDGYDQRNTGIYLTGLQQVGDFTFEGAARSDDNSQFGRHGTWQTSAGWEFIEGYRFIASYGTSYKAPNLGQLYGFYGNPNLDPEKSKQWEGAFEGLTAGVNWRISGYRNDVSDLIDYDDHTLKYYNEGKARIKGVEATANFDTGPLTHTVSYDYVDARNAITDTPLLRRAKQQVKYQLDWQLYDFDWGITYQYLGTRYDKDYSSYPYQTVKMGGVSLWDLAVAYPVTSHLTVRGKIANLFDKDYETVYGYQTAGREYTLSGSYTF

SEQ ID NO: 1889 - protein, 614 aa, Escherichia coli
MIKKYWFLMVYSVTAFSVWAQDTPLDTLVVTANRFQEPLSTVLAPVTIVTREDIDRWQVSSVNDVLRRLPGVAISQHGGEGQLSTIFVRGTNSNHTLVLIDGVRLNLAGVSGAADLSQFPVALVQRIEYIRGPRSAIYGSDAIGGVINIITSRENTGTEISAGWGSNSYQHYDISTHQQLGENTRVTLLGDYTYTRGFDAVAYGSTGMQPQSDRDGFLSKTFYGKLEHNLSDTWSGFVRGYGYNNRTKYDAWYSPGSPLIDTRKLYSQSWDAGLRYAGETLQSQLVSSYSHSKDYNYDPHYGRYDTSANLDDMKQYNLQWTNSVTVGHGNVGAGIDWQKQSTTPGTGYLPKGYDQRNTGIYLTGLQKLGDFTLEGAVRNDDNSQFERHTTWQSSAGWEFIEGYRFIASYGTAFKAPNLGQLYGMYGNPNLAPEKSKQWEGAFEGLTGGVNWRISGYRNDISEMINYNPHTLRYYNDGKVHVKGIEATVNFDTGALTHTVSYDYTDARNALTDKPLERRPKLQVKYQLDWQVFDFDWGITYQYMGSRYDSDYSSWPYKSVKMGGVSLWDVAVAYPVTPHLIVRGKIANLFNKDYETGYGYQAAGREYILSGSYTF

SEQ ID NO: 1890 - protein, 614 aa, Escherichia coli; identical to SEQ ID NO: 1885

SEQ ID NO: 1891 - protein, 183 aa, Escherichia coli
MQDSILTTVVKDIDGEVTTLEKFAGNVLLIVNVASKCGLTPQYEQLENIQKAWVDRGFMVLGFPCNQFLEQEPGSDEEIKTYCTTTWGVTFPMFSKIEVNGEGRHPLYQKLIAAAPTAVAPEESGFYARMVSKGRAPLYPDDILWNFEKFLVGRDGKVIQRFSPDMTPEDPIVMESIKLALAK

SEQ ID NO: 1892 - protein, 266 aa, Escherichia coli
MAKSLFRALVALSFLAPLWLNAAPRVITLSPANTELAFAAGITPVGVSSYSDYPPQAQKIEQVSTWQGMNLERIVALKPDLVIAWRGGNAERQVDQLASLGIKVMWVDATNIEQIANALRQLAPWSPQPDKAEQAAQSLLDQYAQLKAQYADKPKKRVFLQFGINPPFTSGKESIQNQVLEVCGGENIFKDSRVPWPQVSREQVLARSPQAIVITGGPDQIPKIKQYWGEQLKIPVIPLTSDWFERASPRIILAAQQLCNALSQVD

SEQ ID NO: 1893 - protein, 266 aa, Escherichia coli
MAKSLFRALVALSFLAPLWLNAAPRVITLSPANTELAFAAGITPVGVSSYSDYPLQAQKIEQVSTWQGMNLERIVALKPDLVIAWRGGNAERQVDQLASLGIKVMWVDATSIEQIANALRQLAPWSPQPDKAEQAAQSLLDQYAQLKAQYADKPKKRVFLQFGINPPFTSGKESIQNQVLEVCGGENIFKDSRVPWPQVSREQVLARSPQAIVITGGPDQIPKIKQYWGEQLKIPVIPLTSDWFERASPRIILAAQQLCNALSQVD

SEQ ID NO: 1894 - protein, 266 aa, Escherichia coli
MAKSLFRALVALSFLAPLWLNAAPRVITLSPANTELAFAAGITPVGVSSYSDYPPQAQKIEQVSTWQGMNLERIVALKPDLVIAWRGGNAERQVDQLASLGIKVMWVDATSIEQIANALRQLAPWSPQPDKAEQAAQSLLDQYAQLKAQYADKPKKRVFLQFGINPPFTSGKESIQNQVLEVCGGENIFKDSRVPWPQVSREQVLARSPQAIVITGGPDQIPKIKQYWGEQLKIPVIPLTSDWFERASPRIILAAQQLCNALSQVD

SEQ ID NO: 1895 - protein, 128 aa, Escherichia coli
MRKSLLAILAVSSLVFSSASFAADLEDNMETLNDNLKVVEKADNAAQVKDALTKMRAAALDAQKATPPKLEDKSPDSPEMKDFRHGFDILVGQIDDALKLANEGKVKEAQAAAEQLKTTRNSYHKKYR

SEQ ID NO: 1896 - protein, 128 aa, Escherichia coli
MRKSLLAILAVSSLVFSSASFAADLEDNMETLNDNLKVVEKADNAVQVKDALTKMRAAALDAQKATPPKLEGKSPDSPEMKDFRHGFDILVGQIDDALKLANEGKVKEAQAAAEQLKTTRNAYHQKYR

SEQ ID NO: 1897 - protein, 128 aa, Escherichia coli [sequence omitted]

SEQ ID NO: 1898 - protein, 258 aa, Escherichia coli
MANKRTPIFIAGILIPILLNGCSSGKNKAYLDPKVFPPQVEGGPTVPSPDEPGLPLPGPGPALPTNGAIPIPEPGTAPAVSLMNMDGSVLTMWSRGAGSSLWAYYIGDSNSFGELRNWQIMPGTRPNTIQFRNVDVGTCMTSFPGFKGGVQLSTAPCKFGPERFDFQPMATRNGNYQLKSLSTGLCIRANFLGRTPSSPYATTLTMERCPSSGEKNFEFMWSISEPLRPALATIAKPEIRPFPPQPIEPDEHSTGGEQ

SEQ ID NO: 1899 - protein, 269 aa, Escherichia coli
MKKYIISLIVFLSFYAQADLTDFRVATWNLQGASATTESKWNINVRQLISGENAVDILAVQEAGSPPSTAVDTGTLIPSPGIPVRELIWNLSTNSRPQQVYIYFSAVDALGGRVNLALVSNRRADEVFVLSPVRQGGRPLLGIRIGNDAFFTAHAIAMRNNDAPALVEEVYNFFRDSRDPVHQALNWMILGDFNREPADLEMNLTVPVRRASEIISPAAATQTSQRTLDYAVAGNSVAFRPSPLQAGIVYGARRTQISSDHFPVGVSRR

SEQ ID NO: 1900 - protein, 181 aa, Escherichia coli
MKKLAIVFTMLLIAGCSSSQDSANNQIDELGKENNSLFTFRNIQSGLMIHNGLHQHGRETIGWEIVPVKTPEEALVTDQSGWIMIRTPNTDQCLGTPDGRNLLKMTCNSTAKKTLFSLIPSTTGAVQIKSVLSGLCFLDSKNSGLSFETGKCIADFKKPFEVVPQSHLWMLNPLNTESPII

SEQ ID NO: 1901 - protein, 490 aa, Escherichia coli
MDKVTDNSPDVESTESTEGSFPTVGVDTGDTITATLATGTENVGGGGGAFGGASESSAAIHATAKWSTAQLKKHQAEQAARAAAAEAALAKAKSQRDALTQRLKDIVNDALRANAARSPSVTDLAHANNMAMQAEAERLRLAKAEQKAREEAEAAEKALREAERQRDEIARQQAETAHLLAMAEAAEAEKNRQDSLDEEHRAVEVAEKKLAEAKAELAKAESDVQSKQAIVSRVAGELENAQKSVDVKVTGFPGWRDVQKKLERQLQDKKNEYSSVTNALNSAVSIRDAKKTDVQNAEIKLKEAKDALEKSQVKDSVDTMVGFYQYITEQYGEKYSRIAQDLAEKAKGSKFSSVDEALAAFEKYKNVLDKKISKVDRDAIFNALESVNYDELSKNLTKISKSLKITSRVSFLYDVGSDFKNAIETGNWRPLFVTLEKSAVDVGVAKIVALMFSFIVGVPLGFWGIAIVTGIVSSYIGDDELNKLNELLGI

SEQ ID NO: 1902 - protein, 490 aa, Escherichia coli
MDKVTDNSPDVESTESTEGSFPTVGVDTGDTITATLATGTENVGGGGGAFGGASESSAAIHATAKWSTAQLKKHQAEQAARAAAAEAALAKAKSQRDALTQRLKDIVNDALRANAARSPSVTDLAHANNMAMQAEAERLRLAKAEQKAREEAEAAEKALREAERQRDEIARQQAETAHLLAMAEAAEAEKNRQDSLDEEHRAVEVAEKKLAEAKAELAKAESDVQSKQAIVSRVAGELENAQKSVDVKVTGFPGWRDVQKKLERQLQDKKNEYSSVTNALNSAVSIRDAKKTEVQNAEIKLKEAKDALEKSQVKDSVDTMVGFYQYITEQYGEKYSRIAQDLAEKAKGSKFNSVDEALAAFEKYKNVLDKKFSKVDRDDIFNALESITYDEWAKHLEKISRALKVTGYLSFGYDVWDGTLKGLKTGDWKPLFVTLEKSAVDFGVAKIVALMFSFIVGAPLGFWGIAIITGIVSSYIGDDELNKLNELLGI

SEQ ID NO: 1903 - protein, 548 aa, Escherichia coli
MAKELSGYGPTAGESMGGTGANLNQQGGNNNSNSGVHWGGGSGHGNNGGQGNSNSSGSTSTVMKTGESYLTPWGDVVINNDGLPVMNGIVMTEENSTLVDNPFGGVSRVLNSLISDMPSLFAESSGNNNNNTASVNTAPTNAQVSDMDKSSKVVSNVINEKQKQKNKIATQISEKQKKIEEMKKVFKHHSYHGITDLERDVDELQKKSNQLDADISKLNSYKNTLQSKIGDVNKQKEAEEKARENAEVAEHETLNEEKQAVAEAEKRLAEAKAELAKAESDVQSKQATVSRVAGELENAQKSVDVKVTGFPGWRDVQKKLQRQLEAKQAEYSAVENELKNAVSFRDGKAAEVKEAEQKLKEAQDALEKSQIKDAVDTMVGFYQYITEQYGEKYAKIAQDLAEKSKGKKIQGVDEALAAFEKYKNVLDKKFSKVDRDAIFNALESVNYDELSKNLTKISKSLKITSRVSFLYDVGSDFKNAIETGNWRPLFVTLEKSAVDVGVAKIVALMFSFIVGVPLGFWGIAIVTGIVSSYIGDDELSKLNELLGI

SEQ ID NO: 1904 - protein, 103 aa, Escherichia coli
MRTLTLNELDSVSGGASGRDIAMAIGTLSGQFVAGGIGAAAGGVAGGAIYDYASTHKPNPAMSPSGLGGTIKQKPEGIPSEAWNYAAGRLCNWSPNNLSDVCL

SEQ ID NO: 1905 - protein, 626 aa, Escherichia coli
MSDPVRITNPGAESLGYDSDGHEIMAVDIYVNPPRVDVFHGTPPAWSSFGNKTIWGGNEWVDDSPTRSDIEKRDKEITAYKNTLSAQQKENENKRTEAGKRLSAAIAAREKDENTLKTLRAGNADAADITRQEFRLLQAELREYGFRTEIAGYDALRLHTESRMLFADADSLRISPREARSLIEQAEKRQKDAQNADKKAADMLAEYERRKGILDTRLSELEKNGGAALAVLDAQQARLLGQQTRNDRAISEARNKLSSVTESLKTARNALTRAEQQLTQQKNTPDGKTIVSPEKFPGRSSTNHSIVVSGDPRFAGTIKITTSAVIDNRANLNYLLTHSGLDYKRNILNDRNPVVTEDVEGDKKIYNAEVAEWDKLRQRLLDARNKITSAESAINSARNNVSARTNEQKHANDALNALLKEKENIRSQLADINQKIAEEKRKRDEINMVKDAIKLTSDFYRTIYDEFGKQASELAKELASVSQGKQIKSVDDALNAFDKFRNNLNKKYNIQDRMAISKALEAINQVHMAENFKLFSKAFGFTGKVIERYDVAVELQKAVKTDNWRPFFVKLESLAAGRAASAVTAWAFSVMLGTPVGILGFAIIMAAVSALVNDKFIEQVNKLIGI

SEQ ID NO: 1906 - protein, 120 aa, Escherichia coli
MKKYILGVILAMGSLSAIAGGGNSERPPSVAAGECVTFNSKLGEIGGYSWKYSNDACNETVAKGYAIGVAMHRTVNYEGGYSIQSSGIVKPGSDFIMKGGKTYKGHKKVSAGGDTPYWYK

SEQ ID NO: 1907 - protein, 869 aa, Escherichia coli
MKHKKKNRLVVAISVALIPYIGVTGDIPDSFRDLWGEQDEFYEVKLYGQTLGIHRIKTTPTHIKFYSPESILDKINLKKEKEKELSVFFTNSFSRNGNMSCQGNTTIQYNCNYIKTKSVDVIVDDVDNVVNLFIGNEFLDSEAHNDEYHQLSRNVKKAFIQSQTINLSDSGKYKRLSISGNSALGITDTSYAVLNWWMNYNKSNGYSNNEKTINSLYFRHDLDKRYYYQFGRMDRTDLSQSISGSFNFNLLPLPDIDGIRTGTTQSYIKNTDKFIASPVTVMLTNFSRVEAFRNDQLLGVWYLDSGVNELDTARLPYGSYDLKLKIFENTQLVREEIIPFNKGRSSIGDMQWDIFVQGGNIVNDNDRYIEKQNNHKSSINTGLRLPITKNISVQQGVSVIDNKSYYEGSLKWNSGILSGSLNSEFSFLWGDNAKGNYQSISYTDGFSLSFYHNDKRVDNCGRNYNAGWSGCYESYSASLSIPLLGWTSTLGYSDTYSESVYKSHILSEYGFYNQNIYKGRTQRWQLTSSTSLKWMDYNFMPAIGIYNSEQRQLTDKGGYISVTITRASRENSLNTGYSYNYSRGNYSSNELFVDGYMTSTNNGDYHEAGMRFNKNRHNAEGRLSGRINNRFGDLNGSFSMNKNRNTNSTNHSLTGGYNSSFALTSDGFYWGGSTAGLTKLAGGIIKVKSNDTKKNLVKVTGTLYGDYSLGSNDNAFIPVPALTPASLIIEDNNYGDNNISILAPTNNDMFMLPGNVYPVEIETKVSVSYIGRGFDPNGTPLSGAHVLNEPHVILDEDGGFSFEYTGNEKTLFLLKGRTIYTCQLGKNKVHKGIVFVGDVICDINSTSSLPDEFVKNPRVQDLLAKNDKG

SEQ ID NO: 1908 - protein, 897 aa, Escherichia coli
MKLNIFTKSMIGMGLVCSALPALAMEAWNNQQGGNKYQVIFDGKIYENAWWVSSTNCPGKAKANDATNPWRLKRTATAAEISQFGNTLSCEKSGSSSSSNSNTPASNTPANGGSATPAQGTVPSNSSVVAWNKQQGGQTWYVVFNGAVYKNAWWVASSNCPGDAKSNDASNPWRYVRAATATEISETSNPQSCTSAPQPSPDVKPAPDVKPAPDVQPAPADKSNDNYAVVAWKGQEGSSTWYVIYNGGIYKNAWWVGAANCPGDAKENDASNPWRYVRAATATEISQYGNPGSCSVKPDNNGGAVTPVDPTPETPVTPTPDNSEPSTPADSVNDYSLQAWSGQEGSEIYHVIFNGNVYKNAWWVGSKDCPRGTSAENSNNPWRLERTATAAELSQYGNPTTCEIDNGGVIVADGFQASKAYSADSIVDYNDAHYKTSVDQDAWGFVPGGDNPWKKYEPAKAWSASTVYVKGDRVVVDGQAYEALFWTQSDNPALVANQNATGSNSRPWKPLGKAQSYSNEELNNAPQFNPETLYASDTLIRFNGVNYISQSKVQKVSPSDSNPWRVFVDWTGTKERVGTPKKAWPKHVYAPYVDFTLNTIPDLAALAKNHNVNHFTLAFVVSKDANTCLPTWGTAYGMQNYAQYSKIKALREAGGDVMLSIGGANNAPLAASCKNVDDLMQHYYDIVDNLNLKVLDFDIEGTWVADQASIERRNLAVKKVQDKWKSEGKDIAIWYTLPILPTGLTPEGMNVLSDAKAKGVELAGVNVMTMDYGNAICQSANTEGQNIHGKCATSAIANLHSQLKGLHPNKSDAEIDAMMGTTPMVGVNDVQGEVFYLSDARLVMQDAQKRNLGMVGIWSIARDLPGGTNLSPEFHGLTKEQAPKYAFSEIFAPFTKQ

SEQ ID NO: 1909 - protein, 468 aa, Escherichia coli
MRTFSGKRSTLALAIAGVTAMSGFMAMPEARAEGFIDDSTLTGGIYYWQRERDRKDVTDGDKYKTNLSHSTWNANLDFQSGYAADMFGLDIAAFTAIEMAENGDSSHPNEIAFSKSNKAYDEDWSGDKSGISLYKAAAKFKYGPVWARAGYIQPTGQTLLAPHWSFMPGTYQGAEAGANFDYGDAGALSFSYMWTNEYKAPWHLEMDEFYQNDKTTKVDYLHSFGAKYDFKNNFVLEAAFGQAEGYIDQYFAKASYKFDIAGSPLTTSYQFYGTRDKVDDRSVNDLYDGTAWLQALTFGYRAADVVDLRLEGTWVKADGQQGYFLQRMTPTYASSNGRLDIWWDNRSDFNANGEKAVFFGAMYDLKNWNLPGFAIGASYVYAWDAKPATWQSNPDAYYDKNRTIEESAYSLDAVYTIQDGRAKGTMFKLHFTEYDNHSDIPSWGGGYGNIFQDERDVKFMVIAPFTIF

SEQ ID NO: 1910 - protein, 663 aa, Escherichia coli
MFRLNPFVRVGLCLSAISCAWPVLAVDDDGETMVVTASSVEQNLKDAPASISVITQEDLQRKPVQNLKDVLKEVPGVQLTNEGDNRKGVSIRGLDSSYTLILVDGKRVNSRNAVFRHNDFDLNWIPVDSIERIEVVRGPMSSLYGSDALGGVVNIITKKIGQKWSGTVTVDTTIQEHRDRGDTYNGQFFTSGPLIDGVLGMKAYGSLAKREKDDPQNSTTTDTGETPRIEGFSSRDGNVEFAWTPNQNHDFTAGYGFDRQDRDSDSLDKNRLERQNYSVSHNGRWDYGTSELKYYGEKVENKNPGNSSPITSESNTVDGKYTLPLTAINQFLTVGGEWRHDKLSDAVNLTGGTSSKTSASQYALFVEDEWRIFEPLALTTGVRMDDHETYGEHWSPRAYLVYNATDTVTVKGGWATAFKAPSLLQLSPDWTSNSCRGACKIVGSPDLKPETSESWELGLYYMGEEGWLEGVESSVTVFRNDVKDRISISRTSDVNAAPGYQNFVGFETGANGRRIPVFSYYNVNKARIQGVETELKIPFNDEWKLSINYTYNDGRDVSNGENKPLSDLPFHTANGTLDWKPLALEDWSFYVSGHYTGQKRADSATAKTPGGYTIWNTGAAWQVTKDVKLRAGVLNLGDKDLSRDDYSYNEDGRRYFMAVDYRF

SEQ ID NO: 1911 - protein, 263 aa, Escherichia coli
MSKRNAVTTFFTNRVTKALGMTLALMMTCQSAMASLAADQTRYIFRGDKDALTITVTNNDKERTFGGQAWVDNIVEKDTRPTFVVTPSFFKVKPNGQQTLRIIMASDHLPKDKESVYWLNLQDIPPALEGSGIAVAVRTKLKLFYRPKALIEGRKGAEEGISLQSRPDGRTMLVNTTPYIFAIGSLLDGNGKRIATDNETAQKLLMFMPGDEVQVKGNVVKVDSLNDYGELQTWTINQKKTPTSSGQKASDSLVNPSDKADKK

SEQ ID NO: 1912 - protein, 647 aa, Escherichia coli
MIKFSATLLATLIAASVNAATVDLRIMETTDLHSNMMDFDYYKDTATEKFGLVRTASLINDARNEVKNSVLVDNGDLIQGSPLADYMSAKGLKAGDIHPVYKALNTLDYTVGTLGNHEFNYGLDYLKNALAGAKFPYVNANVIDARTKQPMFTPYLIKDTEVVDKDGKKQTLKIGYIGVVPPQIMGWDKANLSGKVTVNDITETVRKYVPEMREKGADVVVVLAHSGLSADPYKVMAENSVYYLSEIPGVNAIMFGHAHAVFPGKDFADIEGADIAKGTLNGVPAVMPGMWGDHLGVVDLQLSNDSGKWQVTQAKAEARPIYDIANKKSLAAEDSKLVETLKADHDATRQFVSKPIGKSADNMYSYLALVQDDPTVQVVNNAQKAYVEHYIQGDPDLAKLPVLSAAAPFKVGGRKNDPASYVEVEKGQLTFRNAADLYLYPNTLIVVKASGKEVKEWLECSAGQFNQIDPNSTKPQSLINWDGFRTYNFDVIDGVNYQIDVTQPARYDGECQMINANAERIKNLTFNGKPIDPNAMFLVATNNYRAYGGKFAGTGDSHIAFASPDENRSVLAAWIADESKRAGEIHPAADNNWRLAPIAGDKKLDIRFETSPSDKAAAFIKEKGQYPMNKVATDDIGFAIYQVDLSK

SEQ ID NO: 1913 - protein, 166 aa, Escherichia coli
MRIVTAAVMASTLAVSSLSHAAEVGSGDNWHPGEELTQRSTQSHMFDGISLTEHQRQQMRDLMQQARHEQPPVNVSELETMHRLVTAENFDENAVRAQAEKMANEQIARQVEMAKVRNQMYRLLTPEQQAVLNEKHQQRMEQLRDVTQWQKSSSLKLLSSSNSRSQ

SEQ ID NO: 1914 - protein, 166 aa, Escherichia coli; identical to SEQ ID NO: 1913

SEQ ID NO: 1915 - protein, 241 aa, Escherichia coli
MTPIKLIFAALSLFPCSNIYANNITTQKFEAILGATRVIYHLDGNGESLRVKNPQISPILIQSKVMDEGSKDNADFIVTPPLFRLDAKRETDIRIVMVNGLYPKDRESLKTLCVRGIPPKQGDLWANNEKEFVGMKLNVSINTCIKLILRPHNLPKLDINSEGQIEWGIRDGNLVAKNKTPYYFTIVNASFNGKALKTPGTLGPYEQKLYTLPSKISVSGLVKWEIIGDLGESSETKKFNI

SEQ ID NO: 1916 - protein, 937 aa, Escherichia coli
  MOD_RES (754)..(754): Any amino acid
MYFDAGESEDFCIQYSVLQDIGVTVSGNQDECANLDDELNLRTRFDFYSKRMDIFVSPKFVPRKKNGLAPIKLWDEGENALFTSYNFSEDYYHFKGDARDSYSQYANIQPRLNIGPWRIRTQAIWNKNNNTKGEWSNNYLYAERGLGNIKSRLYIGDGYFPLKNFNSFKFKGGVLKTDENMYPYSEKTYSPIVKGSAKTQAKVEFFQDGVKIYSSIVPPGDFSISDYILSGSNSDLYVKVIEENGSIQEFIVPFTYPAVAVREGFTYYEIAMGETQQSNDYFTQLSFTRGLPYDFTVLTSLEYSGFYRSLEIGLGKMLGNLGALSLIYGQSNFSKSDNSKNKKWDIRYNKNIPDLNTYLSFSAVSQTRGGYSSLRDALDYEIGEYTFNSKNSYTASINHSLGELGSLNFSGTWRNYWENKNQTRSYNLSYSTQIFNGKAYLSGSLIRSELMNFNNKISDTILNIGVNIPFGLSRGIQSVSYNTSSVKGGRSTHQLGISGSEFDNKLYWHVNQGYSDNYSNTSMYGYYKAKYAQVNAGYSVSERYNHAYGGIEGGILVYDGGIILGRNLGDTMSIIEAPGAENTKIRGWGSIETDWRGRAFIGYLSPYQNNDISLDPSSLPLDSSLDITTNSVIPTTGAIVKTTYNVKKGKKVMLTLKKSNGDAVPFGAIVTVMDGDQNTSIVGDNGQLYLGSSMDTGRLKVIWGNGEDKKCVVDYIVGDNKNIAGIYIGSAEHVFSSMLLYGKKISFLSASVWXVIGVVKAFLTTLQSNNEWRTHSEKNDFSIDFDVGVGRSFAAVGPTKDMSLGANLTSEPTLAIDFTPIENIYVGANYGKDIGTLVFTTNDLTDITLMSSRSVVDGRQTGFFTFMDSSATYKISTKLGSSNDVNIQEITQGAKITPVSGEKTLPKKFTLKLHAHRSSSTVPDTYTVGLNVTSNVI

SEQ ID NO: 1917 - protein, 757 aa, Escherichia coli
  MOD_RES (574)..(574): Any amino acid
MYPYSEKTYSPIVKGSAKTQAKVEFFQDGVKIYSSIVPPGDFSISDYILSGSNSDLYVKVIEENGSIQEFIVPFTYPAVAVREGFTYYEIAMGETQQSNDYFTQLSFTRGLPYDFTVLTSLEYSGFYRSLEIGLGKMLGNLGALSLIYGQSNFSKSDNSKNKKWDIRYNKNIPDLNTYLSFSAVSQTRGGYSSLRDALDYEIGEYTFNSKNSYTASINHSLGELGSLNFSGTWRNYWENKNQTRSYNLSYSTQIFNGKAYLSGSLIRSELMNFNNKISDTILNIGVNIPFGLSRGIQSVSYNTSSVKGGRSTHQLGISGSEFDNKLYWHVNQGYSDNYSNTSMYGYYKAKYAQVNAGYSVSERYNHAYGGIEGGILVYDGGIILGRNLGDTMSIIEAPGAENTKIRGWGSIETDWRGRAFIGYLSPYQNNDISLDPSSLPLDSSLDITTNSVIPTTGAIVKTTYNVKKGKKVMLTLKKSNGDAVPFGAIVTVMDGDQNTSIVGDNGQLYLGSSMDTGRLKVIWGNGEDKKCVVDYIVGDNKNIAGIYIGSAEHVFSSMLLYGKKISFLSASVWXVIGVVKAFLTTLQSNNEWRTHSEKNDFSIDFDVGVGRSFAAVGPTKDMSLGANLTSEPTLAIDFTPIENIYVGANYGKDIGTLVFTTNDLTDITLMSSRSVVDGRQTGFFTFMDSSATYKISTKLGSSNDVNIQEITQGAKITPVSGEKTLPKKFTLKLHAHRSSSTVPDTYTVGLNVTSNVI

SEQ ID NO: 1918 - protein, 621 aa, Escherichia coli
  MOD_RES (438)..(438): Any amino acid
MLGNLGALSLIYGQSNFSKSDNSKNKKWDIRYNKNIPDLNTYLSFSAVSQTRGGYSSLRDALDYEIGEYTFNSKNSYTASINHSLGELGSLNFSGTWRNYWENKNQTRSYNLSYSTQIFNGKAYLSGSLIRSELMNFNNKISDTILNIGVNIPFGLSRGIQSVSYNTSSVKGGRSTHQLGISGSEFDNKLYWHVNQGYSDNYSNTSMYGYYKAKYAQVNAGYSVSERYNHAYGGIEGGILVYDGGIILGRNLGDTMSIIEAPGAENTKIRGWGSIETDWRGRAFIGYLSPYQNNDISLDPSSLPLDSSLDITTNSVIPTTGAIVKTTYNVKKGKKVMLTLKKSNGDAVPFGAIVTVMDGDQNTSIVGDNGQLYLGSSMDTGRLKVIWGNGEDKKCVVDYIVGDNKNIAGIYIGSAEHVFSSMLLYGKKISFLSASVWXVIGVVKAFLTTLQSNNEWRTHSEKNDFSIDFDVGVGRSFAAVGPTKDMSLGANLTSEPTLAIDFTPIENIYVGANYGKDIGTLVFTTNDLTDITLMSSRSVVDGRQTGFFTFMDSSATYKISTKLGSSNDVNIQEITQGAKITPVSGEKTLPKKFTLKLHAHRSSSTVPDTYTVGLNVTSNVI

SEQ ID NO: 1919 - protein, 487 aa, Escherichia coli
  MOD_RES (304)..(304): Any amino acid
MNFNNKISDTILNIGVNIPFGLSRGIQSVSYNTSSVKGGRSTHQLGISGSEFDNKLYWHVNQGYSDNYSNTSMYGYYKAKYAQVNAGYSVSERYNHAYGGIEGGILVYDGGIILGRNLGDTMSIIEAPGAENTKIRGWGSIETDWRGRAFIGYLSPYQNNDISLDPSSLPLDSSLDITTNSVIPTTGAIVKTTYNVKKGKKVMLTLKKSNGDAVPFGAIVTVMDGDQNTSIVGDNGQLYLGSSMDTGRLKVIWGNGEDKKCVVDYIVGDNKNIAGIYIGSAEHVFSSMLLYGKKISFLSASVWXVIGVVKAFLTTLQSNNEWRTHSEKNDFSIDFDVGVGRSFAAVGPTKDMSLGANLTSEPTLAIDFTPIENIYVGANYGKDIGTLVFTTNDLTDITLMSSRSVVDGRQTGFFTFMDSSATYKISTKLGSSNDVNIQEITQGAKITPVSGEKTLPKKFTLKLHAHRSSSTVPDTYTVGLNVTSNVI

SEQ ID NO: 1920 - protein, 366 aa, Escherichia coli
  MOD_RES (183)..(183): Any amino acid
MSIIEAPGAENTKIRGWGSIETDWRGRAFIGYLSPYQNNDISLDPSSLPLDSSLDITTNSVIPTTGAIVKTTYNVKKGKKVMLTLKKSNGDAVPFGAIVTVMDGDQNTSIVGDNGQLYLGSSMDTGRLKVIWGNGEDKKCVVDYIVGDNKNIAGIYIGSAEHVFSSMLLYGKKISFLSASVWXVIGVVKAFLTTLQSNNEWRTHSEKNDFSIDFDVGVGRSFAAVGPTKDMSLGANLTSEPTLAIDFTPIENIYVGANYGKDIGTLVFTTNDLTDITLMSSRSVVDGRQTGFFTFMDSSATYKISTKLGSSNDVNIQEITQGAKITPVSGEKTLPKKFTLKLHAHRSSSTVPDTYTVGLNVTSNVI

SEQ ID NO: 1921 - protein, 110 aa, Escherichia coli
MNALLLLAALSSQITFNTTQQGDMYTIIPEVTLTQSCLCRVQILSLREGSSGQSQTKQEKTLSLPANQPIALTKLSLNISPDDRVKIVVTVSDGQSLHLSQQWPPSSEKS

SEQ ID NO: 1922 - protein, 110 aa, Escherichia coli; identical to SEQ ID NO: 1921

SEQ ID NO: 1923 - protein, 110 aa, Escherichia coli
MNTLLLLAALSSQITFNTTQQGDVYTIIPEVTLTQSCLCRVQILSLREGSSGQSQTKQEKTLSLPANQPIALTKLSLNISPDDRVKIVVTVSDGQSLHLSQQWPPSSEKS

SEQ ID NO: 1924 - protein, 110 aa, Escherichia coli; identical to SEQ ID NO: 1921

SEQ ID NO: 1925 - protein, 232 aa, Escherichia coli
MKSKLIILLMLVPFSSFSTENNFEINKTRVIYSDSTPSVQISNNKAYPLIVQSNIWDENNNKNHDFIATPPIFKMESESRNIIKIIKTNIKLPDSQESMRWLCIESMPPTEKSTKINRKEGRTDSINISIRGCIKLIYQPASVPSPVFNNIVEKLKWHKNGKYLVLKNNTPYYISFSEVFFDSDKVNNAKDILYVKPYSEKKIDISNRIIKKIKWAMIDDAGAKTKLYESIL

SEQ ID NO: 1926 - protein, 232 aa, Escherichia coli
MKSKLIILLTLVPFSSFSTGNNFEINKTRVIYSDSTPSVQISNNKAYPLIIQSNVWDESNNKNHDFIATPPIFKMESESRNIIKIIKTTINLPDSQESMRWLCIESMPPIEKSTKINRKEGRTDSINISIRGCIKLIYRPASVPSPVFNNIVEKLKWHKNGKYLVLKNNTPYYISFSEVFFDSDKVNNAKDILYVKPYSEKKIDISNRIIKKIKWAMIDDAGAKTKLYESIL

SEQ ID NO: 1927 - protein, 819 aa, Escherichia coli
MMLAQKQNFMNQFYKKYHYSIQKYQITDLLFFLFLYPFSTSYGNEQFSFDSRFLPSGYNYSLNSNLPPEGEYLVDIYINKIKKESAIIPFYIKGNKLVPCLSKEKLSSLGININNNDNAECAETSKAGISNISFEFSSLRLFIAVPKNLLSEIDKISSKDIDNGIHALFFNYQVNTRLANNKNRYDYISVSPNINYFSWRLRNRFEFNQNNDKKTWERNYTYLEKSFYDKKLNLIVGESYTSSNVYNNYSFTGISVSTDTDMYTPSEIDYTPEIHGVADSDSQIIVRQGNTIIINESVPAGPFSFPITNLMYTGGQLNVEITDIYGNKKQYTVSNSSLPVMRKAGLMVYNFISGKLTKKNSEDGDFFAQGDINYGTHYNSTLFGGYQFSKNYFNLSTGIGTDLGFSGAWLLNVSRSNFKDKNGYNINLQQNTQLRPFNAGVNFDYIYRKKGYVELSGIGWHGNLYNQLKNSFSLSLSKSLDKYGNFSLDYNKIKYWDNAYDSNSMSIRYFFKFMRAMITTNYSLNKYQSYEKKDKRFSINISLPLTKDYGHISSNYSFSNANTGTATSSVGVNGSFFNDARLNWNIQQNRTTRNNGYTDNTSYIATSYASPYGVFTGSYSGSNKYSSQFYSALGGIVLHSDGVAFTQKAGDTSALVRIDNISDIKIGNTPGVYTGYNGFALIPHLQPFKKNTILINDKGIPDDIALANIKKQVIPSRGAIVKVKFDAKKGNNILFKLTTKDGKTPPLGAIAHEKNGKQINTGIVDDDGMLYMSGLSGAGIINVTWNGKVCSFPFSEKDISSKQLSVVNKQCNRPENSGD

SEQ ID NO: 1928 - protein, 802 aa, Escherichia coli
MNQFYKKSHYSIQKHQITGLLFLLFIYPFSTSYGNEQFSFDSRFLPSGYNYSLNSNLPPEGEYLVDIYINKIKKESAIIPFYIKGNKLVPCLSKEKISSLGININNNDNTECVETSKAGISNISFEFSSLRLFIAVPKNLLSEIDKISSKDIDNGIHALFFNYQVNTRLANNKNRYDYISVSPNINYFSWRLRNLFEFNQNNDEKTWERNYTYLEKSFYDKKLNLVVGESYTNSNVYNNYSFTGISVSTDTDMYTPSEIDYTPEIHGVADSDSQIIVRQGNTIIINESVPAGPFSFPITNLMYTGGQLNVEITDIYGNKKQYTVNNSSLPVMRKAGLMVYNFISGKLTKKNSEDGDFFTQGDINYGTHYNSTLFGGYQFSKNYFNLSTGIGTDLGFSGAWLLHVSRSNFKNKNGYNINLQQNTQLRPFNAGVNFDYAYRKKRYVELSDIGWHGNLYNQLKNSFSLSLSKSLNKYGNFSLDYNKMKYWDNAYDSNSMSIRYFFKFMRAMITTNCSLNKYQSYEKKDKRFSINISLPLTKDYGHISSNYSFSNANTGTATSSVGLNGSFFNDARLNWNIQQNRTTRNNGYTDNTSYIATSYASPYGVFTGSYSGSNKYSSQFYSASGGIVLHSDGVAFTQKAGDTSALVRIDNISDIKIGNTPGVYTGYNGFALIPHLQPFKKNTILINDKGIPDGITLANIKKQVIPSRGAIVKVKFDAKKGNDILFKLTTKDGKTPPLGAIAHEKNGKQINTGIVDDDGMLYMSGLSGTGIINVTWNGKVCSFPFSEKDISSKQLSVVNKQC

SEQ ID NO: 1929 - protein, 516 aa, Escherichia coli
MQRRDFLKYSVALGVASALPLWSRAVFAAERPTLPIPDLLTTDARNRIQLTIGAGQSTFGEKTATTWGYNGNLLGPAVKLQRGKAVTVDIYNQLTEETTLHWHGLEVPGEVDGGPQGIIPPGGKRSVTLNVDQPAATCWFHPHQHGKTGRQVAMGLAGLVVIEDDEILKLMLPKQWGIDDVPVIVQDKKFSADGQIDYQLDVMTAAVGWFGDTLLTNGAIYPQHAAPRGWLRLRLLNGCNARSLNFATSDNRPLYVIASDGGLLPEPVKVNELPVLMGERFEVLVEVNDNKPFDLVTLPVSQMGMAIAPFDKPHPVMRIQPIAISASGALPDTLSSLPALPSLEGLTVRKLQLSMDPMLDMMGMQMLMEKYGDQAMVGMDHSQMMGHMGHGNMNHMNHGGKFDFHHANKINGQAFDMNKPMFAAAKGQYERWVISGVGDMMLHPFHIHGTQFRILSENGKPPAAHRAGWKDTVKVEGNVSEVLVKFNHDAPKERAYMAHCHLLEHEDTGMMLGFTV

SEQ ID NO: 1930 - protein, 516 aa, Escherichia coli
MQRRDFLKYSVALGVASALPLWSRAVFAAERPTLPIPDLLTTDARNRIQLTIGAGQSTFGGKTATTWGYNGNLLGPAVKLQRGKAVTVDIYNQLTEETTLHWHGLEVPGEVDGGPQGIIPPGGKRSVTLNVDQPAATCWFHPHQHGKTGRQVAMGLAGLVVIEDDEILKLMLPKQWGIDDVPVIVQDKKFSADGQIDYQLDVMTAAVGWFGDTLLTNGAIYPQHAAPRGWLRLRLLNGCNARSLNFATSDNRPLYVIASDGGLLPEPVKVSELPVLMGERFEVLVEVNDNKPFDLVTLPVSQMGMAIAPFDKPHPVMRIQPIAISASGALPDTLSSLPALPSLEGLTVRKLQLSMDPMLDMMGMQMLMEKYGDQAMAGMDHSQMMGHMGHGNMNHMNHGGKFDFHHANKINGQAFDMNKPMFAAAKGQYERWVISGVGDMMLHPFHIHGTQFRILSENGKPPAAHRAGWKDTVKVEGNVSEVLVKFNHDAPKEHAYMAHCHLLEHEDTGMMLGFTV

SEQ ID NO: 1931 - protein, 460 aa, Escherichia coli
MSPCKLLPFCVALALTGCSLAPDYQRPAMPVPQQFSLSQNGLVNAADNYQNAGWRTFFVDNQVKTLISEALENNRDLRMATLKVQEARAQYRLTDADRYPQLNGEGSGSWSGNLKGDSATTREFSTGLNASFDLDFFGRLKNMSEAERQNYLATEEAQRAVHILLVSNVAQSYFNQQLAYAQLQIAEETLRNYQQSYAFVEKQLLTGSSNVLALEQARGVIESTRSDIAKRQGELAQANNALQLLLGSYGKLPQAQTVNSDSLQSVKLPAGLSSQILLQRPDIMEAEHALMAANANIGAARAAFFPSISLTSGISTASSDLSSLFNASSGMWNFIPKIEIPIFNAGRNQANLDIAEIRQQQSVVNYEQKIQNAFKEVADALALRQSLNDQISAQQRYLASLQITLQRARALYQHGAVSYLEVLDAERSLFATRQTVLDLNYARQVNEISLYTALGGGWQQ

SEQ ID NO: 1932 - protein, 460 aa, Escherichia coli
MSPCKLLPFCVALALTGCSLAPDYQRPAMPVPQQFSLSQNGLVNAADNYQNAGWRTFFVDNQVKTLISEALVNNRDLRMAALKVQEARAQYRLTDADRYPQLNGEGSGSWSGNLKGDSATTREFSTGLNASFDLDFFGRLKNMSEAERQNYLATEEAQRAVHILLVSNVAQSYFNQQLAYAQLQIAEETLRNYQQSYAFVEKQLLTGSSNVLALEQARGVIESTRSDIAKRQGELAQANNALQLLLGSYGKLPQAQTVNSDSLQSVKLPAGLPSQILLQRPDIMEAEHALMAANANIGAARAAFFPSISLTSGISTASSDLSSLFNASSGMWNFIPKIEIPIFNAGRNQANLDIAEIRQQQSVVNYEQKIQNAFKEVADALALRQSLNDQISAQQRYLASLQITLQRARTLYQHGAVSYLEVLDAERSLFATRQTLLDLNYARQVNEISLYTALGGGWQQ

SEQ ID NO: 1933 - protein, 457 aa, Escherichia coli
MSPCKLLPFCVALALTGCSLAPDYQRPAMPVPQQFSLSQNGLVNAADNYQNAGWRTFFVDNQVKTLISEALVNNRDLRMATLKVQEARAQYRLTDADRYPQLNGEGSGSWSGNLKGNTATTREFSTGLNASFDLDFFGRLKNMSEAERQNYLATEEAQRAVHILLVSNVAQSYFNQQLAYAQLQIAEETLRNYQQSYAFVEKQLLTGSSNVLALEQARGVIESTRSDIAKRQGELAQANNALQLLLGSYGKLPQAQTVNSDSLQSVKLPAGLSSQILLQRPDIMEAEHALMAANANIGAARAAFFPSISLTSGISTASSDLSSLFNASSGMWNFIPKIEIPIFNAGRNQANLDIAEIRQQQSVVNYEQKIQNAFKEVADALALRQSLNDQISAQQRYLASLQITLQRARALYQHGAVSYLEVLDAERSLFATRQTLLDLNYARQVNEISLYTALGGG

SEQ ID NO: 1934 - protein, 110 aa, Escherichia coli
MKKALQVAMFSLFTVIGFNAQANEHHHETMSEAQPQVISATGVVKGFDLESKKITIHHDPIAAVNWPEMTMRFTITPQTKMSGIKTGDKVAFNFVQQGNLSLLQDIKVSQ

SEQ ID NO: 1935 - protein, 110 aa, Escherichia coli
MKKALQVAMFSLFTVIGFNAQANEHHHETMSEAQPQVISATGVVKGVDLESKKITIHHDPIAAVNWPEMTMRFTITPQTKMSEIKTGDKVAFNFVQQGNLSLLQDIKVSQ

SEQ ID NO: 1936 - protein, 110 aa, Escherichia coli
MKKALQVAMFSLFTVIGFNAQANEHHHETMSEAQPQVISATGVVKGIDLESKKITIHHDPIAAVNWPEMTMRFTITPQTKMSEIKTGDKVAFNFVQQGNLSLLQDIKVSQ

SEQ ID NO: 1937 - protein, 338 aa, Escherichia coli
MAVNLLKKNSLALVASLLLAGHVQATELLNSSYDVSRELFAALNPPFEQQWAKDNGGDKLTIKQSHAGSSKQALAILQGLKADVVTYNQVTDVQILHDKGKLIPADWQSRLPNNSSPFYSTMGFLVRKGNPKNIHDWNDLVRSDVKLIFPNPKTSGNARYTYLAAWGAADKADGGDKGKTEQFMTQFLKNVEVFDTGGRGATTTFAERGLGDVLISFESEVNNIRKQYEAQGFEVVIPKTNILAEFPVAWVDKNVQANGTEKAAKAYLNWLYSPQAQTIITDYYYRVNNPEVMDKLKDKFPQTELFRVEDKFGSWPEVMKTHFTSGGELDKLLAAGRN

SEQ ID NO: 1938 - protein, 477 aa, Escherichia coli
MRFSRFIIGLTSCIAFSVQAANVDEYITQLPAGANLALMVQKVGASAPAIDYHSQQMALPASTQKVITALAALIQLGPDFRFTTTLETKGNVENGVLKGDLVARFGADPTLKRQDIRNMVATLKKSGVNQIDGNVLIDTSIFASHDKAPGWPWNDMTQCFSAPPAAAIVDRNCFSVSLYSAPKPGDMAFIRVASYYPVTMFSQVRTLPRGSAEAQYCELDVVPGDLNRFTLTGCLPQRSEPLPLAFAVQDGASYAGAILKDELKQAGITWSGTLLRQTQVNEPGTVVASKQSAPLHDLLKIMLKKSDNMIADTVFRMIGHARFNVPGTWRAGSDAVRQILRQQAGVDIGNTIIADGSGLSRHNLIAPATMMQVLQYIAQHDNELNFISMLPLAGYDGSLQYRAGLHQAGVDGKVSAKTGSLQGVYNLAGFITTASGQRMAFVQYLSGYAVEPADQRNRRIPLVRFESRLYKDIYQNN

SEQ ID NO: 1939 - protein, 185 aa, Escherichia coli
MRNLVKYVGIGLLVMGLAACDDKDTNATAQGSVAESNATGNPVNLLDGKLSFSLPADMTDQSGKLGTQANNMHVWSDATGQKAVIVIMGDDPKEDLAVLAKRLEDQQRSRDPQLQVVTNKAIELKGHKMQQLDSIISAKGQTAYSSVILGNVGNQLLTMQITLPADDQQKAQTTAENIINTLVIQ

SEQ ID NO: 1940 - protein, 516 aa, Escherichia coli
MKRSISFRPTLLALVLATNFPVAHAAVPKDMLVIGKAADPQTLDPAVTIDNNDWTVTYPSYQRLVQYKTDGDKGSTDVEGDLASSWKASDDQKEWTFTLKDNAKFADGTPVTAEAVKLSFERLLKIGQGPAEAFPKDLKIDAPDEHTVKFTLSQPFAPFLYTLANDGASIINPAVLKEHAADDARGFLAQNTAGSGPFMLKSWQKGQQLVLVPNPHYPGNKPNFKRVSVKIIGESASRRLQLSRGDIDIADALPVDQLNALKQENKVNVAEYPSLRVTYLYLNNSKAPLNQADLRRAISWSTDYQGMVNGILSGNGKQMRGPIPEGMWGYDATAMQYNHDETKAKAEWDKVTSKPTSLTFLYSDNDPNWEPIALATQSSLNKLGIIVKLEKLANATMRDRVGKGDYDIAIGNWSPDFADPYMFMNYWFESDKKGLPGNRSFYENSEVDKLLRNALATTDQTQRTRDYQQAQKIVIDDAAYVYLFQKNYQLAMNKEVKGFVFNPMLEQVFNINTMSK

SEQ ID NO: 1941 - protein, 193 aa, Escherichia coli
MSDTTELVDLAVIFPDLEIELKYACADNITGKAIYQQARCLLHKDAITALAKSISIAQLSGLQLVIYDAYRPQQAQAMLWQACPDPQYVVDVTVGSNHSRGTAIDLTLRDEHGNILDMGAGFDEMHERSHAYHPSVPPAAQRNRLLLNAIMTGGGFVGISSEWWHFELPQAASYPLLADQFSCFISPGTQHVS

SEQ ID NO: 1942 - protein, 455 aa, Escherichia coli
MKKQTQLLSALALSVGLTLSASFQAVASIPGQVADQAPLPSLAPMLEKVLPAVVSVRVEGTASQGQKIPEEFKKFFGDDLPDQPAQPFEGLGSGVIINASKGYVLTNNHVINQAQKISIQLNDGREFDAKLIGSDDQSDIALLQIQNPSKLTQIAIADSDKLRVGDFAVAVGNPFGLGQTATSGIVSALGRSGLNLEGLENFIQTDASINRGNSGGALLNLNGELIGINTAILAPGGGSVGIGFAIPSNMARTLAQQLIDFGEIKRGLLGIKGTEMSADIAKAFNLDVQRGAFVSEVLPGSGSAKAGVKAGDIITSLNGKPLNSFAELRSRIATTEPGTKVKLGLLRNGKPLEVEVTLDTSTSSSASAEMITPALEGATLSDGQLKDGGKGIKIDEVVKGSPAAQAGLQKDDVIIGVNRDRVNSIAEMRKVLAAKPAIIALQIVRGNESIYLLMR

SEQ ID NO: 1943 - protein, 355 aa, Escherichia coli
MFVKLLRSVAIGLIVGAILLVAMPSLRSLNPLSTPQFDSTDETPASYNLAVRRAAPAVVNVYNRGLNTNSHNQLEIRTLGSGVIMDQRGYIITNKHVINDADQIIVALQDGRVFEALLVGSDSLTDLAVLKINATGGLPTIPINARRVPHIGDVVLAIGNPYNLGQTITQGIISATGRIGLNPTGRQNFLQTDASINHGNSGGALVNSLGELMGINTLSFDKSNDGETPEGIGFAIPFQLATKIMDKLIRDGRVIRGYIGIGGREIAPLHAQGGGIDQLQGIVVNEVSPDGPAANAGIQVNDLIISVDNKPAISALETMDQVAEIRPGSVIPVVVMRDDKQLTLQVTIQEYPATN

SEQ ID NO: 1944 - protein, 355 aa, Escherichia coli; identical to SEQ ID NO: 1943

SEQ ID NO: 1945 - protein, 332 aa, Escherichia coli
MNKKVLTLSAVMASMLFGAAAHAADTRIGVTIYKYDDNFMSVVRKAIEQDAKAAPDVQLLMNDSQNDQSKQNDQIDVLLAKGVKALAINLVDPAAAGTVIEKARGQNVPVVFFNKEPSRKALDSYDKAYYVGTDSKESGIIQGDLIAKHWAANQGWDLNKDGQIQFVLLKGEPGHPDAEARTTYVIKELNDKGIKTEQLQLDTAMWDTAQAKDKMDAWLSGPNANKIEVVIANNDAMAMGAVEALKAHNKSSIPVFGVDALPEALALVKSGALAGTVLNDANNQAKATFDLAKNLADGKGAADGTNWKIDNKVVRVPYVGVDKDNLAEFSKK

SEQ ID NO: 1946 - protein, 332 aa, Escherichia coli; identical to SEQ ID NO: 1945

SEQ ID NO: 1947 - protein, 535 aa, Escherichia coli
MRISLKKSGMLKLGLSLVAMTVAASVQAKTLVYCSEGSPEGFNPQLFTSGTTYDASSVPLYNRLVEFKIGTTEVIPGLAEKWEVSEDGKTYTFHLRKGVKWHDNKEFKPTRELNADDVVFSFDRQKNAQNPYHKVSGGSYEYFEGMGLPELISEVKKVDDNTVQFVLTRPEAPFLADLAMDFASILSKEYADAMMKAGTPEKLDLNPIGTGPFQLQQYQKDSRIRYKAFDGYWGTKPQIDTLVFSITPDASVRYAKLQKNECQVMPYPNPADIARMKQDKSINLMEMPGLNVGYLSYNVQKKPLDDVKVRQALTYAVNKDAIIKAVYQGAGVSAKNLIPPTMWGYNDDVQDYTYDPEKAKALLKEAGLEKGFSIDLWAMPVQRPYNPNARRMAEMIQADWAKVGVQAKIVTYEWGEYLKRAKDGEHQTVMMGWTGDNGDPDNFFATLFSCAASEQGSNYSKWCYKPFEDLIQPARATDDHNKRVELYKQAQVVMHDQAPALIIAHSTVFEPVRKEVKGYVVDPLGKHHFENVSIE

SEQ ID NO: 1948 - protein, 208 aa, Escherichia coli
MKKIWLALAGLVLAFSASAAQYEDGKQYTTLEKPVAGAPQVLEFFSFFCPHCYQFEEVLHISDNVKKKLPEGVKMTKYHVNFMGGDLGKELTQAWAVAMALGVEDKVTVPLFEGVQKTQTIRSASDIRDVFINAGIKGEEYDAAWNSFVVKSLVAQQEKAAADVQLRGVPAMFVNGKYQLNPQGMDTSNMDVFVQQYADTVKYLSEKK

SEQ ID NO: 1949 - protein, 208 aa, Escherichia coli
MKKIWLALAGLVLAFSASAAQYEDGKQYTTLEKPVAGAPQVLEFFSFFCPHCYQFEEVLHISDNVKKKLPEGVKMTKYHVNFMGGDLGKDLTQAWAVAMALGVEDKVTVPLFEGVQKTQTIRSASDIRDVFINAGIKGEEYDAAWNSFVVKSLVAQQEKAAADVQLRGVPAMFVNGKYQLNPQGMDTSNMDVFVQQYADTVKYLSEKK

SEQ ID NO: 1950 - protein, 208 aa, Escherichia coli; identical to SEQ ID NO: 1948

SEQ ID NO: 1951 - protein, 208 aa, Escherichia coli; identical to SEQ ID NO: 1949

SEQ ID NO: 1952 - protein, 236 aa, Escherichia coli
MKKGFMLFTLLAAFSGFAQADDAAIQQTLAKMGIKSSDIQPAPVAGMKTVLTNSGVLYITDDGKHIIQGPMYDVSGTAPVNVTNKMLLKQLNALEKEMIVYKAPQEKHVITVFTDITCGYCHKLHEQMADYNALGITVRYLAFPRQGLDSDAEKEMKAIWCAKDKNKAFDDVMAGKSVAPASCDVDIADHYALGVQLGVSGTPAVVLSNGTLVPGYQPPKEMKEFLDEHQKMTSGK

SEQ ID NO: 1953 - protein, 236 aa, Escherichia coli; identical to SEQ ID NO: 1952

SEQ ID NO: 1954 - protein, 248 aa, Escherichia coli
MLKKILLLALLPAIAFAEELPAPVKAIEKQGITIIKTFDAPGGMKGYLGKYQDMGVTIYLTPDGKHAISGYMYNEKGENLSNTLIEKEIYAPAGREMWQRMEQSHWLLDGKKDAPVIVYVFADPFCPYCKQFWQQARPWVDSGKVQLRTLLVGVIKPESPATAAAILASKDPAKTWQEYEASGGKLKLNVPANVSTEQMKVLSDNEKLMDDLGANVTPAIYYMSKENTLQQAVGLPDQKTLNIIMGNK

SEQ ID NO: 1955 - protein, 248 aa, Escherichia coli
MLKKILLLALLPAIAFAEELPAPVKAIEKQGITIIKTFDAPGGMKGYLGKYQDMGVTIYLTPDGKHAISGYMYNEKGENLSNTLIEKEIYAPAGREMWQRMEQSHWLLDGKKDAPVIVYVFADPFCPYCKQFWQQARPWVDSGKVQLRTLLVGVIKPESPATAAAILASKDPAKTWQQYEASGGKLKLNVPANVSTEQMKVLSDNEKLMDDLGANVTPAIYYMSKENTLQQAVGLPDQKTLNIIMGNK

SEQ ID NO: 1956 - protein, 222 aa, Escherichia coli
MSKLGISSLFKTILLTAALAVSFTASAFTEGTDYMVLEKPIPNADKTLIKVFSYACPFCYKYDKAVTGPVSEKVKDIVAFTPFHLETKGEYGKQASEVFAVLINKDKAAGISLFDANSQFKKAKFAYYAAYHDKKERWSDGKDPAAFIKTGLDAAGMSQADFEAALKEPAVQETLEKWKASYDVAKIQGVPAYVVNGKYLIYTKSIKSIDAMADLIRELASK

SEQ ID NO: 1957 - protein, 259 aa, Escherichia coli
MIKHVLLFFVFISFSVSANDFFRADSRTPDEIRRAGGLLPRGQQEAYERGTPININLYEHARGTVTGNTRYNDGYVSTTVTLRQAHLIGQNILGSYNEYYIYVVAPAPNLFDVNGVLGRYSPYPSENEFAALGGIPLSQIIGWYRVSFGAIEGGMQRNRDYRGDLFRGLTVAPNEDGYQLAGFPSNFPAWREMPWSTFAPEQCVPNNKEFKGGVCISATNVLSKYDLMNFKKLLKRRLALTFFMSEDDFIGVHGERDEL

SEQ ID NO: 1958 - protein, 123 aa, Escherichia coli
MSSKKIIGAFVLMTGILSGQVYAGVSEHFRNICNQTTADIVAGVQLKKYIADVNTNTRGIYVVSNTGGVWYIPGGRDYPDNFLSGEIRKTAMAAILSDTKVNLCAKTSSSPNHIWAMELDRES

SEQ ID NO: 1959 - protein, 263 aa, Escherichia coli
MAKVISFFISLFLISFPLYANDYFRADSRTPDEVRRSGGLIPRGQDEAYERGTPININLYDHARGTATGNTRYNDGYVSTTTTLRQAHFLGQNMLGGYNEYYIYVVAAAPNLFDVNGVLGRYSPYPSENEYAALGGIPLSQIIGWYRVSFGAIEGGMHRNRDYRRDLFRGLSAAPNEDGYRIAGFPDGFPAWEEVPWREFAPNSCLPNNKASSDTTCASLTNKLSQHDLADFKKYIKRKFTLMTLLSINNDGFFSNNGGKDEL

SEQ ID NO: 1960 - protein, 122 aa, Escherichia coli
MSFKKIIKAFVIMAALVSVQAHAGASQFFKDNCNRTTASLVEGVELTKYISDINNNTDGMYVVSSTGGVWRISRAKDYPDNVMTAEMRKIAMAAVLSGMRVNMCASPASSPNVIWAIELEAE

SEQ ID NO: 1961 - protein, 935 aa, Escherichia coli
MITHGFYARTRHKHKLKKTFIMLSAGLGLFFYVNQNSFANGENYFKLSSDSKLLTQNVAQDRLFYTLKTGETVSSISKSQGISLSVIWSLNKHLYSSESEMLKAAPGQQIILPLKKLSVEYGALPVLGSAPVVAAGGVAGHTNKMTKMSPDATQSNMTDDRALNYTAQQAASLGSQLQSRSLHGDYAKDTALGIAGNQASSQLQAWLQHYGTAEVNLQSGNNFDGSSLDFLLPFYDSEKMLAFGQVGARYIDSRFTANLGAGQRFFLPENMLGYNVFIDQDFSGDNTRLGIGGEYWRDYFKSSVNGYFRMSGWHESYNKKDYDERPANGFDIRFNGYLPSYPALGAKLMYEQYYGDNVALFNSDKLQSNPGAATVGVNYTPIPLVTMGIDYRHGTGYENDLLYSMQFRYQFDKPWSPQIEPQYVNELRTLSGSRYDLVQRNNNIILEYKKQDILSLNIPHDINGTEHSTQKIQLIVKSKYGLDRIVWDDSALRSQGGQIQHSGSQSAQDYQAILPAYVQGGSNIYKVTARAYDRNGNSSNNVQLTITVLSNGQVVDQVGVTDFTADKTSAKADGTEAITYTATVKKNGVTQANVPVSFNIVSGTATLGANSATTDANGKATVTLKSSTPGQVVVSAKTAEMTSALNASAVIFVEQTKASITEIKADKTTAVANGNDAVTYTVKVMKEGQPVHGHSVAFTTNFGMFNGKSQTQNATTGSDGRATITLTSSSAGKATVSATVSGGNDVKAPEVTFFDGLKIDNKVDILGKNVTGDLPNIWLQYGQFKLKVSGGNGTYSWHSENTNIATVDESGKVTLKGKGTAVINVTSGDKQTVSYTIKAPNYMIRVGNKASYANAMSFCGNLLPSSQTVLSNVYNSWGPANGYDHYRSMQSITAWITQTEADKISGVSTTYDLITQNPHKDVSLNAPNVYAVCVE

SEQ ID NO: 1962 - protein, 939 aa, Escherichia coli
MITHGFYARTRHKHKLKKTFIMLSAGLGLFFYVNQNSFANGENYFKLGSDSKLLTHNSYQNRLFYTLKTGETVADLSKSQDINLSTIWSLNKHLYSSESEMMKAAPGQQIILPLKKLPFEYSALPLLGSAPLVAAGGVAGHTNKLTKMSPDVTKSNMTDDKALNYAAQQAASLGSQLQSRSLNGDYAKDTALGIAGNQASSQLQAWLQHYGTAEVNLQSGNNFDGSSLDFLLPFYDSEKMLAFGQVGARYIDSRFTANLGAGQRFFLPENMLGYNVFIDQDFSGDNTRLGIGGEYWRDYFKSSVNGYFRMSGWHESYNKKDYDERPANGFDIRFNGYLPSYPALGAKLMYEQYYGDNVALFNSDKLQSNPGAATVGVNYTPIPLVTMGIDYRHGTGNENDLLYSMQFRYQFDKPWSQQIEPQYVNELRTLSGSRYDLVQRNNNIILEYKKQDILSLNIPHDINGTERSTQKIQLIVKSKYGLDRIVWDDSALRSQGGQIQHSGSQSAQDYQAILPAYVQGGSNVYKVTARAYDRNGNSSNNVLLTITVLSNGQVVDQVGVTDFTADKTSAKADGTEAITYTATVKKNGVAQANVPVSFNIVSGTAVLSANSANTNGSGKATVTLKSDKPGQVVVSAKTAEMTSALNANAVIFVDQTKASITEIKADKTTAVANGQDAITYTVKVMKGDKPVSNQEVTFTTTLGKLSNSTEKTDTNGYAKVTLTSTTPGKSLVSARVSDVAVDVKAPEVEFFTTLTIDDGNIEIVGTGVKGKLPTVWLQYGQVNLKASGGNGKYTWRSANPAIASVDASSGQVTLKEKGTTTISVISSDNQTATYTIATPNSLIVPNMSKRVTYNDAVNTCKNFGGKLPSSQNELENVFKAWGAANKYEYYKSSQTIISWVQQTAQDAKSGVASTYDLVKQNPLNNIKASESNAYATCVK

SEQ ID NO: 1963 - protein, 934 aa, Escherichia coli
MITHGCYTRTRHKHKLKKTLIMLSAGLGLFFYVNQNSFANGENYFKLGSDSKLLTHDSYQNRLFYTLKTGETVADLSKSQDINLSTIWSLNKHLYSSESEMMKAAPGQQIILPLKKLPFEYSALPLLGSAPLVAAGGVAGHTNKLTKMSPDVTKSNMTDDKALNYAAQQAASLGSQLQSRSLNGDYAKDTALGIAGNQASSQLQAWLQHYGTAEVNLQSGNNFDGSSLDFLLPFYDSEKMLAFGQVGARYIDSRFTANLGAGQRFFLPANMLGYNVFIDQDFSGDNTRLGIGGEYWRDYFKSSVNGYFRMSGWHESYNKKDYDERPANGFDIRFNGYLPSYPALGAKLIYEQYYGDNVALFNSDKLQSNPGAATVGVNYTPIPLVTMGIDYRHGTGNENDLLYSMQFRYQFDKSWSQQIEPQYVNELRTLSGSRYDLVQRNNNIILEYKKQDILSLNIPHDINGTEHSTQKIQLIVKSKYGLDRIVWDDSALRSQGGQIQHSGSQSAQDYQAILPAYVQGGSNIYKVTARAYDRNGNSSNNVQLTITVLSNGQVVDQVGVTDFTADKTSAKADNADTITYTATVKKNGVAQANVPVSFNIVSGTATLGANSAKTDANGKATVTLKSSTPGQVVVSAKTAEMTSALNASAVIFFDQTKASITEIKADKTTAVANGKDAIKYTVKVMKNGQPVNNQSVTFSTNFGMFNGKSQTQATTGNDGRATITLTSSSAGKATVSATVSDGAEVKATEVTFFDELKIDNKVDIIGNNVRGELPNIWLQYGQFKLKASGGDGTYSWYSENTSIATVDASGKVTLNGKGSVVIKATSGDKQTVSYTIKAPSYMIKVDKQAYYADAMSICKNLLPSTQTVLSDIYDSWGAANKYSHYSSMNSITAWIKQTSSEQRSGVSSTYNLITQNPLPGVNVNTPNVYAVCVE

SEQ ID NO: 1964 - protein, 1364 aa, Escherichia coli
MNKVFSLKYSFLAKGFIAVSELARRVSVKGKLKSASSIIISPITIAIVSYAPPSLAATVNADISYQTFRDFAENKGAFIVGASNINIYDKNGVLVGVLDKAPMPDFSSATMNTGTLPPGDHTLYSPQYVVTAKHVNGSDIMSFGHIQNNYTVVGENNHNSLDIKIRRLNKIVTEVAPAEISSVGAVNGAYQEGGRFKAFYRLGGGLQYIKDKNGNLTPVYTNGGFLTGGTISALSSYNNGQMITAPTGDIFNPANGPLANYLNKGDSGSPLFAYDSLDKKWVLVGVLSSGSEHGNNWVVTTQDFLHQQPKHDFDKTISYDSEKGSLQWRYNKNSGVGTLSQESVVWDMHGKKGGDLNAGKNLQFTGNNGEIILHDSIDQGAGYLQFFDNYTVTSLTDQTWTGGGIITEKGVNVLWQVNGVNDDNLHKVGEGTLTVNGKGVNNGGLKVGDGTVILNQRPDDNGHKQAFSSINISSGRATVILSDANQVNPDKISWGYRGGTLDLNGNNVNFTRLQAADYGAIVSNNNKNKSELTLKLQTLNENDISVDVKTYEVFGGHGSPGDLYYVPASNTYFILKSKAYGPFFSDLDNTNVWQNVGHDRDKAIQIVKQQKIGESSQPYMFHGQLNGYMDVNIHPLSGKDVLTLDGSVNLPEGVITKKSGTLIFQGHPVIHAGMTTSAGQSDWENRQFTMDKLRLDAATFHLSRNAHMQGDISAANGSTVILGSSRVFTDKNDGTGNAVSSVEGSSIATTAGDQSYYSGNVLLENHSSLEVRENFTGGIEAYDSSVSVTSQNAIFDHVGSFVNSSLLLEKGAKLTAQSGIFTNNTMKIKENASLTLTGIPSVGKPGYYSPVTSTTEGIHLGERASLSVKNMGYLSSNITAENSAAIINLGDSNATIGKTDSPLFSTLMRGYNAVLQGNIMGPQSSVNMNNALWHSDRNSELKELKANDSQIELGVRGHFAKLRVKELIASNSVFLVHANNSQADQLNVTDKLQGSNNTILVDFFNKAANGTNVTLITAPKGSDENTFKAGTQQIGFSNITPEIRTENTDTATQWVLTGYQSVADARASKIATDFMDSGYKSFLTEVNNLNKRMGDLRDSQGDAGGWARIMNGTGSGESGYRDNYTHVQIGADRKHELNGIDLFTGALLTYTDNNASSQAFSGKTKSLGGGVYASGLFESGAYFDLIGKYLHHDNRYTLNFASLGERSYTSHSLYAGAEIGYRYHMSENTWVEPQMELVYGSVSGKSFNWKDQGMQLSMKDKDYHPLIGRTGVDVGRAFSGDTWKVTVRAGLGYQFDLLANGETVLQDASGKKHFKGEKDSRMLMNVGTNVEVKDNMRFGLELEKSAFGRYNIDNSINANFRYYF

SEQ ID NO: 1965 - protein, 162 aa, Escherichia coli
MKTILPAVLFAAFATTSAWAAESVQPLEKIAPYPQAEKGMKRQVIQLTPQEDESTLKVELLIGQTLEVDCNLHRLGGKLESKTLEGWGYDYYVFDKVSSPVSTMMACPDGKKEKKFVTAYLGDAGMLRYNSKLPIVVYTPDNVDVKYRVWKAEEKIDNAVVR

SEQ ID NO: 1966 - protein, 162 aa, Escherichia coli; identical to SEQ ID NO: 1965

SEQ ID NO: 1967 - protein, 162 aa, Escherichia coli
MKTILPAVLFAAFATTSAWAAESVQPLEKIAPYPQAEKGMKRQVIQLTPQEDESTLKVELLIGQTLEVDCNLHRLGGKLESKTLEGWGYDYYVFDKVSSPVSTMMACPDGKKEKKFVTAYLGDAGMLRYNSKLPIVVYTPDNVDVKYRIWKAEEKIDNAVVR

SEQ ID NO: 1968 - protein, 162 aa, Escherichia coli; identical to SEQ ID NO: 1965

SEQ ID NO: 1969 - protein, 162 aa, Escherichia coli
MKTILPAVLFAAFATTSAWAAESVQPLEKIAPYPQAEKGMKRQVIQLTPQEDESTLKVELLIGQTLEVDCNLHRLGGKLESKTLEGWGYDYYVFDKVSSPVSTMMACPDGKKEKKFVTAYLGDTGMLRYNSKLPIVVYTPDNVDVKYRVWKAEEKIDNAVVR

SEQ ID NO: 1970 - protein, 162 aa, Escherichia coli; identical to SEQ ID NO: 1969

SEQ ID NO: 1971 - protein, 162 aa, Escherichia coli; identical to SEQ ID NO: 1967

SEQ ID NO: 1972 - protein, 162 aa, Escherichia coli; identical to SEQ ID NO: 1965

SEQ ID NO: 1973 - protein, 162 aa, Escherichia coli
MKTILPAVLFAAFATTSAWAAESVQPLEKIAPYPQAEKGMKRQVIQLTPQEDESTLKVELLIGQTLEVDCNLHRLGGKLENKTLEGWGYDYYVFDKVSSPVSTMMACPDGKKEKKFVTAYLGDAGMLRYNSKLPIVVYTPDNVDVKYRVWKAEEKIDNAVVR

SEQ ID NO: 1974 - protein, 162 aa, Escherichia coli; identical to SEQ ID NO: 1973

SEQ ID NO: 1975 - protein, 162 aa, Escherichia coli; identical to SEQ ID NO: 1973

SEQ ID NO: 1976 - protein, 162 aa, Escherichia coli; identical to SEQ ID NO: 1973

SEQ ID NO: 1977 - protein, 162 aa, Escherichia coli; identical to SEQ ID NO: 1965

SEQ ID NO: 1978 - protein, 162 aa, Escherichia coli; identical to SEQ ID NO: 1965

SEQ ID NO: 1979 - protein, 162 aa, Escherichia coli; identical to SEQ ID NO: 1973

SEQ ID NO: 1980 - protein, 162 aa, Escherichia coli; identical to SEQ ID NO: 1973

SEQ ID NO: 1981 - protein, 162 aa, Escherichia coli; identical to SEQ ID NO: 1965

SEQ ID NO: 1982 - protein, 162 aa, Escherichia coli; identical to SEQ ID NO: 1965

SEQ ID NO: 1983 - protein, 162 aa, Escherichia coli; identical to SEQ ID NO: 1965

SEQ ID NO: 1984 - protein, 162 aa, Escherichia coli
MKTILPAVLFAAFATTSAWAAESVQPLEKIAPYPQAEKGMKRQVIQLTQQEDESTLKVELLIGQTLEVDCNLHRLGGKLESKTLEGWGYDYYVFDKVSSPVSTMMACPDGKKEKKFVTAYLGDAGMLRYNSKLPIVVYTPDNVDVKYRIWKAEEKIDNAVVR

SEQ ID NO: 1985 - protein, 246 aa, Escherichia coli
MFFNTKHTTALCFVTCMAFSSSSIADIVISGTRVIYKSDQKSVNVRLENKGNNPLLVQSWLDTGDDNAEPGSITVPFTATPPVSRIDAKRGQTIKLMYTASTSLPKDRESVFWFNVLEVPPKPDAEKVANQSLLQLAFRTRIKLFYRPDGLKGNPSEAPLALKWFWSGSEGKASLRVTNPTPYYVSFSSGDLEASGKRYPIDVKMIAPFSDEVMKVNGLNGKANSAKVHFYAINDFGGAIEGNARL

SEQ ID NO: 1986 - protein, 423 aa, Escherichia coli
MQYEDKNGVNEPSRRRLLKGIGALALAGSCPVAHAQKTQSAPGTLSPVARNEKQPFYGEHQAGILTPQQAAMMLVAFDVLASDKADLERLFRLLTQRFAFLTQGGAAPETPNPRLPPLDSGILGGYIAPDNLTITLSVGHSLFDERFGLAPQMPKKLQKMTRFPNDSLDAALCHGDVLLQICANTQDTVIHALRDIIKHTPDLLSVRWKREGFISDHAARSKGKETPINLLGFKDGTANPDSQNDKLMQKVVWVTADQQEPAWTIGGSYQAVRLIQFRVEFWDRTPLKEQQTIFGRDKQTGAPLGMQHEHDVPDYASDPEGKGIALDSHIRLANPRTAESESSLMLRRGYSYSLGVTNSGQLDMGLLFVCYQHDLEKGFLTVQKRLNGEALEEYVKPIGGGYFFALPGVKDANDYLGSALLRV

SEQ ID NO: 1987 - protein, 423 aa, Escherichia coli
MQYEDENGVNEPSRRRLLKGIGALALAGSCPVAHAQKTQSAPGTLSPDARNEKQPFYGEHQAGILTPQQAAMMLVAFDVLASDKADLERLFRLLTQRFAFLTQGGAAPETPNPRLPPLDSGILGGYIAPDNLTITLSVGHSLFDERFGLAPQMPKKLQKMTRFPNDSLDAALCHGDVLLQICANTQDTVIHALRDIIKHTPDLLSVRWKREGFISDHAARSKGKETPINLLGFKDGTANPDSQNDKLMQKVVWVTADQQEPAWTIGGSYQAVRLIQFRVEFWDRTPLKEQQTIFGRDKQTGAPLGMLHEHDVPDYASDPEGKVIALDSHIRLANPRTAESESSLMLRRGYSYSLGVTNSGQLDMGLLFVCYQHDLEKGFLTVQKRLNGEALEEYVKPIGGGYFFALSGVKDANDYLGSALLRV

SEQ ID NO: 1988 - protein, 423 aa, Escherichia coli
MQYEDENGVNEPSRRRLLKGIGALALAGSCPVAHAQKTQSAPGTLSPDARNEKQPFYGEHQAGILTPQQAAMMLVAFDVLASDKADLERLFRLLTQRFAFLTQGGAAPETPNPRLPPLDSGILGGYIAPDNLTITLSVGHSLFDERFGLAPQMPKKLQKMTRFPNDSLDAALCHGDVLLQICANTQDTVIHALRDIIKHTPDLLSVRWKREGFISDHAARSKGKETPINLLGFKDGTANPDSQNAKLMQKVVWVTADQQEPAWTIGGSYQAVRLIQFRVEFWDRTPLKEQQTIFGRDKQTGAPLGMLHEHDVPDYASDPEGKVIALDSHIRLANPRTAESESSLMLRRGYSYSLGVTNSGQLDMGLLFVCYQHDLEKGFLTVQKRLNGEALEEYVKPIGGGYFFALPGVKDANDYLGSALLRV

SEQ ID NO: 1989 - protein, 423 aa, Escherichia coli
MQYEDENGVNEPSRRRLLKGIGALALAGSCPVAHAQKTQSAPGTLSPDARNEKQPFYGEHQAGILTPQQAAMMLVAFDVLASDKADLERLFRLLTQRFAFLTQGGAAPETPNPRLPPLDSGILGGYIAPDNLTITLSVGHSLFDERFGLAPQMPKKLQKMTRFPNDSLDAALCHGDVLLQICANTQDTVIHALRDIIKHTPDLLSVRWKREGFISDHAARSKGKETPINLLGFKDGTANPDSQNDKLMQKVVWVTADQQEPAWTIGGSYQAVRLIQFRVEFWDRTPLKEQQTIFGRDKQTGAPLGMLHEHDVPDYASDPEGKVIALDSHIRLANPRTAESESSLMLRRGYSYSLGVTNSGQLDMGLLFVCYQHDLEKGFLTVQKRLNGEALEEYVKPIGGGYFFALPGVKDANDYLGSALLRV

SEQ ID NO: 1990 - protein, 423 aa, Escherichia coli
MQYKDENGVNEPSRRRLLKVIGALALAGSCPVAHAQKTQSAPGTLSPDARNEKQPFYGEHQAGILTPQQAAMMLVAFDVLASDKADLERLFRLLTQRFAFLTQGGAAPETPNPRLPPLDSGILGGYIAPDNLTITLSVGHSLFDERFGLAPQMPKKLQKMTRFPNDSLDAALCHGDVLLQICANTQDTVIHALRDIIKHTPDLLSVRWKREGFISDHAARSKGKETPINLLGFKDGTANPDSQNDKLMQKVVWVTADQQEPAWTIGGSYQAVRLIQFRVEFWDRTPLKEQQTIFGRDKQTGAPLGMQHEHDVPDYASDPEGKVIALDSHIRLANPRTAESESSLMLRRGYSYSLGVTNSGQLDMGLLFVCYQHDLEKGFLTVQKRLNGEALEEYVKPIGGGYFFALPGVKDANDYFGSALLRV

SEQ ID NO: 1991 - protein, 423 aa, Escherichia coli; identical to SEQ ID NO: 1989

SEQ ID NO: 1992 - protein, 375 aa, Escherichia coli
MTINFRRNALQLSVAALFSSAFMANAADVPQVKVTVTDKQCEPMTITVNAGKTQFIIQNHSQKALEWEILKGVMVVEERENIAPGFSQKMTANLQPGEYDMTCGLLTNPKGKLIVKGEATADAAQSDALLSLGGAITAYKAYVMAETTQLVTDTKAFTDAIKAGDIEKAKALYAPTRQHYERIEPIAELFSDLDGSIDAREDDYEQKAADPKFTGFHRLEKALFGDNTTKGMDQYADQLYTDVVDLQKRISELAFPPSKVVGGAAGLIEEVAASKISGEEDRYSHTDLWDFQANVEGSQKIVDLLRPQLQKANPELLAKVDANFKKVDTILAKYRTKDGFETYDKLTDADRNALKGPITALAEDLAQLRGVLGLD

SEQ ID NO: 1993 - protein, 375 aa, Escherichia coli
MTINFRRNALQLSVAALFSSAFMANAADIPQVKVTVTDKQCEPMTITVNAGKTQFIIQNHSQKALEWEILKGVMVVEERENIAPGFSQKMTANLQPGEYDMTCGLLTNPKGKLIVKGEATADAAQSDALLSLGGAITAYKAYVMAETTQLVTDTKAFTDAIKAGDIEKAKALYAPTRQHYERIEPIAELFSDLDGSIDAREDDYEQKAADPKFTGFHRLEKALFGDNTTKGMDKYADQLYTDVVDLQKRISELAFPPSKVVGGAAGLIEEVAASKISGEEDRYSHTDLWDFQANVEGSQKIVDLLRPQLQKANPELLAKVDANFKKVDTILAKYRTKDGFENYDKLTDADRNALKGPITALAEDLAQLRGVLGLD

SEQ ID NO: 1994 - protein, 375 aa, Escherichia coli
MTINFRRNALQVSVAALFSSAFMANAADIPQVKVTVTDKQCEPMTITVNAGKTQFIIQNHSQKALEWEILKGVMVVEERENIAPGFSQKMTANLQPGEYDMTCGLLTNPKGKLIVKGEATADAAQSDALLSLGGAITAYKAYVMAETTQLVTDTKAFTDAIKAGDIEKAKALYAPTRQHYERIEPIAELFSDLDGSIDAREDDYEQKAADPKFTGFHRLEKALFGDNTTKGMDKYADQLYTDVVDLQKRISELAFPPSKVVGGAAGLIEEVAASKISGEEDRYSHTDLWDFQANVEGSQKIVDLLRPQLQKANPELLAKVDANFKKVDTILAKYRTKDGFENYDKLTDADRNALKGPITALAEDLAQLRGVLGLD

SEQ ID NO: 1995 - protein, 375 aa, Escherichia coli
MTINFRRNALQLSVAALFSSAFMANAADIPQVKVTVTDKQCEPMIITVNAGKTQFIIQNHSQKALEWEILKGVMVVEERENIAPGFSQKMTANLQPGEYDMTCGLLTNPKGKLIVKGEATADAAQSDALLSLGGAITAYKAYVMAETTQLVTDTKAFTDAIKAGDIEKAKALYAPTRQHYERIEPIAELFSDLDGSIDAREDDYEQKAADPKFTGFHRLEKALFGDNTTKGMDKYADQLYTDVVDLQKRISELAFPPSKVVGGAAGLIEEVAASKISGEEDRYSHTDLWDFQANVEGSQKIVDLLRPQLQKANPELLAKVDANFKKVDTILAKYRTKDGFENYDKLTDADRNALKGPITALAEDLAQLRGVLGLD

SEQ ID NO: 1996 - protein, 375 aa, Escherichia coli
MTINFRRNALQLSVAALFSSAFMANAADVPQVKVTVTDKQCEPMTITVNAGKTQFIIQNHSQKALEWEILKGVMVVEERENIAPGFSQKMTANLQPGEYDMTCGLLTNPKGKLIVKGEATADAAQSDALLSLGGAITAYKAYVMAETTQLVTDTKAFTDAIKAGDIEKAKALYAPTRQHYERIEPIAELFSDLDGSIDAREDDYEQKAADPKFTGFHRLEKALFGDNTTKGMDQYAEQLYTDVVDLQKRISELAFPPSKVVGGAAGLIEEVAASKISGEEDRYSHTDLWDFQANVEGSQKIVDLLRPQLQKANPELLAKVDANFKKVDTILAKYRTKDGFETYDKLTDADRNALKGPITALAEDLAQLRGVLGLD

SEQ ID NO: 1997 - protein, 375 aa, Escherichia coli; identical to SEQ ID NO: 1993

SEQ ID NO: 1998 - protein, 258 aa, Escherichia coli
MKNITFIFFILLASPLYANGDKLYRADSRPPDEIKRSGGLMPRGHNEYFDRGTQMNINLYDHARGTQTGFVRYDDGYVSTSLSLRSAHLAGQSILSGYSTYYIYVIATAPNMFNVNDVLGVYSPHPYEQEVSALGGIPYSQIYGWYRVNFGVIDERLHRNREYRDRYYRNLNIAPAEDGYRLAGFPPDHQAWREEPWIHHAPQGCGNSSRTITGDTCNEETQNLSTIYLRKYQSKVKRQIFSDYQSEVDIYNRIRNEL

SEQ ID NO: 1999 - protein, 258 aa, Escherichia coli
MKNITFIFFILLASPLYANGDRLYRADSRPPDEIKRSGGLMPRGHNEYFDRGTQMNINLYDHARGTQTGFVRYDDGYVSTSLSLRSAHLAGQSILSGYSTYYIYVIATAPNMFNVNDVLGVYSPHPYEQEVSALGGIPYSQIYGWYRVNFGVIDERLHRNREYRDRYYRNLNIAPAEDGYRLAGFPPDHQAWREEPWIHHAPQGCGNSSRTITGDTCNEETQNLSTIYLREYQSKVKRQIFSDYQSEVDIYNRIRDEL

SEQ ID NO: 2000 - protein, 124 aa, Escherichia coli
MNKVKCYVLFTALLSSLCAYGAPQSITELCSEYRNTQIYTINDKILSYTESMAGKREMVIITFKSGATFQVEVPGSQHIDSQKKAIERMKDTLRITYLTETKIDKLCVWNNKTPNSIAAISMEN

SEQ ID NO: 2001 - protein, 124 aa, Escherichia coli
MNKVKFYVLFTALLSSLCAHGAPQSITELCSEYHNTQIYTINDKILSYTESMAGKREMVIITFKSGATFQVEVPGSQHIDSQKKAIERMKDTLRITYLTETKIDKLCVWNNKTPNSIAAISMEN

SEQ ID NO: 2002 - protein, 124 aa, Escherichia coli
MNKVKCYVLFTALLSSLYAHGAPQTITELCSEYRNTQIYTINDKILSYTESMAGKREMVIITFKSGETFQVEVPGSQHIDSQKKAIERMKDTLRITYLTETKIDKLCVWNNKTPNSIAAISMKN

SEQ ID NO: 2003 - protein, 866 aa, Escherichia coli
MYRTHRQHSLLSSGGVPSFIGGLVVFVSAAFNAQAETWFDPAFFKDDPSMVADLSRFEKGQKITPGVYRVDIVLNQTIVDTRNVNFVEITPEKGIAACLTTESLDAMGVNTDAFPAFKQLDKQACAPLAEIIPDASVTFNVNKLRLEISVPQIAIKSNARGYVPPERWDEGINALLLGYSFSGANSIHSSADSDSGDSYFLNLNSGVNLGPWRLRNNSTWSRSSGQTAEWKNLSSYLQRAVIPLKGELTVGDDYTAGDFFDSVSFRGVQLASDDNMLPDSLKGFAPVVRGIAKSNAQITIKQNGYTIYQTYVSPGAFEISDIYSTSSSGDLLVEIKEADGSVNSYSVPFSSVPLLQRQGRIKYAVTLAKYRTNSNEQQESKFAQATLQWGGPWGTTWYGGGQYAEYYRAAMFGLGFNLGDFGAISFDVTQAKSTLADQSEHKGQSYRFLYAKTLNQLGTNFQLMGYRYSTSGFYTLSDTMYKHMDGYEFNDGDDEDTPMWSRYYNLFYTKRGKLQVNISQQLSEYGSFYLSGSQQTYWHTDQQDRLLQFGYNTQIKDLSLGISWNYSKSRGQPDADQVFALNFSLPLNLLLSRSNDSYTSKKNYAWMTSNTSIDNEGHTTQNLGLTETLLDDGNLSYSVQQGYNSEGKTANGSASMDYKGVFADARVGYNYSDNGSQQQLNYALSGSLVAHSQGITLGQSLGETNVLIAAPGAENTRVANSTGLKTDWRGYTVVPYATSYRENRIALDAASLKRNVDLENAVVNVVPTKGALVLAEFNAHAGARVLMKTSKQGISLRFGAIATLDGVQTNSGIIDDDGSLYMAGLPAKGTITVRWGEAPDQICHISYELTEQQINSAITRMDAICR

SEQ ID NO: 2004 - protein, 866 aa, Escherichia coli
MYRTHRQHSLLSSGGVPSFIGGLVVFVSAAFNAQAETWFDPAFFKDDPSMVADLSRFEKGQKITPGVYRVDIVLNQTIVDTRNVNFVEITPEKGIAACLTTESLDAMGVNTDAFPAFKQLDKQACVPLAEIIPDASVTFNVNKLRLEISVPQIAIKSNARGYVPPERWDEGINALLLGYSFSGANSIHSSADSDSGDSYFLNLNSGVNLGPWRLRNNSTWSRSSGQTAEWKNLSSYLQRAVIPLKGELTVGDDYTAGDFFDSVSFRGVQLASDDNMLPDSLKGFAPVVRGIAKSNAQITIKQNGYTIYQTYVSPGAFEISDLYSTSSSGDLLVEIKEADGSVNSYSVPFSSVPLLQRQGRIKYAVTLAKYRTNSNEQQESKFAQATLQWGGPWGTTWYGGGQYAEYYRAAMFGLGFNLGDFGAISFDATQAKSTLADQSEHKGQSYRFLYAKTLNHLGTNFQLMGYRYSTSGFYTLSDTMYKHMDGYEFNDGDDEDTPMWSRYYNLFYTKRGKLQVNISQQLGEYGSFYLSGSQQTYWHTDQQDRLLQFGYNTQIKDLSLGISWNYSKSRGQPDADQVFALNFSLPLNLLLPRSNDSYTRKKNYAWMTSNTSIDNEGHTTQNLGLTETLLDDGNLSYSVQQGYNSEGKTANGSASMDYKGAFADARVGYNYSDNGSQQQLNYALSGSLVAHSQGITLGQSLGETNVLIAAPGAENTRVANSTGLKTDWRGYTVVPYATSYRENRIALDAASLKRNVDLENAVVNVVPTKGALVLAEFNAHAGARVLMKTSKQGIPLRFGAIATLDGVQANSGIIDDDGSLYMAGLPAKGTISVRWGEAPDQICHINYELTEQQINSAITRMDAICR

SEQ ID NO: 2005 - protein, 233 aa, Escherichia coli
MKTCITKGIVTVSLTAILLSCSSTWAAGKGGVGLAATRLVYSEGEEQISLGVRNTSPDVPYLIQSWVMTPDNKKSADFIITPPLFVLNPANENLLRIMYIGAPLAKDRETLFFTSVRAVPSTTKREEGNTLKIATQSVIKLFWRPKGLAYPLGEAPAKLRCTSSADMVTVSNPTPYFITLTDLKIGGKLVKNQMISPFDKYQFSLPKGAKNSSVTYRTINDYGAETPQLNCKS

SEQ ID NO: 2006 - protein, 233 aa, Escherichia coli
MKTCITKGIVTVSLTAILLSCSSAWAAGKGGIGLAATRLVYSEGEEQISLGVRNTSPDVPYLIQSWVMTPDNKKSADFIITPPLFVLNPANENLLRIMYIGAPLAKDRETLFFTSVRAVPSTTKRKEGNTLKIATQSVIKLFWRPKGLAYPLGEAPAKLRCTSSADMVTVSNPTPYFITLTDLKIGGKVVKNQMISPFDKYQFSLPKGAKNSSVTYRTINDYGAETPQLNCKS

SEQ ID NO: 2007 - protein, 203 aa, Escherichia coli
MKLRWFAFLIVLLAGCSSKHDYTNPPWNAKVPVQRAMQWMPISQKAGAAWGVDPQLITAIIAIESGGNPNAVSKSNAIGLMQIKASTSGRDVYRRMGWSGEPTTSELKNPERNISMGAAYLNILETGPLAGIEDPKVLQYALVVSYANGAGALLRTFSSDRKKAISKINDLDADEFLEHVARNHPAPQAPRYIYKLEQALDAM

SEQ ID NO: 2008 - protein, 203 aa, Escherichia coli
MKLRWFAFLIVLLAGCSSKHDYTNPPWNAKVPVQRAMQWMPISQKAGAAWGVDPQLITAIIAIESGGNPNAVSKSNAIGLMQIKASTSGRDVYRRMGWSGEPTTSELKNPERNISMGAAYLNILETGPLAGIEDPKVLQYALVVSYANGAGALLRTFSSDRKKAISKINDLDADEFLDHVARNHPAPQAPRYIYKLEQALDAM

SEQ ID NO: 2009 - protein, 203 aa, Escherichia coli
MKLRWFAFLIVLLAGCSSKHDYTNPPWNAKVPVQRAMQWMPISQKAGAAWGVDPQLITAIIAIESGGNPNAVSKSNAIGLMQLKASTSGRDVYRRMGWSGEPTTSELKNPERNISMGAAYLNILETGPLAGIEDPKVLQYALVVSYANGAGALLRTFSSDRKKAISKINDLDADEFLDHVARNHPAPQAPRYIYKLEQALDAM

SEQ ID NO: 2010 - protein, 203 aa, Escherichia coli; identical to SEQ ID NO: 2009

SEQ ID NO: 2011 - protein, 203 aa, Escherichia coli; identical to SEQ ID NO: 2009

SEQ ID NO: 2012 - protein, 203 aa, Escherichia coli; identical to SEQ ID NO: 2008

SEQ ID NO: 2013 - protein, 203 aa, Escherichia coli; identical to SEQ ID NO: 2008

SEQ ID NO: 2014 - protein, 203 aa, Escherichia coli; identical to SEQ ID NO: 2009

SEQ ID NO: 2015 - protein, 203 aa, Escherichia coli
MKLRWFAFLIVLLAGCSSKHDYTNPPWNAKVPVQRAMQWMPISQKAGAAWGVDPQLITAIIAIESGGNPNAVSKSNAIGLMQLKASTSGRDVYRRMGWSGEPTTSELKNPERNISMGAAYLNILETGPLAGIEDPKVLQYALVVSYANGAGALLRTFSSDRKKAISKINDLDADEFLEHVARNHPAPQAPRYIYKLEQALDAM

SEQ ID NO: 2016 - protein, 203 aa, Escherichia coli; identical to SEQ ID NO: 2015

SEQ ID NO: 2017 - protein, 203 aa, Escherichia coli; identical to SEQ ID NO: 2008

SEQ ID NO: 2018 - protein, 203 aa, Escherichia coli; identical to SEQ ID NO: 2008

SEQ ID NO: 2019 - protein, 203 aa, Escherichia coli; identical to SEQ ID NO: 2008

SEQ ID NO: 2020 - protein, 203 aa, Escherichia coli; identical to SEQ ID NO: 2015

SEQ ID NO: 2021 - protein, 203 aa, Escherichia coli; identical to SEQ ID NO: 2015

SEQ ID NO: 2022 - protein, 203 aa, Escherichia coli; identical to SEQ ID NO: 2009

SEQ ID NO: 2023 - protein, 203 aa, Escherichia coli; identical to SEQ ID NO: 2008

SEQ ID NO: 2024 - protein, 203 aa, Escherichia coli; identical to SEQ ID NO: 2008

SEQ ID NO: 2025 - protein, 235 aa, Escherichia coli
MYRYLSIAAVVLSAAFSGPALAEGINSFSQAKAAAVKVHADAPGTFYCGCKINWQGKKGVVDLQSCGYQVRKNENRASRVEWEHVVPAWQFGHQRQCWQDGGRKNCAKDPVYRKMESDMHNLQPSVGEVNGDRGNFMYSQWNGGEGQYGQCAMKVDFKEKAAEPPARARGAIARTYFYMRDQYNLTLSRQQTQLFNAWNKMYPVTDWECERDERIAKVQGNHNPYVQRACQARKS

SEQ ID NO: 2026 - protein, 432 aa, Escherichia coli
MSKIVKIIGREIIDSRGNPTVEAEVHLEGGFVGMAAAPSGASTGSREALELRDGDKSRFLGKGVTKAVAAVNGPIAQALIGKDAKDQAGIDKIMIDLDGTENKSKFGANAILAVSLANAKAAAAAKGMPLYEHIAELNGTPGKYSMPVPMMNIINGGEHADNNVDIQEFMIQPVGAKTVKEAIRMGSEVFHHLAKVLKAKGMNTAVGDEGGYAPNLGSNAEALAVIAEAVKAAGYELGKDITLAMDCAASEFYKDGKYVLAGEGNKAFTSEEFTHFLEELTKQYPIVSIEDGLDESDWDGFAYQTKVLGDKIQLVGDDLFVTNTKILKEGIEKGIANSILIKFNQIGSLTETLAAIKMAKDAGYTAVISHRSGETEDATIADLAVGTAAGQIKTGSMSRSDRVAKYNQLIRIEEALGEKAPYNGRKEIKGQA

SEQ ID NO: 2027 - protein, 432 aa, Escherichia coli; identical to SEQ ID NO: 2026

SEQ ID NO: 2028 - protein, 432 aa, Escherichia coli; identical to SEQ ID NO: 2026

SEQ ID NO: 2029 - protein, 432 aa, Escherichia coli; identical to SEQ ID NO: 2026

SEQ ID NO: 2030 - protein, 432 aa, Escherichia coli; identical to SEQ ID NO: 2026

SEQ ID NO: 2031 - protein, 432 aa, Escherichia coli; identical to SEQ ID NO: 2026

SEQ ID NO: 2032 - protein, 432 aa, Escherichia coli; identical to SEQ ID NO: 2026

SEQ ID NO: 2033 - protein, 432 aa, Escherichia coli; identical to SEQ ID NO: 2026

SEQ ID NO: 2034 - protein, 432 aa, Escherichia coli; identical to SEQ ID NO: 2026

SEQ ID NO: 2035 - protein, 432 aa, Escherichia coli; identical to SEQ ID NO: 2026

SEQ ID NO: 2036 - protein, 432 aa, Escherichia coli; identical to SEQ ID NO: 2026

SEQ ID NO: 2037 - protein, 432 aa, Escherichia coli; identical to SEQ ID NO: 2026

SEQ ID NO: 2038 - protein, 432 aa, Escherichia coli; identical to SEQ ID NO: 2026

SEQ ID NO: 2039 - protein, 432 aa, Escherichia coli; identical to SEQ ID NO: 2026

SEQ ID NO: 2040 - protein, 432 aa, Escherichia coli; identical to SEQ ID NO: 2026

SEQ ID NO: 2041 - protein, 432 aa, Escherichia coli; identical to SEQ ID NO: 2026

SEQ ID NO: 2042 - protein, 432 aa, Escherichia coli; identical to SEQ ID NO: 2026

SEQ ID NO: 2043 - protein, 432 aa, Escherichia coli; identical to SEQ ID NO: 2026

SEQ ID NO: 2044 - protein, 432 aa, Escherichia coli; identical to SEQ ID NO: 2026

SEQ ID NO: 2045 - protein, 432 aa, Escherichia coli; identical to SEQ ID NO: 2026

SEQ ID NO: 2046 - protein, 432 aa, Escherichia coli; identical to SEQ ID NO: 2026

SEQ ID NO: 2047 - protein, 419 aa, Escherichia coli
MTRAVKPRRFAIRPIIYASVLSAGVLLCAFSAHADERDQLKSIQADIAAKERAVRQKQQQRASLLAQLKKQEEAISEATRKLRETQNTLNQLNKQIDEMNASIAKLEQQKAAQERSLAAQLDAAFRQGEHTGIQLILSGEESQRGQRLQAYFGYLNQARQETIAQLKQTREEVAMQRAELEEKQSEQQTLLYEQRAQQAKLTQALNERKKTLAGLESSIQQGQQQLSELRANESRLRNSIARAEAAAKARAEREAREAQAVRDRQKEATRKGTTYKPTESEKSLMSRTGGLGAPRGQAFWPVRGPTLHRYGEQLQGELRWKGMVIGASEGTEVKAIADGRVILADWLQGYGLVVVVEHGKGDMSLYGYNQSALVSVGSQVRAGQPIALVGSSGGQGRPSLYFEIRRQGQAVNPQPWLGR

SEQ ID NO: 2048 - protein, 310 aa, Escherichia coli
MRRVNILCSFALLFASHTSLAVTYPLPPEGSRLVGQSFTVTVPDHNTQPLETFAAQYGQGLSNMLEANPGADVFLPKSGSQLTIPQQLILPDTVRKGIVVNVAEMRLYYYPPDSNTVEVFPIGIGQAGRETPRNWVTTVERKQEAPTWTPTPNTRREYAKRGESLPAFVPAGPDNPMGLYAIYIGRLYAIHGTNANFGIGLRVSQGCIRLRNDDIKYLFDNVPVGTRVQIIDQPVKYTTEPDGSNWLEVHEPLSRNRAEYESDRKVPLPVTPSLRAFINGQEVDVNRANAALQRRSGMPVQISSGSRQMF

SEQ ID NO: 2049 - protein, 337 aa, Escherichia coli
MINNVSSLFPTVNRNITAVYKKSSFSVSPQKITLNPVKISSPFSPSSSSISATTLFRAPNAHSASFHRQSTAESSLHQQLPNVRQRLIQHLAEHGIKPARSMAEHIPPAPNWPAPPPPVQNEQSRPLPDVAQRLVQHLAEHGIQPARNMAEHIPPAPNWPAPPLPVQNEQSRPLPDVAQRLVQHLAEHGIQPARSMAEHIPPAPNWPAPPPPVQNEQSRPLPDVAQRLMQHLAEHGIQPARNMAEHIPPAPNWPAPTPPVQNEQSRPLPDVAQRLMQHLAEHGIQPARNMAEHIPPAPNWPAPTPPVQNEQSRPLPDVAQRLMQHLAEHGINTSKRS

SEQ ID NO: 2050 - protein, 337 aa, Escherichia coli; identical to SEQ ID NO: 2049

SEQ ID NO: 2051 - protein, 1305 aa, Escherichia coli
MNKIYALKYCHATGGLIAVSELASRVMKKAARGSLLALFNLSLYGAFLSASQAAQLNIDNVWARDYLDLAQNKGVFKAGATNVSIQLKNGQTFNFPNVPIPDFSPASNKGATTSIGGAYSVTATHNGTTHHAISTQNWGQSSYKYIDRMTNGDFAVTRLDKFVVETTGVKNSVDFSLNSHDALERYGVEINGEKKIIGFRVGAGTTYTVQNGNTYSTGQVYNPLLLSASMFQLNWDNKRPYNNTTPFYNETTGGDSGSGFYLYDNVKKEWVMLGTLFGIASSGADVWSILNQYDENTVNGLKNKFTQKVQLNNNTMSLNSDSFTLAGNNTAVEKNNNNYKDLSFSGGGSINFDNDVNIGSGGLIFDAGHHYTVTGNNKTFKGAGLDIGDNTTVDWNVKGVVGDNLHKIGAGTLNVNVSQGNNLKTGDGLVVLNSANAFDNIYMASGHGVVKINHSAALNQNNDYRGIFFTENGGTLDLNGYDQSFNKIAATDIGALITNSAVQKAVLSVNNQSNYMYHGSVSGNTEINHQFDTQKNNSRLILDGNVDITNDINIKNSQLTMQGHATSHAVFREGGVTCMLPGVICEKDYVSGIQQQENSANKNNNTDYKTNNQVSSFEQPDWENRLFKFKTLNLINSDFIVGRNAIVVGDISANNSTLSLSGKDTKVHIDMYDGKNITGDGFGFRQDIKDGVSVSPESSSYFGNVTLNNHSLLDIGNKFTGGIEAYDSSVSVTSQNAVFDRVGSFVNSSLTLEKGAKLTAQGGIFSTGAVDVKENASLILTGTPSAQKQEYYSPVISTTEGINLGDKASLSVKNMGYLSSDIHAGTTAATINLGDGDAETDSPLFSSLMKGYNAVLSGNITGEQSTVNMNNALWYSDGNSTIGTLKSTGGRVELGGGKDFATLRVKELNANNATFLMHTNNSQADQLNVTNKLLGSNNTVLVDFLNKPASEMNVTLITAPKGSDEKTFTAGTQQIGFSNVTPVISTEKTDDATKWMLTGYQTVSDAGASKTATDFMASGYKSFLTEVNNLNKRMGDLRDTQGDAGVWARIMNGTGSADGGYSDNYTHVQIGADRKHELDGVDLFTGALLTYTDSNASSHAFSGKTKSVGGGLYASALFDSGAYFDLIGKYLHHDNQYTASFASLGTKDYSSHSWYAGAEVGYRYHLSEESWVEPQMELVYGSVSGKSFSWEDRGMALSMKDKDYNPLIGRTGVDVGRTFSGDDWKITARAGLGYQFDLLANGETVLRDASGEKRFEGEKDSRMLMNVGMNAEIKDNMRFGLELEKSAFGKYNVDNAINANFRYSF

SEQ ID NO: 2052 - protein, 384 aa, Escherichia coli
  MOD_RES (97)..(97): Any amino acid
  MOD_RES (205)..(205): Any amino acid
  MOD_RES (207)..(207): Any amino acid
  MOD_RES (276)..(276): Any amino acid
  MOD_RES (304)..(305): Any amino acid
  MOD_RES (308)..(308): Any amino acid
  MOD_RES (316)..(316): Any amino acid
  MOD_RES (320)..(320): Any amino acid
  MOD_RES (348)..(348): Any amino acid
MINNVSSLFPTVNRNITAVYKKSSFSVSPQKITLNPVKISSPFSPSSSSISATTLFRAPNAHSASFHRQSTAESSLHQQLPNVRQRLIQHLAEHGIXPARSMAEHIPPAPKWPAPPPPVQNEQSRPLPDVAQRLMQHLAEHGIQPARNMAEHIPPAPNWPAPTPPVQNEQSRPLPDVAQRLMQHLAEHGIQPARNMAEHIPPAPXWXAPTPPVQNEQSRPLPDVAQRLMQHLAEHGIZPARSMAEHIPPAPNWPAPPPPVQNEQSRPLPDVAQRLXQHLAEHGIQPARNMAEHIPPAPNWPAPXXPVXNEQSRPLXDVAXRLMQHLAEHGIQPARNMAEHIPPAPNWXAPTPPVQNEQSRPLPDVAQRLMQHLAEHGINTSKRS

SEQ ID NO: 2053 - protein, 337 aa, Escherichia coli; identical to SEQ ID NO: 2049

SEQ ID NO: 2054 - protein, 1300 aa, Escherichia coli
MNKIYSLKYSHITGGLIAVSELSGRVSSRATGKKKHKRILALCFLGLLQSSYSFASQMDISNFYIRDYMDFAQNKGIFQAGATNIEIVKKDGSTLKLPEVPFPDFSPVANKGSTTSIGGAYSITATHNTKNHHSVATQNWGNSTYKQTDWNTSHPDFAVSRLDKFVVETRGATEGADISLSKQQALERYGVNYKGEKKLIAFRAGSGVVSVKKNGRITPFNEVSYKPEMLNGSFVHIDDWSGWLILTNNQFDEFNNIASQGDSGSALFVYDNQKKKWVVAGTVWGIYNYANGKNHAAYSKWNQTTIDNLKNKYSYNVDMSGAQVATIENGKLTGTGSDTTDIKNKDLIFTGGGDILLKSSFDNGAGGLVFNDKKTYRVNGDDFTFKGAGVDTRNGSTVEWNIRYDNKDNLHKIGDGTLDVRKTQNTNLKTGEGLVILGAEKTFNNIYITSGDGTVRLNAENALSGGEYNGIFFAKNGGTLDLNGYNQSFNKIAATDSGAVITNTSTKKSILSLNNTADYIYHGNINGNLDVLQHHETKKENRRLILDGGVDTTNDISLRNTQLSMQGHATEHAIYRDGAFSCSLPAPMRFLCGSDYVAGMQNTEADAVKQNGNAYKTNNAVSDLSQPDWETGTFRFGTLHLENSDFSVGRNANVIGDIQASKSNITIGDTTAYIDLHAGKNITGDGFGFRQNIVRGNSQGETLFTGGITAEDSTIVIKDKAKALFSNYVYLLNTKATIENGADVTTQSGMFSTSDISISGNLSMTGNPDKDNKFEPSIYLNDASYLLTDDSARLVAKNKASVVGDIHSTKSASIMFGHDESDLSQLSDRTSKGLALGLLGGFDVSYRGSVNAPSASATMNNTWWQLTGDSALKTLKSTNSMVYFTDSANNKKFHTLTVDELATSNSAYAMRTNLSESDKLEVKKHLSGENNILLVDFLQKPTPEKQLNIELVSAPKDTNENVFKASKQTIGFSDVTPVITTRETDDKITWSLTGYNTVANKEATRNAAALFSVDYKAFLNEVNNLNKRMGDLRDINGEAGAWARIMSGTGSASGGFSDNYTHVQVGVDKKHELDGLDLFTGFTVTHTDSSASADVFSGKTKSVGAGLYASAMFDSGAYIDLIGKYVHHDNEYTATFAGLGTRDYSTHSWYAGAEAGYRYHVTEDAWIEPQAELVYGSVSGKQFAWKDQGMHLSMKDKDYNPLIGRTGVDVGKSFSGKDWKVTARAGLGYQFDLLANGETVLRDASGEKRIKGEKDSRMLMSVGLNAEIRDNVRFGLEFEKSAFGKYNVDNAVNANFRYSF

SEQ ID NO: 2055 - protein, 1300 aa, Escherichia coli
MNKIYSLKYSHITGGLIAVSELSGRVSSRATGKKKHKRILALCFLGLLQSSYSFASQMDISNFYIRDYMDFAQNKGIFQAGATNIEIVKKDGSTLKLPEVPFPDFSPVANKGSTTSIGGAYSITATHNTKNHHSVATQNWGNSTYKQTDWNTSHPDFAVSRLDKFVVETRGATEGADISLSKQQALERYGVNYKGEKKLIAFRAGSGVVSVKKNGRITPFNEVSYKPEMLNGSFVHIDDWSGWLILTNNQFDEFNNIASQGDSGSALFVYDNQKKKWVVAGTVWGIYNYANGKNHAAYSKWNQTTIDNLKNKYSYNVDMSGAQVATIENGKLTGTGSDTTDIKNKDLIFTGGGDILLKSSFDNGAGGLVFNDKKTYRVNGDDFTFKGAGVDTRNGSTVEWNIRYDNKDNLHKIGDGTLDVRKTQNTNLKTGEGLVILGAEKTFNNIYITSGDGTVRLNAENALSGGEYNGIFFAKNGGTLDLNGYNQSFNKIAATDSGAVITNTSTKKSILSLNNTADYIYHGNINGNLDVLQHHETKKENRRLILDGGVDTTNDISLRNTQLSMQGHATEHAIYRDGAFSCSLPAPMRFLCGSDYVAGMQNTEADAVKQNGNAYKTNNAVSDLSQPDWETGTFRFGTLHLENSDFSVGRNANVIGDIQASKSNITIGDTTAYIDLHAGKNITGDGFGFRQNIVRGNSQGETLFTGGITAEDSTIVIKDKAKALFSNYVYLLNTKATIENGADVTTQSGMFSTSDISISGNLSMTGNPDKDNKFEPSIYLNDASYLLTDDSARLVAKNKASVVGDIHSTKSASIMFGHDESDLSQLSDRTSKGLALGLLGGFDVSYRGSVNAPSASATMNNTWWQLTGDSALKTLKSTNSMVYFTDSANNKKFHTLTVDELATSNSAYAMRTNLSESDKLEVKKHLSGENNILLVDFLQKPTPEKQLNIELVSAPKDTNENVFKASKQTIGFSDVTPVITTRETDDKITWSLTGYNTVANKEATRNAAALFSVDYKAFLNEVNNLNKRMGDLRDINGEAGAWARIMSGTGSASGGFSDNYTHVQVGVDKKHELDGLDLFTGFTVTHTDSSASADVFSGKTKSVGAGLYASAMVDSGAYIDLIGKYVHHDNEYTATFAGLGTRDYSTHSWYAGAEAGYRYHVTEDAWIEPQAELVYGSVSGKQFAWKDQGMHLSMKDKDYNPLIGRTGVDVGKSFSGKDWKVTARAGLGYQFDLLANGETVLRDASGEKRIKGEKDSRMLMSVGLNAEIRDNVRFGLEFEKSAFGKYNVDNAVNANFRYSF

SEQ ID NO: 2056 - protein, 446 aa, Escherichia coli
MSQKTLFTKSALAVAVALISTQAWSAGFQLNEFSSSGLGRAYSGEGAIADDAGNVSRNPALITMFDRPTFSAGAVYIDPDVNISGTSPSGRSLKADNIAPTAWVPNMHFVAPINDQFGWGASITSNYGLATEFNDTYAGGSVGGTTDLETMNLNLSGAYRLNNAWSFGLGFNAVYARAKIERFAGDLGQLVAGQIMQSPAGKTPQGQALAATANGIDSNTKIAHLNGNQWGFGWNAGILYELDKNNRYALTYRSEVKIDFKGNYSSDLNRVFNNYGLPIPTATGGATQSGYLTLNLPEMWEVSGYNRVDPQWAIHYSLAYTSWSQFQQLKATSTSGDTLFQKHEGFKDAYRIALGTTYYYDDNWTFRTGIAFDDSPVPAQNRSISIPDQDRFWLSAGTTYAFNKDASVDVGVSYMHGQSVKINEGPYQFESEGKAWLFGTNFNYAF

SEQ ID NO: 2057 - protein, 446 aa, Escherichia coli
MSQKTLFTKSALAVAVALISTQAWSAGFQLNEFSSSGLGRAYSGEGAIADDAGNVSRNPALITMFDRPTFSAGAVYIDPDVDITGHSDLTGQSANAKNIAPTAWVPNLHFVAPINDQFGWGASITSNYGLATEFTDNYAAGIYGGKTDLQTINLNLSGAYRLNNSWSFGLGFDAVYAKAKIERYAGSLGPLLSQQLIAQGVPASLTNGINTPDSQIAHLKGDEWGFGWNAGILYELDKDNRWGLTYRSEVKIDFDGDYKSSINPNLNNILGNMGLPYGTMGATQNGSLTLNLPEMWEISGYNRVAPQWAIHYSMAYTSWSQFQELKAKGDSGQTLFYKDEGFRDAYRIALGTTYYYDKNWTFRTGIAYDDSPVPADKRSISIPDQDRLWLSAGLTYAFNEDASIDVGASYMHGQKVKFTEGEGAAAYSFESEGKAWLFGTNFNYAF

SEQ ID NO: 2058 - protein, 446 aa, Escherichia coli
MSQKTLFTKSALAVAVALISTQAWSAGFQLNEFSSSGLGRAYSGEGAIADDAGNVSRNPALITMFDRPTFSAGAVYIDPDVNISGTSPSGRSLKADNIAPTAWVPNMHFVAPINDQFGWGASITSNYGLATEFNDTYAGGSVGGTTDLETMNLNLSGAYRLNNAWSFGLGFNAVYARAKIERFAGDLGQLVAGQIMQSPAGQTQQGQALAATANGIDSNTKIAHLNGNQWGFGWNAGILYELDKNNRYALTYRSEVKIDFKGNYSSDLNRAFNNYGLPIPTATGGATQSGYLTLNLPEMWEVSGYNRVDPQWAIHYSLAYTSWSQFQQLKATSTSGDTLFQKHEGFKDAYRIALGTTYYYDDNWTFRTGIAFDDSPVPAQNRSISIPDQDRFWLSAGTTYAFNKDASVDVGVSYMHGQSVKINEGPYQFESEGKAWLFGTNFNYAF

SEQ ID NO: 2059 - protein, 812 aa, Escherichia coli
MKKYVTTKSVQPVAFRLTTLSLVMSAVLGSASVIAGEKLDMSFIQGGGGVNPEVWAALNGSYAPGRYLVDLSLNGKEAGKQILDVTPQDSNELCLTEAWLTKAGVYVSADYFREGYDATRQCYVLTKAPSVKVDFDVSTQSLALSIPQKGLVKMPENVDWDYGTSAFRVNYNANANTGRNNTSAFGSADLKANIGHWVVSSSATASGGDSGDNSTTINMFTATRAIRALSADLAVGKTSTGDSLLGSTGTYGVSLSRNNSMKPGNLGYTPVFSGIANGPSRVTLTQNGRLLHSEMVPAGPFSITDVPLYTSGDVTMKITGEDGRDEVQNFPLSVMAGQLSPGQHEFSVAAGLPDDDSDLKGGVFAASYGYGLDGLTLRAGGVFNQDWQGASAGVVAGLGYLGAVSADGAYATAKYRDGSHSGNKVQLSWSKQLETTNTGLRVSWSRQSEEYEGMSSFDPTELWSQSNHGRRTKDEWNAGISQPVGGLFSLSVSGWQRSYYPASMTGSYRYSDDNGKETGITGSLSTQIKGVSLNLGWSGSRNSRGENNWSASASVSVPFTLFDRRYSSSASVSTSKGGGTGFSTGVSGSLNDRFSYGLGGGRDGDGGTSSYLNASYSGDRAYLNGVLNHSQSGGTSGSVSVSGSVLAVPAAKDIMFSRTTGDTVAVVNVKDTPGVKVTSGDGQTDSDGNLVVPLNSYDWNTVTIDTGTLPLSTELTNTSQKVVPTDKAVVWMPFDALKVKRYLLQVKQRDGEFVPGGTWARDSKNTPLGFVANNGVLMINTVDAPGDITLGQCRIPAARLQDTEKLQEITCE

SEQ ID NO: 2060 - protein, 258 aa, Escherichia coli
MSKRNAVTTFFTNRVTKALGMTLALMMTCQSAMASLAVDQTRYIFRGDKDALTITVTNNDKERTFGGQAWVDNIVEKDTRPTFVVTPSFFKVKPNGQQTLRIIMASDHLPKDKESVYWLNLQDIPPALEGSGIAVALRTKLKLFYRPKALLEGRKGAEEGISLQSRPDGRTMLVNTTPYIFAIGSLLDGNGKKIATDNGTTQKLLMFMPGDEVQVKGNVVKVDSLNDYGELQTWTINKKKPAAPEAAKAEKADTAEQK

SEQ ID NO: 2061 - protein, 783 aa, Escherichia coli
MNRKKHQILKILLLCLISSKSSASEKELNLQFIRHKFGQNTEDIELFFNSSTVLPGNYTVDVKLNDEVIGRAKLEVSQDDKESYCLKDEWLSDLGIIINRDFYNKYFNIKRECYEIGKEKNSITTFDNNSQIFSLYMPQAAYIKKGNTEHKWSYGDPGFNLNYDAYLSKNDEDSSIYGNLEGNVNIDKWVLYGRGYKYEHDKFTTDDVTLSRAIKSLEGDLIIGDTYTNTSLMDNISFYGVQLRSNNAMTPERRGDYSPIISGIAKSNARVTVKQNGVVLHSELVSPGPFHINNVRGIRSGELVMTVTEEDGSEQQTRIPVTFIANLLSPGNYNYDFGIGNKEATWEPDNIFAYGSFDYGLNLLTLNASLLFEQHYSNAGIGAVGSIGSLGAVSVSGNISRAKNQLETDQGYSTSANYSKNVGANGNLQIIGYKFSSEGYTQYANFDYRAPRKDKKEKERYEVTLTQQFPASNVFLSVTGWKKFYWNDNSVTGANVSYTQNFGTVNASVNGSYSRGDGAKSDYMLGFNINIPFRHNDRQFYSNSGVTYNRNSGIGFNAGFSEDVTKNFNYNVNAAASKDNESVSLSTNYTSSMFRTSASVSKNRNSTNASAQIGGAIIGVKDGGVMLTSMSSNSVAIVQMEGLAGYAFTNGVESDWRGRIAYPMTTYMDNDIQISTDKLPSNIELTDNVETIVPTNRAIKLQKIKYKNMSRHVLKVYDKNGFVIPMGTAVKNSNGEIISFVNNNGISLLNIDKNDERVFFGSCTISTSGLKDNLSEIQEVNCE

SEQ ID NO: 2062 - protein, 228 aa, Escherichia coli
MNKFISIIALCVFSSYANAAFTLNSTRYIYNEGQQSVSVNIHNESEHKYGGQVWIDNIDKNGEVVFFSPSPMVFKLNPKQKQIVRIVNINDNLPKDRESIFWLNVQEIPPAPKGDGGSLSLAINNRVKLIYRPIALKNGRDEAENNIKLINSGTDSCLENTTPYYFAISDVKINGKSIDLNSDAKNKMGVFSPFSKVCLGNVNTSGNITVTAFNDYGVATSYTVQRSK

SEQ ID NO: 2063 - protein, 835 aa, Escherichia coli
MNKYPPLLTMLIIGIGSNAVAGDYFDPSLLATDIGNNDKLDLSLFSHPGGGVKGEREVSVYINDFFYKNVTLDFENGISGALEPIFPSGFFDNILASPYRSIKEKELISTADFLSLVPYGMVRFDQAIARVDISIPQAYLGRDAQMKSAPESWNQGVPALLIDYRLSGSKNKYNYGSSQNFYANAFLGFNLMGWRLRTTTNYMSYNSKDLYNKGERQGSFNFYNTYLEKDIGYLRSTLRLGELSTRGMILESFNFKGGKIYSNDEMLNDRLRSYTPTVRGIASSQAVVTIKQGGVVILQKNVPPGPFEINDFSLSGYSGDLYVNIKEADGSEHSFIQPFSTLPEMKREGVSGYEISLGHYNNSGATQYYNESPFLYASWSRGYRNGMTLYSETIQSRKYQLLGVGSTLSLGDFGAVSGDASLSRANKYDKIHSGQSYGLKYSKNKVDTGTTVTLATYRYSTKDFYSFNDFVSKNDSVQYVWDNRLKNRITLSLNQSLDDYGSLSLIASQQNYWTSDYVSRSFSLSHSFGWNDIFFSTSFSLDQKEGDNALRNNNKVFGFYSSIPLSKLIGKNESTYSTLSYNVTKINNQVRNTATLAGKVPGSMAQYRFSSGWANTEQSSNKALSVNWDGDLLDGSLGYTSSGKNRITDYSLSGSAILYPWRLAIGSDSVINGAAVVETEFISGIKVRQGGETSLLGTAIVTSMQPYTENRIDLDTQNIPDDLFISNASKKIVPEKGAVVPVKYNLFKGKQIVFSLKRYDGTPLPFGSVVSLVGSDSEITGIIDDAGRVYLAGIPSKGILHGAWGYNKSCEVSFNLNGKPSNNSNEIIEYEGVCK

SEQ ID NO: 2064 - protein, 1015 aa, Escherichia coli
  MOD_RES (196)..(196): Selenocysteine
MDVSRRQFFKICAGGMAGTTVAALGFAPKQALAQARNYKLLRAKEIRNTCTYCSVGCGLLMYSLGDGAKNAREAIYHIEGDPDHPVSRGALCPKGAGLLDYVNSENRLRYPEYRAPGSDKWQRISWEEAFSRIAKLMKADRDANFIEKNEQGVTVNRWLSTGMLCASGASNETGMLTQKFARSLGMLAVDNQARVCHGPTVASLAPTFGRGAMTNHWVDIKNANVVMVMGGNAAEAHPVGFRWAMEAKNNNDATLIVVDPRFTRTASVADIYAPIRSGTDITFLSGVLRYLIENNKINAEYVKHYTNASLLVRDDFAFEDGLFSGYDAEKRQYDKSSWNYQLDENGYAKRDETLTHPRCVWNLLKEHVSRYTPDVVENICGTPKADFLKVCEVLASTSAPDRTTTFLYALGWTQHTVGAQNIRTMAMIQLLLGNMGMAGGGVNALRGHSNIQGLTDLGLLSTSLPGYLTLPSEKQVDLQSYLEANTPKATLADQVNYWSNYPKFFVSLMKSFYGDAAQKENNWGYDWLPKWDQTYDVIKYFNMMDEGKVTGYFCQGFNPVASFPDKNKVVSCLSKLKYMVVIDPLVTETSTFWQNHGESNDVDPASIQTEVFRLPSTCFAEEDGSIANSGRWLQWHWKGQDAPGEARNDGEILAGIYHHLRELYQSEGGKGVEPLMKMSWNYKQPHEPQSDEVAKENNGYALEDLYDANGVLIAKKGQLLSSFAHLRDDGTTASSCWIYTGSWTEQGNQMANRDNSDPSGLGNTLGWAWAWPLNRRVLYNRASADINGKPWDPKRMLIQWNGSKWTGNDIPDFGNAAPGTPTGPFIMQPEGMGRLFAINKMAEGPFPEHYEPIETPLGTNPLHPNVVSNPVVRLYEQDALRMGKKEQFPYVGTTYRLTEHFHTWTKHALLNAIAQPEQFVEISETLAAAKGINNGDRVTVSSKRGFIRAVAVVTRRLKPLNVNGQQVETVGIPIHWGFEGVARKGYIANTLTPNVGDANSQTPEYKAFLVNIEKA

SEQ ID NO: 2065 - protein, 1016 aa, Escherichia coli
  MOD_RES (196)..(196): Selenocysteine
MQVSRRQFFKICAGGMAGTTAAALGFAPSVALAETRQYKLLRTRETRNTCTYCSVGCGLLMYSLGDGAKNAKASIFHIEGDPDHPVNRGALCPKGAGLVDFIHSESRLKFPEYRAPGSDKWQQISWEEAFDRIAKLMKEDRDANYIAQNAEGVTVNRWLSTGMLCASASSNETGYLTQKFSRALGMLAVDNQARVCHGPTVASLAPTFGRGAMTNHWVDIKNANLVVVMGGNAAEAHPVGFRWAMEAKIHNGAKLIVIDPRFTRTAAVADYYAPIRSGTDIAFLSGVLLYLLNNEKFNREYTEAYTNASLIVREDYGFEDGLFTGYDAEKRKYDKSSWTYELDENGFAKRDTTLQHPRCVWNLLKQHVSRYTPDVVENICGTPKDAFLKVCEYIAETSAHDKTASFLYALGWTQHSVGAQNIRTMAMIQLLLGNMGMAGGGVNALRGHSNIQGLTDLGLLSQSLPGYMTLPSEKQTDLQTYLTANTPKPLLEGQVNYWGNYPKFFVSMMKAFFGDKATAENSWGFDWLPKWDKGYDVLQYFEMMKEGKVNGYICQGFNPVASFPNKNKVIGCLSKLKFLVTIDPLNTETSNFWQNHGELNEVDSSKIQTEVFRLPSTCFAEENGSIVNSGRWLQWHWKGADAPGIALTDGEILSGIFLRLRKMYAEQGGANPDQVLNMTWNYAIPHEPSSEEVAMESNGKALADITDPATGAVIVKKGQQLSSFAQLRDDGTTSCGCWIFAGSWTPEGNQMARRDNADPSGLGNTLGWAWAWPLNRRILYNRASADPQGNPWDPKRQLLKWDGTKWTGWDIPDYSAAPPGSGVGPFIMQQEGMGRLFALDKMAEGPFPEHYEPFETPLGTNPLHPNVISNPAARIFKDDAEALGKADKFPYVGTTYRLTEHFHYWTKHALLNAILQPEQFVEIGESLANKLGIAQGDTVKVSSNRGYIKAKAVVTKRIRTLKANGKDIDTIGIPIHWGYEGVAKKGFIANTLTPFVGDANTQTPEFKSFLVNVEKV

SEQ ID NO: 2066 - protein, 774 aa, Escherichia coli
MTPLRVFRKTTPLVNTIRLSLLPLAGLSFSAFAAQVNIAPGSLDKALNQYAAHSGFTLSVDASLTRGKQSNGLHGDYDVESGLQQLLDGSGLQVKPLGNNSWTLEPAPAPKEDALTVVGDWLGDARENDVFEHAGARDVIRREDFAKTGATTMREVLNRIPGVSAPENNGTGSHDLAMNFGIRGLNPRLASRSTVLMDGIPVPFAPYGQPQLSLAPVSLGNMDAIDVVRGGGAVRYGPQSVGGVVNFVTRAIPQDFGIEAGVEGQLSPTSSQNNPKETHNLMVGGTADNGFGTALLYSGTRGSDWREHSATRIDDLMLKSKYAPDEVHTFNSLLQYYDGEADMPGGLSRADYDADRWQSTRPYDRFWGRRKLASLGYQFQPDSQHKFNIQGFYTQTLRSGYLEQGKRITLSPRNYWVRGIEPRYSQIFMIGPSAHEVGVGYRYLNESTHEMRYYTATSSGQLPSGSSPYDRDTRSGTEAHAWYLDDKIDIGNWTITPGMRFEHIESYQNNAITGTHEEVSYNAPLPALNVLYHLTDSWNLYANTEGSFGTVQYSQIGKAVQSGNVEPEKARTWELGTRYDDGALTAEMGLFLINFNNQYDSNQTNDTVTARGKTRHTGLETQARYDLGTLTPTLDNVSIYASYAYVNAEIREKGDTYGNLVPFSPKHKGTLGVDYKPGNWTFNLNSDFQSSQFADNANTVKESADGSTGRIPGFMLWGARVAYDFGPQMADLNLAFGVKNIFDQDYFIRSYDDNNKGIYAGQPRTLYMQGSLKF

SEQ ID NO: 2067 - protein, 300 aa, Escherichia coli
MLAFIRFLFAGLLLVISHAFAATVQDEHGTFTLEKTPQRIVVLELSFADALAAVDVIPIGIADDNDAKRILPEVRAHLKPWQSVGTRAQPSLEAIAALKPDLIIADSSRHAGVYIALQQIAPVLLLKSRNETYAENLQSAAIIGEMVGKKREMQARLEQHKERMAQWASQLPKGTRVAFGTSREQQFNLHTQETWTGSVLASLGLNVPAAMAGASMPSIGLEQLLAVNPAWLLVAHYREESIVKRWQQDPLWQMLTAAQKQQVASVDSNTWARMRGIFAAERIAADTVKIFHHQPLTVVK

SEQ ID NO: 2068 - protein, 317 aa, Escherichia coli
MNPLLTDSRRQALRSASHWYAVLSGERVSPQQEARWQQWYEQDQDNQWAWQQVENLRNQLGGVPGDVASRALHDTRLTRRHVMKGLLLLLGAGGGWQLWQSETGEGLRADYRTAKGTVSRQQLEDGSLLTLNTQSAADVRFDAHQRTVRLWYGEIAITTAKDALQRPFRVLTRQGQLTALGTEFTVRQQDNFTQLDVQQHAVEVLLASAPAQKRIVNAGESLQFSASEFGAVKPLDDESTSWTKDILSFSDKPLGEVIATLTRYRNGVLRCDPAVAGLRLSGTFPLKNTDAILNVIAQTLPVKIQSITRYWINISPL

SEQ ID NO: 2069 - protein, 746 aa, Escherichia coli
MNKKIHSLALLVNLGIYGVAQAQEPTDTPVSHDDTIVVTAAEQNLQAPGVSTITADEIRKNPVARDVSKIIRTMPGVNLTGNSTSGQRGNNRQIDIRGMGPENTLILIDGKPVSSRNSVRQGWRGERDTRGDTSWVPPEMIERIEVLRGPAAARYGNGAAGGVVNIITKKGSGEWHGSWDAYFNAPEHKEEGATKRTNFSLTGPLGDEFSFRLYGNLDKTQADAWDINQGHQSARAGTYATTLPAGREGVINKDINGVVRWDFAPLQSLELEAGYSRQGNLYAGDTQNTNSDSYTRSKYGDETNRLYRQNYALTWNGGWDNGVTTSNWVQYEHTRNSRIPEGLAGGTEGKFNEKATQDFVDIDLDDVMLHSEVNLPIDFLVNQTLTLGTEWNQQRMKDLSSNTQALTGTNTGGAIDGVSTTDRSPYSKAEIFSLFAENNMELTDSTIVTPGLRFDHHSIVGNNWSPALNISQGLGDDFTLKMGIARAYKAPSLYQTNPNYILYSKGQGCYASAGGCYLQGNDDLKAETSINKEIGLEFKRDGWLAGVTWFRNDYRNKIEAGYVAVGQNAVGTDLYQWDNVPKAVVEGLEGSLNVPVSETVMWTNNITYMLKSENKTTGDRLSIIPEYTLNSTLSWQAREDLSMQTTFTWYGKQQPKKYNYKGQPAVGPETKEISPYSIVGLSATWDVTKNVSLTGGVDNLFDKRLWRAGNAQTTGDLAGANYIAGAGAYTYNEPGRTWYMSVNTHF

SEQ ID NO: 2070 - protein, 318 aa, Escherichia coli
MRLAPLYRNALLLTGLLLSGIAAVQAADWPRQITDSRGTHTLESQPQRIVSTSVTLTGSLLAIDAPVIASGATTPNNRVADDQGFLRQWSKVAKERKLQRLYIGEPSAEAVAAQMPDLILISATGGDSALALYDQLSTIAPTLIINYDDKSWQSLLTQLGEITGHEKQAAERIAQFDKQLAAAKEQIKLPPQPVTAIVYTAAAHSANLWTPESAQGQMLEQLGFTLAKLPAGLNASQSQGKRHDIIQLGGENLAAGLNGESLFLFAGDQKDADAIYANPLLAHLPAVQNKQVYALGTETFRLDYYSAMQVLDRLKALF

SEQ ID NO: 2071 - protein, 318 aa, Escherichia coli; identical to SEQ ID NO: 2070

SEQ ID NO: 2072 - protein, 747 aa, Escherichia coli
MARSKTAQPKHSLRKIAVVVATAVSGMSVYAQAAVEPKEDTITVTAAPAPQESAWGPAATIAARQSATGTKTDTPIQKVPQSISVVTAEEMALHQPKSVKEALSYTPGVSVGTRGASNTYDHLIIRGFAAEGQSQNNYLNGLKLQGNFYNDAVIDPYMLERAEIMRGPVSVLYGKSSPGGLLNMVSKRPTTEPLKEVQFKAGTDSLFQTGFDFSDSLDDDGVYSYRLTGLARSANAQQKGSEEQRYAIAPAFTWRPDDKTNFTFLSYFQNEPETGYYGWLPKEGTVEPLPNGKRLPTDFNEGAKNNTYSRNEKMVGYSFDHEFNDTFTVRQNLRFAENKTSQNSVYGYGVCSDPANAYSKQCAALAPADKGHYLARKYVVDDEKLQNFSVDTQLQSKFATGDIDHTLLTGVDFMRMRNDINAWFGYDDSVPLLNLYNPVNTDFDFNAKDPANSGPYRILNKQKQTGVYVQDQAQWDKVLVTLGGRYDWADQESLNRVAGTTDKRDDKQFTWRGGVNYLFDNGVTPYFSYSESFEPSSQVGKDGNIFAPSKGKQYEVGVKYVPEDRPIVVTGAVYNLTKTNNLMADPEGSFFSVEGGEIRARGVEIEAKAALSASVNVVGSYTYTDAEYTTDTTYKGNTPAQVPKHMASLWADYTFFDGPLSGLTLGTGGRYTGSSYGDPANSFKVGSYTVVDALVRYDLARVGMAGSNVALHVNNLFDREYVASCFNTYGCFWGAERQVVATATFRF

SEQ ID NO: 2073 - protein, 296 aa, Escherichia coli
MSGLPLISRRRLLTAMALSPLLWQMNTAHAAAIDPNRIVALEWLPVELLLALGIVPYGVADTINYRLWVSEPPLPDSVIDVGLRTEPNLELLTEMKPSFMVWSAGYGPSPEMLARIAPGRGFNFSDGKQPLAMARKSLTEMADLLNLQSAAETHLAQYEDFIRSMKPRFVKRGARPLLLTTLIDPRHMLVFGPNSLFQEILDEYGIPNAWQGETNFWGSTAVSIDRLAAYKDVDVLCFDHDNSKDMDALMATPLWQAMPFVRAGRFQRVPAVWFYGATLSAMHFVRVLDNAIGGKA

SEQ ID NO: 2074 - protein, 729 aa, Escherichia coli
MLSTQFNRDNQYQAITKPSLLAGCIALALLPSAAFAAPATEETVIVEGSATAPDDGENDYSVTSTSAGTKMQMTQRDIPQSVTIVSQQRMEDQQLQTLGEVMENTLGISKSQADSDRALYYSRGFQIDNYMVDGIPTYFESRWNLGDALSDMALFERVEVVRGATGLMTGTGNPSAAINMVRKHATSREFKGDVSAEYGSWNKERYVADLQSPLTEDGKIRARIVGGYQNNDSWLDRYNSEKTFFSGIVDADLGDLTTLSAGYEYQRIDVNSPTWGGLPRWNTDGSSNSYDRARSTAPDWAYNDKEINKVFMTLKQQFADTWQATLNATHSEVEFDSKMMYVDAYVNKADGMLVGPYSNYGPGFDYVGGTGWNSGKRKVDALDLFADGSYELFGRQHNLMFGGSYSKQNNRYFSSWANIFPDEIGSFYNFNGNFPQTDWSPQSLAQDDTTHMKSLYAATRVTLADPLHLILGARYTNWRVDTLTYSMEKNHTTPYAGLVFDINDNWSTYASYTSIFQPQNDRDSSGKYLAPITGNNYELGLKSDWMNSRLTTTLAIFRIEQDNVAQSTGTPIPGSNGETAYKAVDGTVSKGVEFELNGAITDNWQLTFGATRYIAEDNEGNAVNPNLPRTTVKMFTSYRLPVMPELTVGGGVNWQNRVYTDTVTPYGTFRAEQGSYALVDLFTRYQVTKNFSLQGNVNNLFDKTYDTNVEGSIVYGTPRNFSITGTYQF

SEQ ID NO: 2075 - protein, 241 aa, Escherichia coli
MSNKNVNVRKSQEITFCLLAGILMFMAMVVAGRAEAGVALGATRVIYPAGQKQVQLAVTNNDENSTYLIQSWVENADGVKDGRFIVTPPLFAMKGKKENTLRILDATNNQLPQDRESLFWMNVKAIPSMDKSKLTENTLQLAIISRIKLYYRPAKLALPPDQAAEKLRFRRSANSLTLINPTPYYLTVTELNAGTRVLENALVPPMGESAVKLPSDAGSNITYRTINDYGALTPKMTGVME

SEQ ID NO: 2076 - protein, 241 aa, Escherichia coli
MSNKNVNVRKSQEITFCLLAGILMFMAMMVAGRAEAGVALGATRVIYPAGQKQEQLAVTNNDENSTYLIQSWVENADGVKDGRFIVTPPLFAMKGKKENTLRILDATNNQLPQDRESLFWMNVKAIPSMDKSKLTENTLQLAIISRIKLYYRPAKLALPPDQAAEKLRFRRSANSLTLINPTPYYLTVTELNAGTRVLENALVPPMGESTVKLPSDAGSNITYRTINDYGALTPKMTGVME

SEQ ID NO: 2077 - protein, 878 aa, Escherichia coli
MSYLNLRLYQRNTQCLHIRKHRLAGFFVRLVVACAFAAQAPLSSADLYFNPRFLADDPQAVADLSRFENGQELPPGTYRVDIYLNNGYMATRDVTFNTGDSEQGIVPCLTRAQLASMGLNTASVAGMNLLADDACVPLTTMVQDATAHLDVGQQRLNLTIPQAFMSNRARGYIPPELWDPGINAGLLNYNFSGNSVQNRIGGNSHYAYLNLQSGLNIGAWRLRDNTTWSYNSSDRSSGSKNKWQHINTWLERDIIPLRSRLTLGDGYTQGDIFDGINFRGAQLASDDNMLPDSQRGFAPVIHGIARGTAQVTIKQNGYDIYNSTVPPGPFTINDIYAAGNSGDLQVTIKEADGSTQIFTVPYSSVPLLQREGHTRYSITAGEYRSGNAQQEKTRFFQSTLLHGLPAGWTIYGGTQLADRYRAFNFGIGKNMGALGALSVDMTQANSTLPDDSQHDGQSVRFLYNKSLNESGTNIQLVGYRYSTSGYFNFADTTYSRMNGYNIETQDGVIQVKPKFTDYYNLAYNKRGKLQLTVTQQLGRTSTLYLSGSHQTYWGTSNVDEQFQAGLNTAFEDINWTLSYSLTKNAWQKGRDQMLALNVNIPFSHWLRSDSKSQWRHASASYSMSHDLNGRMTNLAGVYGTLLEDNNLSYSVQTGYAGGGDGNSGSTGYATLNYRGGYGNANIGYSHSDDIKQLYYGVSGGVLAHANGVTLGQPLNDTVVLVKAPGAKDAKVENQTGVRTDWRGYAVLPYATEYRENRVALDTNTLADNVDLDNAVANVVPTRGAIVRAEFKARVGIKLLMTLTHNNKPLPFGAMVTSESSQSSGIVADNGQVYLSGMPLAGKVQVKWGEEENAHCVANYQLPPESQQQLLTQLSAECR

SEQ ID NO: 2078 - protein, 760 aa, Escherichia coli
MENNRNFPARQFHSLTFFAGLCIGITPVAQALAAEGQTNADDTLVVEASTPSLYAPQQSADPKFSRPVADTTRTMTVISEQVIKDQGATNLTDALKNVPGVGAFFAGENGNSTTGDAIYMRGADTSNSIYIDGIRDIGSVSRDTFNTEQVEVIKGPSGTDYGRSAPTGSINMISKQPRNDSGIDASASIGSAWFRRGTLDVNQVIGDTTAVRLNVMGEKTHDAGRDKVKNERYGVAPSIAFGLGTANRLYLNYLHVTQHNTPDGGIPTIGLPGYSAPSAGTATLNHSGKVDTHNFYGTDSDYDDSTTDTATMRFEHDINDNTTIRNTTRWSRVKQDYLMTAIMGGASNITQPTSDVNSWTWSRTANTKDVSNKILTNQTNLTSTFYTASIGHDVSTGVEFTRETQTNYGVNPVTLPAVNIYHPDSSIHPGGLTRNGANANGQTDTFAIYAFDTLQITRDFELNGGIRLDNYHTEYDSATACGGSGRGAITCPAGVAKGSPVTTVDTAKSGNLVNWKAGALYHLTENGNVYINYAVSQQPPGGNNFALAQSGSGNSANRTDFKPQKANTSEIGTKWQVLDKRLLLTAALFRTDIENEVEQNDDGTYSQYGKKRVEGYEISVAGNITPAWQVIGGYTQQKATIKNGKDVAQDGSSSLPYTPEHAFTLWSQYQATDDISVGAGARYIGSMHKGSDGAVGTPAFTEGYWVADAKLGYRVNRNLDFQLNVYNLFDTDYVASINKSGYRYHPGEPRTFLLTANMHF

SEQ ID NO: 2079 - protein, 760 aa, Escherichia coli
MENNRNFPARQFHSLTFFAGLCIGITPVAQALAAEGQANADDTLVVEASTPSLYAPQQSADPKFSRPVADTTRTMTVISEQVIKDQGATNLTDALKNVPGVGAFFAGENGNSTTGDAIYMRGADTSNSIYIDGIRDIGSVSRDTFNTEQVEVIKGPSGTDYGRSAPTGSINMISKQPRNDSGIDASASIGSAWFRRGTLDVNQVIGDTTAVRLNVMGEKTHDAGRDKVKNERYGVAPSVVFGLGTANRLYLNYLHVTQHNTPDGGIPTIGLPGYSAPSAGTAALNHSGKVDTHNFYGTDSDYDDSTTDTATMRFEHDINDNTTIRNTTRWSRVKQDYLMTAIMGGASNITQPTSDVNSWTWSRTANTKDVSNKILTNQTNLTSTFYTGAIGHDLSTGVEFTRETQTNYGVNPVTLPAVNIYHPDSSIHPGGLTRNGANANGQTDTFAIYAFDTLQITRDFELNGGIRLDNYHTEYDSATACGGSGRGAITCPAGVAKGSPVTTVDTAKSGNLVNWKAGALYHLTENGNVYINYAVSQQPPGGNNFALAQSGSGNSANRTDFKPQKANTSEIGTKWQVLDKRLLLTAALFRTDIENEVEQNDDGTYSQYGKKRVEGYEISVAGNITPAWQMIGGYTQQKATIKNGKDVAQDGSSSLPYTPEHAFTLWSQYQATDDISVGAGARYIGSMHKGSDGAVGTPAFTEGYWVADAKLGYRVNRNLDFQLNVYNLFDTDYVASINKSGYRYHPGEPRTFLLTANMHF

SEQ ID NO: 2080 - protein, 760 aa, Escherichia coli
MENNRNFPARQFHSLTFFAGLCIGITPVAQALAAEGQTNADDTLVVEASTPSLYAPQQSADPKFSRPVADTTRTMTVISEQVIKDQGATNLTDALKNVPGVGAFFAGENGNSTTGDAIYMRGADTSNSIYIDGIRDIGSVSRDTFNTEQVEVIKGPSGTDYGRSAPTGSINMISKQPRNDSGIDASASIGSAWFRRGTLDVNQVIGDTTAVRLNVMGEKTHDAGRDKVKNERYGVAPSVAFGLGTANRLYLNYLHVTQHNTPDGGIPTIGLPGYSAPSAGTAALNHSGKVDTHNFYGTDSDYDDSTTDTATMRFEHDINDNTTIRNTTRWSRVKQDYLMTAIMGGASNITQPTSDVNSWTWSRTANTKDVSNKILTNQTNLTSTFYTGSIGHDVSTGVEFTRETQTNYGVNPVTLPAVNIYHPDSSIHPGGLTRNGANANGQTDTFAIYAFDTLQITRDFELNGGIRLDNYHTEYDSATACGGSGRGAITCPTGVAKGSPVTTVDTAKSGNLMNWKAGALYHLTENGNVYINYAVSQQPPGGNNFALAQSGSGNSANRTDFKPQKANTSEIGTKWQVLDKRLLLTAALFRTDIENEVEQNDDGTYSQYGKKRVEGYEISVAGNITPAWQVIGGYTQQKATIKNGKDVAQDGSSSLPYTPEHAFTLWSQYQATDDISVGAGARYIGSMHKGSDGAVGTPAFTEGYWVADAKLGYRVNRNLDFQLNVYNLFDTDYVASINKSGYRYHPGEPRTFLLTANMHF

SEQ ID NO: 2081 - protein, 760 aa, Escherichia coli
MENNRNFPARQFHSLTFFAGLCIGITPVAQALAAEGQANADDTLVVEASTPSLYAPQQSADPKFSRPVADTTRTMTVISEQVIKDQGATNLTDALKNVPGVGAFFAGENGNSTTGDAIYMRGADTSNSIYIDGIRDIGSVSRDTFNTEQVEVIKGPSGTDYGRSAPTGSINMISKQPRNDSGIDASASIGSAWFRRGTLDVNQVIGDTTAVRLNVMGEKTHDAGRDKVKNERYGVAPSVAFGLGTANRLYLNYLHVTQHNTPDGGIPTIGLPGYSAPSAGTAALNHSGKVDTHNFYGTDSDYDDSTTDTATMRFEHDINDNTTIRNTTRWSRVKQDYLMTAIMGGASNITQPTSDVNSWTWSRTANTKDVSNKILTNQTNLTSTFYTGAIGHDVSTGVEFTRETQTNYGVNPVTLPAVNIYHPDSSIHPGGLTRNGANANGQTDTFAIYAFDTLQITRDFELNGGIRLDNYHTEYDSATACGGSGRGAITCPAGVAKGSPVTTVDTAKSGNLVNWKAGALYHLTENGNIYINYAVSQQPPGGNNFALAQSGSGNSANRTDFKPQKANTSEIGTKWQVLDKRLLLTAALFRTDIENEVEQNDDGTYSQYGKKRVEGYEISVAGNITPAWQMIGGYTQQKATIKNGKDVAQDGSSSLPYTPEHAFTLWSQYQATDDISVGAGARYIGSMHKGSDGAVGTPAFTEGYWVADAKLGYRVNRNLDFQLNVYNLFDTDYVASINKSGYRYHPGEPRTFLLTANMHF

SEQ ID NO: 2082 - protein, 270 aa, Escherichia coli
MKSLFKVTLLATTMAVALHAPITFAAEAAKPATTADSKAAFKNDDQKSAYALGASLGRYMENSLKEQEKLGIKLDKDQLIAGVQDAFADKSKLSDQEIEQTLQAFEARVKSSAQAKMEKDAADNEAKGKEYREKFAKEKGVKTSSTGLVYQVVEAGKGEAPKDSDTVVVNYKGTLIDGKEFDNSYTRGEPLSFRLDGVIPGWTEGLKNIKKGGKIKLVIPPELAYGKAGVPGIPPNSTLVFDVELLDVKPAPKADAKPEADAKAADSAKK

SEQ ID NO: 2083 - protein, 270 aa, Escherichia coli; identical to SEQ ID NO: 2082

SEQ ID NO: 2084 - protein, 270 aa, Escherichia coli
MKSLFKVTLLATTMAVALHAPITFAAEAAKPATAADSKAAFKNDDQKSAYALGASLGRYMENSLKEQEKLGIKLDKDQLIAGVQDAFADKSKLSDQEIEQTLQAFEARVKSSAQAKMEKDAADNEAKGKEYREKFAKEKGVKTSSTGLVYQVVEAGKGEAPKDSDTVVVNYKGTLIDGKEFDNSYTRGEPLSFRLDGVIPGWTEGLKNIKKGGKIKLVIPPELAYGKAGVPGIPPNSTLVFDVELLDVKPAPKADAKPEADAKAADSAKK

SEQ ID NO: 2085 - protein, 206 aa, Escherichia coli
MTTPTFDTIEAQASYGIGLQVGQQLSESGLEGLLPEALVAGIADALEGKHPAVPVDVVHRALREIHERADAVRRQRFQAMAAEGVKYLEENAKKEGVNSTESGLQFRVINQGEGAIPARTDRVRVHYTGKLIDGTVFDSSVARGEPAEFPVNGVIPGWIEALTLMPVGSKWELTIPQELAYGERGAGASIPPFSTLVFEVELLEIL

SEQ ID NO: 2086 - protein, 219 aa, Escherichia coli
MLIIKRSVAIIAILFSPLSTASNLTSQLHNFFSAQLAGVSDEVRVSIRTAPNLLPPCEQPLLSMSNNSRLWGNVNVLARCGNDKRYLQVNVQATGNYVVAAMPIARGGKLEAGNVKLKRGRLDTLPPRTVLDINQLVDAISLRDLSPDQPIQLTQFRQAWRVKAGQRVNVIASGDGFSANAEGQALNNAAVAQNARVRMVSGQVVSGVVDADGNILINL

SEQ ID NO: 2087 - protein, 232 aa, Escherichia coli
MQKNAAHTYAISSLLVLSLTGCAWIPSTPLVQGATSAQPVPGPTPVANGSIFQSAQPINYGYQPLFEDRRPRNIGDTLTIVLQENVSASKSSSANASRDGKTNFGFDTVPRYLQGLFGNARADVEASGGNTFNGKGGANASNTFSGTLTVTVDQVLVNGNLHVVGEKQIAINQGTEFIRFSGVVNPRTISGSNTVPSTQVADARIEYVGNGYINEAQNMGWLQRFFLNLSPM

SEQ ID NO: 2088 - protein, 232 aa, Escherichia coli
MQKNAAHTYAISSLLVLSLTGCAWIPSTPLVQGATSAQPVPGPTPVANGSIFQSAQPINYGYQPLFEDRRPRNIGDTLTIVLQENVSASKSSSANASRDGKTNFGFDTVPRYLQGVFGNARADVEASGGNTFNGKGGANASNTFSGTLTVTVDQVLVNGNLHVVGEKQIAINQGTEFIRFSGVVNPRTISGSNTVPSTQVADARIEYVGNGYINEAQNMGWLQRFFLNLSPM

SEQ ID NO: 2089 - protein, 232 aa, Escherichia coli; identical to SEQ ID NO: 2087

SEQ ID NO: 2090 - protein, 232 aa, Escherichia coli; identical to SEQ ID NO: 2087

SEQ ID NO: 2091 - protein, 232 aa, Escherichia coli; identical to SEQ ID NO: 2087

SEQ ID NO: 2092 - protein, 232 aa, Escherichia coli; identical to SEQ ID NO: 2087

SEQ ID NO: 2093 - protein, 232 aa, Escherichia coli
MQKNAAHTYAISSLLVLSLTGCAWIPSTPLVQGATSAQPVPGPAPVANGSIFQSAQPINYGYQPLFEDRRPRNIGDTLTIVLQENVSASKSSSANASRDGKTNFGFDTVPRYLQGLFGNARADVEASGGNTFNGKGGANASNTFSGTLTVTVDQVLVNGNLHVVGEKQIAINQGTEFIRFSGVVNPRTISGSNTVPSTQVADARIEYVGNGYINEAQNMGWLQRFFLNLSPM

SEQ ID NO: 2094 - protein, 232 aa, Escherichia coli; identical to SEQ ID NO: 2087

SEQ ID NO: 2095 - protein, 232 aa, Escherichia coli; identical to SEQ ID NO: 2087

SEQ ID NO: 2096 - protein, 232 aa, Escherichia coli; identical to SEQ ID NO: 2087

SEQ ID NO: 2097 - protein, 232 aa, Escherichia coli; identical to SEQ ID NO: 2087

SEQ ID NO: 2098 - protein, 232 aa, Escherichia coli; identical to SEQ ID NO: 2087

SEQ ID NO: 2099 - protein, 232 aa, Escherichia coli; identical to SEQ ID NO: 2088

SEQ ID NO: 2100 - protein, 232 aa, Escherichia coli; identical to SEQ ID NO: 2087

SEQ ID NO: 2101 - protein, 232 aa, Escherichia coli; identical to SEQ ID NO: 2087

SEQ ID NO: 2102 - protein, 365 aa, Escherichia coli
MIKFLSALILLLVTTAAQAERIRDLTSVQGVRQNSLIGYGLVVGLDGTGDQTTQTPFTTQTLNNMLSQLGITVPTGTNMQLKNVAAVMVTASLPPFGRQGQTIDVVVSSMGNAKSLRGGTLLMTPLKGVDSQVYALAQGNILVGGAGASAGGSSVQVNQLNGGRITNGAVIERELPSQFGVGNTLNLQLNDEDFSMAQQIADTINRVRGYGSATALDARTIQVRVPSGNSSQVRFLADIQNMQVNVTPQDAKVVINSRTGSVVMNREVTLDSCAVAQGNLSVTVNRQANVSQPDTPFGGGQTVVTPQTQIDLRQSGGSLQSVRSSASLNNVVRALNALGATPMDLMSILQSMQSAGCLRAKLEII

SEQ ID NO: 2103 - protein, 365 aa, Escherichia coli
MIKFLSALILLLVITAAQAERIRDLTSVQGVRQNSLIGYGLVVGLDGTGDQTTQTPFTTQTLNNMLSQLGITVPTGTNMQLKNVAAVMVTASLPPFGRQGQTIDVVVSSMGNAKSLRGGTLLMTPLKGVDSQVYALAQGNILVGGAGASAGGSSVQVNQLNGGRITNGAVIERELPSQFGVGNTLNLQLNDEDFSMAQQIADTINRVRGYGSATALDARTIQVRVPSGNSSQVRFLADIQNMQVNVTPQDAKVVINSRTGSVVMNREVTLDSCAVAQGNLSVTVNRQANVSQPDTPFGGGQTVVTPQTQIDLRQSGGSLQSVRSSASLNNVVRALNALGATPMDLMSILQSMQSAGCLRAKLEII

SEQ ID NO: 2104 - protein, 365 aa, Escherichia coli; identical to SEQ ID NO: 2102

SEQ ID NO: 2105 - protein, 365 aa, Escherichia coli; identical to SEQ ID NO: 2102

SEQ ID NO: 2106 - protein, 365 aa, Escherichia coli
MIKFLSALILLLVTTAAQAERIRDLTSVQGVRQNSLIGYGLVVGLDGTGDQTTQTPFTTQTLNNMLSQLGITVPTGTNMQLKNVAAVMVTASLPPFGRQGQTIDVVVSSMGNAKSLRGGTLLMTPLKGVDSQVYALAQGNILVGGAGASAGGSSVQVNQLNGGRITNGAVIERELPSQFGVGNTLNLQLNDEDFSMAQQIADTINRVRGYGSATALDARTIQVRVPSGNSSQVRFLADIQNMQVNVTPQDAKVVINSRTGSVVMNREVTLDSCAIAQGNLSVTVNRQANVSQPDTPFGGGQTVVTPQTQIDLRQSGGSLQSVRSSASLNNVVRALNALGATPMDLMSILQSMQSAGCLRAKLEII

SEQ ID NO: 2107 - protein, 365 aa, Escherichia coli; identical to SEQ ID NO: 2106

SEQ ID NO: 2108 - protein, 365 aa, Escherichia coli; identical to SEQ ID NO: 2103

SEQ ID NO: 2109 - protein, 365 aa, Escherichia coli; identical to SEQ ID NO: 2102

SEQ ID NO: 2110 - protein, 365 aa, Escherichia coli; identical to SEQ ID NO: 2102

SEQ ID NO: 2111 - protein, 365 aa, Escherichia coli; identical to SEQ ID NO: 2102

SEQ ID NO: 2112 - protein, 365 aa, Escherichia coli
MIKFLSALILLLVTTAAQAERIRDLTSVQGVRQNSLIGYGLVVGLDGTGDQTTQTPFTTQTLNNMLSQLGITVPTGTNMQLKNVAAVMVTASLPPFGRQGQTIDVVVSSMGNAKSLRGGTLLMTPLKGVDSQVYALAQGNILVGGAGASAGGSSVQVNQLNGGRITNGAVIERELPSQFGVGNTLNLQLNDEDFSMAQQIADTINRVRGYGSATALDARTIQVRVPSGNSSQVRFLADIQNMHVNVTPQDAKVVINSRTGSVVMNREVTLDSCAVAQGNLSVTVNRQANVSQPDTPFGGGQTVVTPQTQIDLRQSGGSLQSVRSSASLNNVVRALNALGATPMDLMSILQSMQSAGCLRAKLEII

SEQ ID NO: 2113 - protein, 366 aa, Escherichia coli
MVIKFLSALILLLVTTAAQAERIRDLTSVQGVRQNSLIGYGLVVGLDGTGDQTTQTPFTTQTLNNMLSQLGITVPTGTNMQLKNVAAVMVTASLPPFGRQGQTIDVVVSSMGNAKSLRGGTLLMTPLKGVDSQVYALAQGNILVGGAGASAGGSSVQVNQLNGGRITNGAVIERELPSQFGVGNTLNLQLNDEDFSMAQQIADTINRVRGYGSATALDARTIQVRVPSGNSSQVRFLADIQNMQVNVTPQDAKVVINLRTGSVVMNREVTLDSCAVAQGNLSVTVNRQANVSQPDTPFGGGQTVVTPQTQIDLRQSGGSLQSVRSSASLNNVVRALNALGATPMDLMSILQSMQSAGCLRAKLEII

SEQ ID NO: 2114 - protein, 365 aa, Escherichia coli; identical to SEQ ID NO: 2103

SEQ ID NO: 2115 - protein, 366 aa, Escherichia coli
MVIKFLSALILLLVTTAVQAERIRDLTSVQGVRQNSLIGYGLVVGLDGTGDQTTQTPFTTQTLNNMLSQLGITVPTGTNMQLKNVAAVMVTASLPPFGRQGQTIDVVVSSMGNAKSLRGGTLLMTPLKGVDSQVYALAQGNILVGGAGASAGGSSVQVNQLNGGRITNGAVIERELPSQFGVGNTLNLQLNDEDFSMAQQIADTINRVRGYGSATALDARTIQVRVPSGNSSQVRFLADIQNMQVNVTPQDAKVVINSRTGSVVMNREVTLDSCAVAQGNLSVTVNRQANVSQPDTPFGGGQTVVTPQTQIDLRQSGGSLQSVRSSASLNNVVRALNALGATPMDLMSILQSMQSAGCLRAKLEII

SEQ ID NO: 2116 - protein, 365 aa, Escherichia coli; identical to SEQ ID NO: 2102

SEQ ID NO: 2117 - protein, 366 aa, Escherichia coli
MVIKFLSALILLLVTTAAQAERIRDLTSVQGVRQNSLIGYGLVVGLDGTGDQTTQTPFTTQTLNNMLSQLGITVPTGTNMQLKNVAAVMVTASLPPFGRQGQTIDVVVSSMGNAKSLRGGTLLMTPLKGVDSQVYALAQGNILVGGAGASAGGSSVQVNQLNGGRITNGAVIERELPSQFGVGNTLNLQLNDEDFSMAQQIADTINRVRGYGSATALDARAIQVRVPSGNSSQVRFLADIQNMQVNVTPQDAKVVINSRTGSVVMNREVTLDSCAVAQGNLSVTVNRQANVSQPDTPFGGGQTVVTPQTQIDLRQSGGSLQSVRSSASLNNVVRALNALGATPMDLMSILQSMQSAGCLRAKLEII

SEQ ID NO: 2118 - protein, 366 aa, Escherichia coli
MVIKFLSALILLLVTTAAQAERIRDLTSVQGVRQNSLIGYGLVVGLDGTGDQTTQTPFTTQTLNNMLSQLGITVPTGTNMQLKNVAAVMVTASLPPFGRQGQTIDVVVSSMGNAKSLRGGTLLMTPLKGVDSQVYALAQGNILVGGAGASAGGSSVQVNQLNGGRITNGAVIERELPSQFGVGNTLNLQLNDEDFSMAQQIADTINRVRGYGSATALDARTIQVRVPSGNSSQVRFLADIQNMQVNVTPQDAKVVINSRTGSVVMNREVTLDSCAVAQGNLSVTVNRQANVSQPDTPFGGGQTVVTPQTQIDLRQSGGSLQSVRSSASLNNVVRALNALGATPMDLMSILQSMQSAGCLRAKLEII

SEQ ID NO: 2119 - protein, 313 aa, Escherichia coli
MISDSKLLASAAWDAQSLNELKAKASEDPAANIRPVARQVEGMFVQMMLKSMRDALPKDGLFSSEHTRLYTSMYDQQIAQQMTTGKGLGLAEMMVKQMTPEQPLPEESTPAAPMKFPLETVVRYQNQALSQLVQKAVPRNYDDSLPGDSKAFLAQLSLPAQLASQQSGVPHHLILAQAALESGWGQRQIRRENGEPSYNLFGVKASGNWKGPVTEITTTEYENGEAKKVKAKFRVYSSYLEALSDYVGLLTRNPRYAAVTTAASAEQGAQALQDAGYATDPHYARKLTNMIQQMKSISDKVSKTYSMNIDNLF

SEQ ID NO: 2120 - protein, 313 aa, Escherichia coli
MISDSKLLASAAWDAQSLNELKAKAGEDPAANIRPVARQVEGMFVQMMLKSMRDALPKDGLFSSEHTRLYTSMYDQQIAQQMTAGKGLGLAEMMVKQMTPEQPLPEESTPAAPMKFPLETVVRYQNQALSQLVQKAVPRNYDDSLPGDSKAFLAQLSLPAQLASQQSGVPHHLILAQAALESGWGQRQIRRENGEPSYNLFGVKASGNWKGPVTEITTTEYENGEAKKVKAKFRVYSSYLEALSDYVGLLTRNPRYAAVTTAASAEQGAQALQDAGYATDPHYARKLTNMIQQMKSISDKVSKTYSMNIDNLF

SEQ ID NO: 2121 - protein, 547 aa, Escherichia coli
MSSLINNAMSGLNAAQAALNTASNNISSYNVAGYTRQTTIMAQANSTLGAGGWVGNGVYVSGVQREYDAFITNQLRAAQTQSSGLTARYEQMSKIDNMLSTSTSSLATQMQDFFTSLQTLVSNAEDPAARQALIGKSEGLVNQFKTTDQYLRDQDKQVNIAIGASVDQINNYAKQIASLNDQISRLTGVGAGASPNNLLDQRDQLVSELNQIVGVEVSVQDGGTYNITMANGYSLVQGSTARQLAAVPSSADPSRTTVAYVDGTAGNIEIPEKLLNTGSLGGILTFRSQDLDQTRNTLGQLALAFAEAFNTQHKAGFDANGDAGEDFFAIGKPAVLQNTKNKGDVAIGATVTDASAVLATDYKISFDNNQWQVTRLASNTTFTVTPDANGKVAFDGLELTFTGTPAVNDSFTLKPVSDAIVNMDVLITDEAKIAMASEEDAGDSDNRNGQALLDLQSNSKTVGGAKSFNDAYASLVSDIGNKTATLKTSSATQGNVVTQLSNQQQSISGVNLDEEYGNLQRFQQYYLANAQVLQTANAIFDALINIR

SEQ ID NO: 2122 - protein, 317 aa, Escherichia coli
MRFSTQMMYQQNMRGITNSQAEWMKYGEQMSTGKRVVNPSDDPIAASQAVVLSQAQAQNSQYTLARTFATQKVSLEESVLSQVTTAIQNAQEKIVYASNGTLSDDDRASLATDIQGLRDQLLNLANTTDGNGRYIFAGYKTETAPFSEEKGKYVGGAESIKQQVDASRSMVIGHTGDKIFDSITSNAVAEPDGSASETNLFAMLDSAIAALKTPVADSEADKETAAAALDKTNRGLKNSLNNVLTVRAELGTQLNELESLDSLGSDRALGQTQQMSDLVDVDWNATISSYIMQQTALQASYKAFTDMQGLSLFQLSK

SEQ ID NO: 2123 - protein, 498 aa, Escherichia coli
MAQVINTNSLSLITQNNINKNQSALSSSIERLSSGLRINSAKDDAAGQAIANRFTSNIKGLTQAARNANDGISVAQTTEGALSEINNNLQRVRELTVQATTGTNSESDLSSIQDEIKSRLDEIDRVSGQTQFNGVNVLAKNGSMKIQVGANDNQTITIDLKQIDAKTLGLDGFSVKNNDTVTTSAPVTAFGATTTNNIKLTGITLSTEAATDTGGTNPASIEGVYTDNGNDYYAKITGGDNDGKYYAVTVANDGTVTMATGATANATVTDANTTKATTITSGGTPVQIDNTAGSATANLGAVSLVKLQDSKGNDTDTYALKDTNGNLYAADVNETTGAVSVKTITYTDSSGAASSPTAVKLGGDDGKTEVVDIDGKTYDSADLNGGNLQTGLTAGGEALTAVANGKTTDPLKALDDAIASVDKFRSSLGAVQNRLDSAVTNLNNTTTNLSEAQSRIQDADYATEVSNMSKAQIIQQAGNSVLAKANQVPQQVLSLLQG

SEQ ID NO: 2124 - protein, 465 aa, Escherichia coli
MASISSLGVGSGLDLSSILDSLTAAQKATLTPISNQQSSFTAKLSAYGTLKSALTTFQTANTALSKADLFSATSSTTAFSATTAGNAIAGKYTISVTHLAQAQTLTTRTTRDDTKTAIATSDSKLTIQQGGDKDPITIDISAANSSLSGIRDAINNAKAGVSASIINVGNGDYRLSVTSNDTGLDNAMTLSVSGDDALQSFMGYDASASSNGMEVSVAAQNAQLTVNNVAIENSSNTISDALENITLNLNDVTTGNQTLTITQDTSKAQTAIKDWVNAYNSLIDTFSSLTKYTAVDAGADSQSSSNGALLGDSTLRTIQTQLKSMLSNTVSSSSYKTLAQIGITTDPSDGKLELDADKLTAALKKDASGVGALIVGDGKKTGITTTIGSNLTSWLSTTGIIKAATDGVSKTLNKLTKDYNAASDRIDAQVARYKEQFTQLDVLMTSLNSTSSYLTQQFENNSNSK

SEQ ID NO: 2125 - protein, 468 aa, Escherichia coli
MASISSLGVGSGLDLSSILDSLTAAQKATLTPISNQQSSFTAKLSAYGTLKSALTTFQTANTALSKADLFSATSTTSSTTAFSATTAGNAIAGKYTISVTHLAQAQTLTTRTTRDDTKTAIATSDSKLTIQQGGDKDPITIDISAANSSLSGIRDAINNAKAGVSASIINVGNGEYRLSVTSNDTGLDNAMTLSVSGDDALQSFMGYDASASSNGMEVSVAAQNAQLTVNNVAIENSSNTISDALENITLNLNDVTTGNQTLTITQDTSKAQTAIKDWVNAYNSLIDTFSSLTKYTAVDAGADSQSSSNGALLGDSTLRTIQTQLKSMLSNTVSSSSYKTLAQIGITTDPSDGKLELDADKLTAALKKDASGVGALIVGDGKKTGITTTIGSNLTSWLSTTGIIKAATDGVSKTLNKLTKDYNAASDRIDAQVARYKEQFTQLDVLMTSLNSTSSYLTQQFENNSNSK

SEQ ID NO: 2126 - protein, 266 aa, Escherichia coli
MKLAHLGRQALMGVMAVALVAGMSVKSFADEGLLNKVKERGTLLVGLEGTYPPFSFQGDDGKLTGFEVEFAQQLAKHLGVEASLKPTKWDGMLASLDSKRIDVVINQVTISDERKKKYDFSTPYTISGIQALVKKGNEGTIKTADDLKGKKVGVGLGTNYEEWLRQNVQGVDVRTYDDDPTKYQDLRVGRIDAILVDRLAALDLVKKTNDTLAVTGEAFSRQESGVALRKGNEDLLKAVNDAIAEMQKDGTLQALSEKWFGADVTK

SEQ ID NO: 2127 - protein, 266 aa, Escherichia coli; identical to SEQ ID NO: 2126

SEQ ID NO: 2128 - protein, 227 aa, Escherichia coli
MRIWAVLASFLVFFYIPQSYAGVALGATRVIYPEGQKQVQLAVTNNDDKSSYLIQSWIENAEGKKDARFVITPPLFSMQGKKENTLRIIDATNGQMPEDRESLFWVNVKAIPAMDKAKTGENYLQFAIVSRIKLLYRPQGLVIPPEQAPGKLEFTRENGGLTLFNPTPYYLTVTDLKAGNKSLENTMVPPQGKVTVNIPGGYTGGDITYKTINDYGALTEQVKGVVK

SEQ ID NO: 2129 - protein, 227 aa, Escherichia coli; identical to SEQ ID NO: 2128

SEQ ID NO: 2130 - protein, 875 aa, Escherichia coli
MFFGDGGQLLSDKSLTGSAGGGNNRMKFNILPLAFFIGIIVSPARAELYFNRRFLSDDPDAVADLSAFTQGQELPPGVYRVDIYLNDTYISTRDVQFQMSQDGKQLAPCLSPEHMSAMGVNRYAVPGMERLPADTCTSLNSMIQGATFRFDVGQQRLYLTVPQLYMSNQARGYIAPEYWDNGITAALLNYDFSGNRVRDTYGGTSDYAYLNLKTGLNIGSWRLRDNTSWSYSAGKGYSQNNWQHINTWLERDIVSLRSRLTMGDSYTRGDIFDGVNFRGIQLASDDNMVPDSQRGYAPTIHGISRGTSRISIRQNGYEIYQSTLPPGPFEINDIYPAGSGGDLQVTLQEADGSVQRFNVPWSSVPVLQREGHLKYALSAGEFRSGGHQQDNPRFAEGTLKYGLPDGWTVYGGAWIAERYRAFNLGVGKNMGWLGAVSLDATRANARLPDESRHDGQSYRFLYNKSLTETGTNIQLIGYRYSTRGYFTFADTAWKKMSGYSVLTQDGVIQIQPKYTDYYNLAYNKREGAGEYQPADGESSTLYLSGSHQSYWGTDRTDRQLNAGFNSSVNDISWSLNYSLSRNAWQHETDRILSFDVSIPFSHWMRSDSTSAWRNASARYSQTLEAHGQAASTAGLYGTLLGDNNLGYSIQSGYTRGGYEGSSKTGYASLNYRGGYGNASAGYSHSGGYRQLYYGLSGGILAHANGLTLSQPLGDTLILVRAPGASDTRIENQTGVSTDWRGYAVLPYATDYRENRVALDTNTLADNVDIENTVVSVVPTHGAVVRADYKTRVGVKVLMTLMRNGKAVPFGSVVTARNGGSSIAGENGQVYLSGMPLSGQVSVKWGSQTTDQCTADYKLPKESAGQILSHVTASCR

SEQ ID NO: 2131 - protein, 470 aa, Escherichia coli
MSLSRRQFIQASGIALCAGAVPLKASAAGQQQPLPVPPLLESRRGQPLFMTVQRAHWSFTPGTRASVWGINGRYLGPTIRVWKGDDVKLIYSNRLTENVSMTVAGLQVPGPLMGGPARMMSPNADWAPVLPIRQNAATLWYHANTPNRTAQQVYNGLAGMWLVEDEVSKSLPIPNHYGVDDFPVIIQDKRLDNFGTPEYNEPGSGGFVGDTLLVNGVQSPYVEVSRGWVRLRLLNASNSRRYQLQMNDGRPLHVISGDQGFLPAPVSVKQLSLAPGERREILVDMSNGDEVSITCGEAASIVDRIRGFFEPSSILVSTLVLTLRPTGLLPLVTDSLPMRLLPTEIMAGSPIRSRDISLGDDPGINGQLWDVNRIDVTAQQGTWERWTVRADEPQAFHIEGVMFQIRNVNGAMPFPEDRGWKDTVWVDGQVELLVYFGQPSWAHFPFYFNSQTLEMADRGSIGQLLVNPVP

SEQ ID NO: 2132 - protein, 379 aa, Escherichia coli
MKKNIFKFSVLTLAVLSLTACTLVPGQNLSTSNKDVIELPDNQYDLDKMVNIYPVTPGLIDQLRAKPIMSQANPELEQQIANYEYRIGIGDVLMVTVWDHPELTTPAGQYRSASDTGNWVNADGAIFYPYIGRLKVAGKTLTQVRNEITARLDSVIESPQVDVSVAAFRSQKAYVTGEVSKSGQQPITNIPLTIMDAINAAGGLTADADWRNVVLTQNGVKTKVNLYALMQRGDLRQNKLLHPGDILFIPRNDDLKVFVMGEVGKQSTLKMDRSGMTLAEALGNAEGMNQDVADATGIFVIRATQNKQNGKIANIYQLNAKDASAMILGTEFQLEPYDIVYVTTAPLARWNRVISLLVPTISGVHDLTETSRWIQTWPN

SEQ ID NO: 2133 - protein, 379 aa, Escherichia coli; identical to SEQ ID NO: 2132

SEQ ID NO: 2134 - protein, 580 aa, Escherichia coli [sequence omitted]

SEQ ID NO: 2135 - protein, 248 aa, Escherichia coli
MKSVLKVSLAALTLAFAVSSHAADKKLVVATDTAFVPFEFKQGDKYVGFDVDLWAAIAKELKLDYELKPMDFSGIIPALQTKNVDLALAGITITDERKKAIDFSDGYYKSGLLVMVKANNNDVKSVKDLDGKVVAVKSGTGSVDYAKANIKTKDLRQFPNIDNAYMELGTNRADAVLHDTPNILYFIKTAGNGQFKAVGDSLEAQQYGIAFPKGSDELRDKVNGALKTLRENGTYNEIYKKWFGTEPK

SEQ ID NO: 2136 - protein, 248 aa, Escherichia coli; identical to SEQ ID NO: 2135

SEQ ID NO: 2137 - protein, 248 aa, Escherichia coli; identical to SEQ ID NO: 2135

SEQ ID NO: 2138 - protein, 358 aa, Escherichia coli
MKLTLKNLSMAIMMSTIVMGSSAMAADSNEKIVIAHRGASGYLPEHTLPAKAMAYAQGADYLEQDLVMTKDDNLVVLHDHYLDRVTDVADRFPDRARKDGRYYAIDFTLDEIKSLKFTEGFDIENGKKVQTYPGRFPMGKSDFRVHTFEEEIEFVQGLNHSTGKNIGIYPEIKAPWFHHQEGKDIAAKTLEVLKKYGYTGKDDKVYLQCFDADELKRIKNELEPKMGMELNLVQLIAYTDWNETQQKQPDGSWVNYNYDWMFKPGAMKQVAEYADGIGPDYHMLIEETSQPGNIKLTGMVQDAQQNKLVVHPYTVRSDKLPEYTPDVNQLYDALYNKAGVNGLFTDFPDKAVKFLNKE

SEQ ID NO: 2139 - protein, 302 aa, Escherichia coli
MQLRKPATAILALALSAGLAQADDAAPAAGSTLDKIAKNGVIVVGHRESSVPFSYYDNQQKVVGYSQDYSNAIVEAVKKKLNKPDLQVKLIPITSQNRIPLLQNGTFDFECGSTTNNVERQKQAAFSDTIFVVGTRLLTKKGGDIKDFANLKDKAVVVTSGTTSEVLLNKLNEEQKMNMRIISAKDHGDSFRTLESGRAVAFMMDDALLAGERAKAKKPDNWEIVGKPQSQEAYGCMLRKDDPQFKKLMDDTIAQVQTSGEAEKWFDKWFKNPIPPKNLNMNFELSDEMKALFKEPNDKALN

SEQ ID NO: 2140 - protein, 512 aa, Escherichia coli
MARAVHRSGLVALGIATALMASCAFAAKDVVVAVGSNFTTLDPYDANDTLSQAVAKSFYQGLFGLDKEMKLKNVLAESYTVSDDGITYTVKLREGIKFQDGTDFNAAAVKANLDRASDPANHLKRYNLYKNIAKTEAIDPTTVKITLKQPFSAFINILAHPATAMISPAALEKYGKEIGFHPVGTGPYELDTWNQTDFVKVKKFAGYWQPGLPKLDSITWRPVADNNTRAAMLQTGEAQFAFPIPYEQAALLEKNKNIELMASPSIMQRYISMNVTQKPFDNPKVREALNYAINRPALVKVAFAGYATPATGVVPPSIAYAQSYKPWPYDPVKARELLKEAGYPNGFSTTLWSSHNHSTAQKVLQFTQQQLAQVGIKAQVTAMDAGQRAAEVEGKGQKESGVRMFYTGWSASTGEADWALSPLFASQNWPPTLFNTAFYSNKQVDDFLAQALKTNDPAEKTRLYKAAQDIIWQESPWIPLVVEKLVSAHSKNLTGFWIMPDTGFSFEDADLQ

SEQ ID NO: 2141 - protein, 512 aa, Escherichia coli
MARAVHRSGLVALGIATALMASCAFAAKEVVVAVGSNFTTLDPYDANDTLSQAVAKSFYQGLFGLDKEMKLKNVLAESYTVSDDGLTYTVKLREGIKFQDGTDFNAAAVKANLDRASDPANHLKRYNLYKNIAKTEAIDPTTVKITLKQPFSAFINILAHPATAMISPAALEKYGKEIGFHPVGTGPYELDTWNQTDFVKVKKFAGYWQPGLPKLDSITWRPVADNNTRAAMLQTGEAQFAFPIPYEQAALLEKNKNIELMASPSIMQRYISMNVTQKPFDNPKVREALNYAINRPALVKVAFAGYATPATGVVPPSIAYAQSYKPWPYDPVKARELLKEAGYPNGFSTTLWSSHNHSTAQKVLQFTQQQLAQVGIKAQVTAMDAGQRAAEVEGKGQKESGVRMFYTGWSASTGEADWALSPLFASQNWPPTLFNTAFYSNKQVDDFLAQALKTNDPAEKTRLYKAAQDIIWQESPWIPLVVEKLVSAHSKNLTGFWIMPDTGFSFEDADLQ

SEQ ID NO: 2142 - protein, 512 aa, Escherichia coli
MARAVHRSGLVALGIATALMASCAFAAKNVVVAVGSNFTTLDPYDANDTLSQAVAKSFYQGLFGLDKEMKLKNVLAESYTVSDDGLTYTVKLREGIKFQDGTDFNAAAVKANLDRASDPANHLKRYNLYKNIAKTEAIDPTTVKITLKQPFSAFINILAHPATAMISPAALEKYGKEIGFHPVGTGPYELDTWNQTDFVKVKKFVGYWQPGLPKLDSITWRPVADNNTRAAMLQTGEAQFAFPIPYEQAALLEKNKNIELMASPSIMQRYISMNVTQKPFDNPKVREALNYAINRPALVKVAFAGYATPATGVVPPSIAYAQSYKPWPYDPVKARELLKKAGYPNGFSTTLWSSHNHSTAQKVLQFTQQQLAQVGIKAQVTAMDAGQRAAEVEGKGQKESGVRMFYTGWSASTGEADWALSPLFASQNWPPTLFNTAFYSNKQVDDFLAQALKTNDPAEKTRLYKAAQDIIWQESPWIPLVVEKLVSAHSKNLTGFWIMPDTGFSFEDADLQ

SEQ ID NO: 2143 - protein, 512 aa, Escherichia coli; identical to SEQ ID NO: 2141

SEQ ID NO: 2144 - protein, 512 aa, Escherichia coli
MARAVHRSGLVALGIATALMASCAFAAKDVVVAVGSNFTTLDPYDANDTLSQAVAKSFYQGLFGLDKEMKLKNVLAESYTVSDDGITYTVKLREGIKFQDGTDFNAAAVKANLDRASDPANHLKRYNLYKNIAKTEAIDPTTVKITLKQPFSAFINILAHPATAMISPAALEKYGKEIGFYPVGTGPYELDTWNQTDFVKVKKFAGYWQPGLPKLDSITWRPVADNNTRAAMLQTGEAQFAFPIPYEQATLLEKNKNIELMASPSIMQRYISMNVTQKPFDNPKVREALNYAINRPALVKVAFAGYATPATGVVPPSIAYAQSYKPWPYDPVKARELLKEAGYPNGFSTTLWSSHNHSTAQKVLQFTQQQLAQVGIKAQVTAMDAGQRAAEVEGKGQKESGVRMFYTGWSASTGEADWALSPLFASQNWPPTLFNTAFYSNKQVDDFLAQALKTNDPAEKTRLYKAAQDIIWQESPWIPLVVEKLVSAHSKNLTGFWIMPDTGFSFEDADLQ

SEQ ID NO: 2145 - protein, 512 aa, Escherichia coli; identical to SEQ ID NO: 2141

SEQ ID NO: 2146 - protein, 650 aa, Escherichia coli
MKGLNKITCCLLAALLMPCAGHAENEQYGANFNNADIRQFVEIVGQHLGKTILIDPSVQGTISVRSNDTFSQQEYYQFFLSILDLYGYSVITLDNGFLKVVRSANVKTSPGMIADSSRPGVGDELVTRIVPLENVPARDLAPLLRQMMDAGSVGNVVHYEPSNVLILTGRASTINKLIEVIKRVDVIGTEKQQIIHLEYASAEDLAEILNQLISESHGKSQMPALLSAKIVADKRTNSLIISGPEKARQRITSLLKSLDVEESEEGNTRVYYLKYAKATNLVEVLTGVSEKLKDEKGNARKPSSSGAMDNVAITADEQTNSLVITADQSVQEKLATVIARLDIRRAQVLVEAIIVEVQDGNGLNLGVQWANKNVGAQQFTNTGLPIFNAAQGVADYKKNGGITSANPAWDMFSAYNGMAAGFFNGDWGVLLTALASNNKNDILATPSIVTLDNKLASFNVGQDVPVLSGSQTTSGDNVFNTVERKTVGTKLKVTPQVNEGDAVLLEIEQEVSSVDSSSNSTLGPTFNTRTIQNAVLVKTGETVVLGGLLDDFSKEQVSKVPLLGDIPLVGQLFRYTSTERAKRNLMVFIRPTIIRDDDVYRSLSKEKYTRYRQEQQQRIDGKSKALVGSEDLPVLDENTFNSHAPAPSSR

SEQ ID NO: 2147 - protein, 368 aa, Escherichia coli
MNVLRSGLVTMLLLAAFSVQAACTWPAWEQFKKDYISQEGRVIDPSDARKITTSEGQSYGMFFALAANDRAAFDNILDWTQNNLAQGSLKERLPAWLWGKKENSKWEVLDSNSASDGDVWMAWSLLEAGRLWKEQRYTDIGSALLKRIAREEVVTVPGLGSMLLPGKVGFAEDNSWRFNPSYLPPTLAQYFTRFGAPWTTLRETNQRLLLETAPKGFSPDWVRYEKDKGWQLKAEKTLISSYDAIRVYMWVGMMPDSDPQKARMLNRFKPMATFTEKNGYPPEKVDVATGKAQGKGPVGFSAAMLPFLQNRDAQAVQRQRVADNFPGSDAYYNYVLTLFGQGWDQHRFRFSTKGELLPDWGQECANSH

SEQ ID NO: 2148 - protein, 368 aa, Escherichia coli
MNVLRSGIVTMLLLAAFSVQAACTWPAWEQFKKDYISQEGRVIDPSDARKITTSEGQSYGMFSALAANDRAAFDNILDWTQNNLAQGSLKERLPAWLWGKKENSKWEVLDSNSASDGDVWMAWSLLEAGRLWKEQRYTDIGSALLKRIAREEVVTVPGLGSMLLPGKVGFAEDNSWRFNPSYLPPTLAQYFTRFGAPWTTLRETNQRLLLETAPKGFSPDWVRYEKDKGWQLKAEKTLISSYDAIRVYMWVGMMPDSDPQKARMLNRFKPMATFTEKNGYPPEKVDVATGKAQGKGPVGFSAAMLPFLQNRDAQAVQRQRVADNFPGSDAYYNYVLTLFGQGWDQHRFRFSTKGELLPDWGQECANSH

SEQ ID NO: 2149 - protein, 1377 aa, Escherichia coli
MNRIYSLRYSAVARGFIAVSEFARKCVHKSVRRLCFPVLLLIPVLFSAGSLAGTVNNELGYQLFRDFAENKGMFRPGATNIAIYNKQGEFVGTLDKAAMPDFSAVDSEIGVATLINPQYIASVKHNGGYTNVSFGDGENRYNIVDRNNAPSLDFHAPRLDKLVTEVAPTAVTAQGAVAGAYLDKERYPVFYRLGSGTQYIKDSNGQLTKMGGAYSWLTGGTVGSLSSYQNGEMISTSSGLVFDYKLNGAMPIYGEAGDSGSPLFAFDTVQNKWVLVGVLTAGNGAGGRGNNWAVIPLDFIGQKFNEDNDAPVTFRTSEGGALEWSFNSSTGAGALTQGTTTYAMHGQQGNDLNAGKNLIFQGQNGQINLKDSVSQGAGSLTFRDNYTVTTSNGSTWTGAGIVVDNGVSVNWQVNGVKGDNLHKIGEGTLTVQGTGINEGGLKVGDGKVVLNQQADNKGQVQAFSSVNIASGRPTVVLTDERQVNPDTVSWGYRGGTLDVNGNSLTFHQLKAADYGAVLANNVDKRATITLDYALRADKVALNGWSESGKGTAGNLYKYNNPYTNTTDYFILKQSTYGYFPTDQSSNATWEFVGHSQGDAQKLVADRFNTAGYLFHGQLKGNLNVDNRLPEGVTGALVMDGAADISGTFTQENGRLTLQGHPVIHAYNTQSVADKLAASGDHSVLTQPTSFSQEDWENRSFTFDRLSLKNTDFGLGRNATLNTTIQADNSSVTLGDSRVFIDKNDGQGTAFTLEEGTSVATKDADKSVFNGTVNLDNQSVLNINDIFNGGIQANNSTVNISSDSAVLGNSTLTSTALNLNKGANALASQSFVSDGPVNISDATLSLNSRPDEVSHTLLPVYDYAGSWNLKGDDARLNVGPYSMLSGNINVQDKGTVTLGGEGELSPDLTLQNQMLYSLFNGYRNIWSGSLNAPDATVSMTDTQWSMNGNSTAGNMKLNRTIVGFNGGTSPFTTLTTDNLDAVQSAFVMRTDLNKADKLVINKSATGHDNSIWVNFLKKPSNKDTLDIPLVSAPEATADNLFRASTRVVGFSDVTPILSVRKEDGKKEWVLDGYQVARNDGQGKAAATFMHISYNNFITEVNNLNKRMGDLRDINGEAGTWVRLLNGSGSADGGFTDHYTLLQMGADRKHELGSMDLFTGVMATYTDTDASADLYSGKTKSWGGGFYASGLFRSGAYFDVIAKYIHNENKYDLNFAGAGKQNFRSHSLYAGAEVGYRYHLTDTTFVEPQAELVWGRLQGQTFNWNDSGMDVSMRRNSVNPLVGRTGVVSGKTFSGKDWSLTARAGLHYEFDLTDSADVHLKDAAGEHQINGRKDSRMLYGVGLNARFGDNTRLGLEVERSAFGKYNTDDAINANIRYSF

SEQ ID NO: 2150 - protein, 110 aa, Escherichia coli
MKKVLGVILGGLLLLPVVSNAADAQKAADNKKPVNSWTCEDFLAVDESFQPTAVGFAEALNNKDKPEDAVLDVQGIATVTPAIVQACTQDKQANFKDKVKGEWDKIKKDM

SEQ ID NO: 2151 - protein, 110 aa, Escherichia coli; identical to SEQ ID NO: 2150

SEQ ID NO: 2152 - protein, 260 aa, Escherichia coli
MKKLVLSLSLVLAFSSATAAFAAIPQNIRIGTDPTYAPFESKNSQGELVGFDIDLAKELCKRINTQCTFVENPLDALIPSLKAKKIDAIMSSLSITEKRQQEIAFTDKLYAADSRLVVAKNSDIQPTVESLKGKRVGVLQGTTQETFGNEHWAPKGIEIVSYQGQDNIYSDLTAGRIDAAFQDEVAASEGFLKQPVGKDYKFGGPSVKDEKLFGVGTGMGLRKEDNELREALNKAFAEMRADGTYEKLAKKYFDFDVYGG

SEQ ID NO: 2153 - protein, 260 aa, Escherichia coli; identical to SEQ ID NO: 2152

SEQ ID NO: 2154 - protein, 260 aa, Escherichia coli; identical to SEQ ID NO: 2152

SEQ ID NO: 2155 - protein, 137 aa, Escherichia coli
MLKRYLVLSVVTAAFSLPSLVYAAQQNILSVHILNQQTGKPAADVTVTLEKKADNGWLQLNTAKTDKDGRIKALWPEQTATTGDYRVVFKTGDYFKKQNLESFFPEIPVEFHINKVNEHYHVPLLLSQYGYSTYRGS

SEQ ID NO: 2156 - protein, 137 aa, Escherichia coli
MLKRYLVLSVATAAFSLPSLVNAAQQNILSVHILNQQTGKPAADVTVTLEKKADNGWLQLNTAKTDKDGRIKALWPEQTATTGDYRVVFKTGDYFKKQNLESFFPEIPVEFHINKVNEHYHVPLLLSQYGYSTYRGS

SEQ ID NO: 2157 - protein, 1023 aa, Escherichia coli
MPTITAAQIKSTLQSAKQSAANKLHSAGQSTKDALKKAAEQTRNAGNRLILLIPKDYKGQGSSLNDLVRTADELGIEVQYDEKNGTAITKQVFGTAEKLIGLTERGVTIFAPQLDKLLQKYQKAGNKLGGSAENIGDNLGKAGSVLSTFQNFLGTALSSMKIDELIKKQKSGGNVSSSELAKASIELINQLVDTAASLNNVNSFSQQLNKLGSVLSNTKHLNGVGNKLQNLPNLDNIGAGLDTVSGILSAISASFILSNADADTGTKAAAGVELTTKVLGNVGKGISQYIIAQRAAQGLSTSAAAAGLIASVVTLAISPLSFLSIADKFKRANKIEEYSQRFKKLGYDGDSLLAAFHKETGAIDASLTRISTVLASVSSGISAAATTSLVGAPVSALVGAVTGIISGILEASKQAMFEHVASKMADVIAEWEKKHGKNYFENGYDARHAAFLEDNFKILSQYNKEYSVERSVLITQQHWDTLIGELAGVTRNGDKTLSGKSYIDYYEEGKRLEKKPDEFQKQVFDPLKGNIDLSDSKSSTLLKFVTPLLTPGEEIRERRQSGKYEYITELLVKGVDKWTVKGVQDKGSVYDYSNLIQHASVGNNQYREIRIESHLGDGDDKVFLSAGSANIYAGKGHDVVYYDKTDTGYLTIDGTKATEAGNYTVTRVLGGDVKVLQEVVKEQEVSVGKRTEKTQYRSYEFTHINGKNLTETDNLYSVEELIGTTRADKFFGSKFADIFHGADGDDHIEGNDGNDRLYGDKGNDTLSGGNGDDQLYGGDGNDKLIGGAGNNYLNGGDGDDELQVQGNSLAKNVLSGGKGNDKLYGSEGADLLDGGEGNDLLKGGYGNDIYRYLSGYGHHIIDDDGGKDDKLSLADIDFRDVAFRREGNDLIMYKAEGNVLSIGHKNGITFKNWFEKESGDISNHQIEQIFDKDGRVITPDSLKKALEYQQSNNKASYVYGNDALAYGSQGNLNPLINEISKIISAAGNFDVKEERAAASLLQLSGNASDFSYGRNSITLTASA

SEQ ID NO: 2158 - protein, 1024 aa, Escherichia coli
  MOD_RES (517)..(517): Any amino acid
MTTITTAQIKSTLQSAKQSAANKLHSAGQSTKDALKKAAEQTRNAGNRLILLIPKDYKGQGSSLNDLVRTADELGIEVQYDEKNGTAITKQVFGTAEKLIGLTERGVTIFAPQLDKLLQKYQKAGNILGGGAENIGDNLGKAGGILSTFQNFLGTALSSMKIDELIKKQKSGGNVSSSELAKASIELINQLVDTVASLNNNVNSFSQQLNTLGSVLSNTKHLNGVGNKLQNLPNLDNIGAGLDTVSGILSAISASFILSNADADTRTKAAAGVELTTKVLGNVGKGISQYIIAQRAAQGLSTSAAAAGLIASAVTLAISPLSFLSIADKFKRANKIEEYSQRFKKLGYDGDSLLAAFHKETGAIDASLTTISTVLASVSSGISAAATTSLVGAPVSALVGAVTGIISGILEASKQAMFEHVASKMADVIAEWEKKHGKNYFENGYDARHAAFLEDNFKILSQYNKEYSVERSVLITQQHWDTLIGELAGVTRNGDKTLSGKSYIDYYEEGKRLEKKXDEFQKQVFDPLKGNIDLSDSKSSTLLKFVTPLLTPGEEIRERRQSGKYEYITELLVKGVDKWTVKGVQDKGAVYDYSNLIQHASVGNNQYREIRIESHLGDGDDKVFLSAGSANIYAGKGHDVVYYDKTDTGYLTIDGTKATEAGNYTVTRVLGGDVKVLQEVVKEQEVSVGKRTEKTQYRSYEFTHINGKNLTETDNLYSVEELIGTTRADKFFGSKFTDIFHGADGDDLIEGNDGNDRLYGDKGNDTLSGGNGDDQLYGGDGNDKLIGVAGNNYLNGGDGDDEFQVQGNSLAKNVLFGGKGNDKLYGSEGADLLDGGEGDDLLKGGYGNDIYRYLSGYGHHIIDDDGGKEDKLSLADIDFRDVAFKREGNDLIMYKGEGNVLSIGHKNGITFRNWFEKESGDISNHEIEQIFDKSGRIITPDSLKKALEYQQRNNKASYVYGNDALAYGSQGDLNPLINEISKIISAAGSFDVKEERTAASLLQLSGNASDFSYGRNSITLTTSA

SEQ ID NO: 2159 - protein, 303 aa, Escherichia coli
MTEIVADKTVEVVKNAIETADGALDLYNKYLDQVIPWQTFDETIKELSRFKQEYSQAASVLVGNIKTLLMDSQDKYFEATQTVYEWCGVATQLLAAYILLFDEYNEKKASAQKDILIKVLDDGITKLNEAQKSLLVSSQSFNNASGKLLALDSQLTNDFSEKSSYFQSQVDKIRKEAYAGAAAGVVAGPFGLIISYSIAAGVVEGKLIPELKNKLKSVQSFFTTLSNTVKQANKDIDAAKLKLTTEIAAIGEIKTETETTRFYVDYDDLMLSLLKEAANKMINTCNEYQKRHGKKTLFEVPEV

SEQ ID NO: 2160 - protein, 303 aa, Escherichia coli
MTEIVADKTVEVVKNAIETADGALDLYNKYLDQVIPWQTFDETIKELSRFKQEYSQAASVLVGDIKTLLMDSQDKYFEATQTVYEWCGVATQLLAAYILLFDEYNEKKASAQKDILIKVLDDGITKLNEAQKSLLVSSQSFNNASGKLLALDSQLTNDFSEKSSYFQSQVDKIRKEAYAGAAAGVVAGPFGLIISYSIAAGVVEGKLIPELKNKLKSVQNFFTTLSNTVKQANKDIDAAKLKLTTEIAAIGEIKTETETTRFYVDYDDLMLSLLKEAAKKMINTCNEYQKRHGKKTLFEVPEV

SEQ ID NO: 2161 - protein, 412 aa, Escherichia coli
MKQWIAALLLMLIPGVQAAKPQKVTLMVDDVPVAQVLQALAEQEKLNLVVSPDVSGTVSLHLTDVPWKQALQTVVKSAGLITRQEGNILSVHSIAWQNNNIARQEAEQARAQANLPLENRSITLQYADAGELAKAGEKLLSAKGSMTVDKRTNRLLLRDNKTALSALEQWVAQMDLPVGQVELSAHIVTINEKSLRELGVKWTLADAQHAGGVGQVTTLGSDLSVATATTHVGFNIGRINGRLLDLELSALEQKQQLDIIASPRLLASHLQPASIKQGSEIPYQVSSGESGATSVEFKEAVLGMEVTPTVLQKGRIRLKLHISQNVPGQVLQQADGEVLAIDKQEIETQVEVKSGETLALGGIFTRKNKSGQDSVPLLGDIPWFGQLFRHDGKEDERRELVVFITPRLVSSE

SEQ ID NO: 2162 - protein, 72 aa, Escherichia coli
MKKLMLAIFISVLSFPSFSQSTESLDSSKEKITLETKKCDVVKNNSEKKSENMNNTFYCCELCCNPACAGCY

SEQ ID NO: 2163 - protein, 72 aa, Escherichia coli
MKKSILFIFLSVLSFSPFAQDAKPAGSSKEKITLESKKCNIVKKNNESSPESMNSSNYCCELCCNPACTGCY

SEQ ID NO: 2164 - protein, 72 aa, Escherichia coli
MKKSILFIFLSVLSFSPFAQDAKPVESSKEKITLESKKCNIAKKSNKSGPESMNSSNYCCELCCNPACTGCY

SEQ ID NO: 2165 - protein, 18 aa, Escherichia coli
NTFYCCELCCYPACAGCN

SEQ ID NO: 2166 - protein, 71 aa, Escherichia coli
MKKNIAFLLASMFVFSIATNAYASTQSNKKDLCEHYRQIAKESCKKGFLGVRDGTAGACFGAQIMVAAKGC

SEQ ID NO: 2167 - protein, 865 aa, Escherichia coli
MTIEYTKNYHHLTRIATFCALLYCNTAFSAELVEYDHTFLMGQNASNIDLSRYSEGNPAIPGVYDVSVYVNDQPIINQSITFVAIEGKKNAQACITLKNLLQFHINSPDINNEKAVLLARDETLGNCLNLTEIIPQASVRYDVNDQRLDIDVPQAWVMKNYQNYVDPSLWENGINAAMLSYNLNGYHSETPGRKNESIYAAFNGGMNLGAWRLRASGNYNWMTDSGSNYDFKNRYVQRDIASLRSQLILGESYTTGETFDSVSIRGIRLYSDSRMLPPTLASFAPIIHGVANTNAKVTITQGGYKIYETTVPPGAFVIDDLSPSGYGSDLIVTIEESDGSKRTFSQPFSSVVQMLRPGVGRWDISGGQVLKDDIQDEPNLFQASYYYGLNNYLTGYTGIQITDNNYTAGLLGLGLNTSVGAFSFDVTHSNVRIPDDKTYQGQSYRVSWNKLFEETSTSLNIAAYRYSTQNYLGLNDALTLIDEVKHPEQDLEPKSMRNYSRMKNQVTVSINQPLKFEKKDYGSFYLSGSWSDYWASGQNRSNYSIGYSNSTSWGSYSVSAQRSWNEDGDTDDSVYLSFTIPIEKLLGTEQRTSGFQSIDTQISSDFKGNNQLNVSSSGYSDNARVSYSVNTGYTMNKASKDLSYVGGYASYESPWGTLAGSISANSDNSRQVSLSTDGGFVLHSGGLTFSNDSFSDSDTLAVVQAPGAQGARINYGNSTIDRWGYGVTSALSPYHENRIALDINDLENDVELKSTSAVAVPRQGSVVFADFETVQGQSAIMNITRSDGKNIPFAADIYDEQGNVIGNVGQGGQAFVRGIEQQGNISIKWLEQSKPVSCLAHYQQSPEAEKIAQSIILNGIRCQIQ

SEQ ID NO: 2168 - protein, 328 aa, Escherichia coli
MNRRNFIKAASCGALLTGALPSVSHAAAENRPPIPGSLGMLYDSTLCVGCQACVTKCQDINFPERNPQGEQTWSNNDKLSPYTNNIIQVWTSGTGVNKDQEENGYAYIKKQCMHCVDPNCVSVCPVSALKKDPKTGIVHYDKDVCTGCRYCMVACPYNVPKYDYNNPFGALHKCELCNQKGVERLDKGGLPGCVEVCPAGAVIFGTREELMAEAKKRLALKPGSEYHYPRQTLKSGDTYLHTVPKYYPHLYGEKEGGGTQVLVLTGVPYENLDLPKLDDLSTGARSENIQHTLYKGMMLPLAVLAGLTVLVRRNTKNDHHDGGDDHES

SEQ ID NO: 2169 - protein, 328 aa, Escherichia coli; identical to SEQ ID NO: 2168

SEQ ID NO: 2170 - protein, 732 aa, Escherichia coli
MMISKKYTLWALNPLLLTMMAPAVAQQTDDETFVVSANRSNRTVAEMAQTTWVIENAELEQQIQGGKELKDALAQLIPGLDVSSRSRTNYGMNVRGRPLVVLVDGVRLNSSRTDSRQLDSIDPFNMHHIEVIFGATSLYGGGSTGGLINIVTKKGQPETMMEFEAGTKSGFSSSKDHDERIAGAVSGGNEHISGRLSVAYQKFGGWFDGNGDATLLDNTQTGLQYSDRLDIMGTGTLNIDESRQLQLITQYYKSQGDDDYGLNLGKGFSAIRGTSTPFVSNGLNSDRIPGTDGHLISLQYSDSAFLGQELVGQVYYRDESLRFYPFPTVNANKQVTAFSSSQQDTDQYGMKLTLNSKPMDGWQITWGLDADHERFTSNQMFFDLAQASASGGLNNKKIYTTGRYPSYDITNLAAFLQSGYDINNLFTLNGGVRYQYTENKIDDFIGYAQQRQIGAGKATSADAFWRLSRLRHFLFNAGLLMHITEPQQAWLNFSQGLELPDPGKYYGRGIYGAAVNGHLPLTKSVNVSDSKLEGVKVDSYELGWRFTGNNLRTQIAAYYSISDKSVVANKDLTISVVDDKRRIYGVEGAVDYLIPDTDWSTGVNFNVLKTESKVNGTWQKYDVKTASPSKATAYIGWAPDPWSLRVQSTTSFDVSDAQGYKVDGYTTVDLLGSYQLPVGTLSFSIENLFDRDYTTVWGQRAPLYYSPGYGPASLYDYKGRGRTFGLNYSVLF

SEQ ID NO: 2171 - protein, 157 aa, Escherichia coli
MGRISSGGMMFKAITTVAALVIATSAMAQDDLTISSLAKGETTKAAFNQMVQGHKLPAWVMKGGTYTPAQTVTLGDETYQVMSACKPHDCGSQRIAVMWSEKSNQMTGLFSTIDEKTSQEKLTWLNVNDALSIDGKTVLFAALTGSLENHPDGFNFK

SEQ ID NO: 2172 - protein, 157 aa, Escherichia coli; identical to SEQ ID NO: 2171

SEQ ID NO: 2173 - protein, 736 aa, Escherichia coli
MIKKTLPVLILLALSGSFSTAVAADKKETQNFYYPETLDLTPLRLHSPESNPWGADFDYATRFQQLDMEALKKDIKDLLTTSQDWWPADYGHYGPFFIRMAWHGAGTYRTYDGRGGASGGQQRFEPLNSWPDNVNLDKARRLLWPVKKKYGSSISWGDLMVLTGNVALESMGFKTLGFAGGREDDWESDLVYWGPDNKPLADNRDKNGKLQKPLAATQMGLIYVNPEGPGGKPDPLASAKDIREAFSRMAMDDEETVALIAGGHTFGKAHGAASPEKCIGAGPDGAPVEEQGLGWKNKCGTGNGKYTITSGLEGAWSTSPTQFTMQYLKNLYKYEWELHKSPAGAYQWKPKKAANIVQDAHDPSVLHPLMMFTTDIALKVDPEYKKITTRFLNDPKAFEQAFARAWFKLTHRDMGPAARYLGNEVPAESFIWQDPLPAADYTMIDGKDIKSLKEQVMDLGIPASELIKTAWASASTFRVTDYRGGNNGARIRLQPEINWEVNEPEKLKKVLASLTSLQREFNKKQSDGKKVSLADLIVLSGNAAIEDAARKAGVELEIPFTPGRTDASQEQTDVASFSVLEPTADGFRNYYSKSRSHISPVESLIDKASQLDLTVPEMTALLGGLRVMDINTNNSSLGVFTDTPGVLDNKFFVNLLDMSTRWSKADKEDTYNGFDRKTGALKWKASSVDLIFSSNPELRAVAEVYASDDARNKFIHDFVKSWNKVMNSDRFDLNNK

SEQ ID NO: 2174 - protein, 558 aa, Escherichia coli
MKLFKSILLIAACHAAQASAAIDINADPNLTGAAPLTGILNGQQSDTQNMSGFDNTPPPSPPVVMSRMFGAQLFNGTSADSGATVGFNPDYILNPGDSIQVRLWGAFTFDGALQVDPKGNIFLPNVGPVKVAGVSNSQLNALVTSKVKEVYQSNVNVYASLLQAQPVKVYVTGFVRNPGLYGGVTSDSLLNYLIKAGGVDPERGSYVDIVVKRGNRVRSNVNLYDFLLNGKLGLSQFADGDTIIVGPRQHTFSVQGDVFNSYDFEFRESSIPVTEALSWARPKPGATHITIMRKQGLQKRSEYYPISSAPGRMLQNGDTLIVSTDRYAGTIQVRVEGAHSGEHAMVLPYGSTMRAVLEKVRPNSMSQMNAVQLYRPSVAQRQKEMLNLSLQKLEEASLSAQSSTKEEASLRMQEAQLISRFVAKARTVVPKGEVILNESNIDSVLLEDGDVINIPEKTSLVMVHGEVLFPNAVSWQKGMTTEDYIEKCGGLTQKSGNARIIVIRQNGAAVNAEDVDSLKPGDEIMVLPKYESKNIEVTRGISTILYQLAVGAKVILSL

SEQ ID NO: 2175 - protein, 558 aa, Escherichia coli
MKLFKSILLIAACHAAQASATIDINADPNLTGAAPLTGILNGQKSDTQNMSGFDNTPPPAPPVVMSRMFGAQLFNGTSADSGATVGFNPDYILNPGDSIQVRLWGAFTFDGALQVDPKGNIFLPNVGPVKIAGVSNSQLNALVTSKVKEVYQSNVNVYASLLQAQPVKVYVTGFVRNPGLYGGVTSDSLLNYLIKAGGVDPERGSYVDIVVKRGNRVRSNVNLYDFLLNGKLGLSQFADGDTIIVGPRQHTFSVQGDVFNSYDFEFRESSIPVTEALSWARPKPGATHITIMRKQGLQKRSEYYPISSAPGRMLQNGDTLIVSTDRYAGTIQVRVEGAHSGEHAMVLPYGSTMRAVLEKVRPNSMSQMNAVQLYRPSVAQRQKEMLNLSLQKLEEASLSAQSSTKEEASLRMQEAQLISRFVAKARTVVPKGEVILNESNIDSVLLEDGDVINIPEKTSLVMVHGEVLFPNAVSWQKGMTTEDYIEKCGGLTQKSGNARIIVIRQNGARVNAEDVDSLKPGDEIMVLPKYESKNIEVTRGISTILYQLAVGAKVILSL

SEQ ID NO: 2176 - protein, 446 aa, Escherichia coli
MMITLRKLPLAVAVAAGVMSAQAMAVDFHGYARSGIGWTGSGGEQQCFQTTGAQSKYRLGNECETYAELKLGQEVWKEGDKSFYFDTNVAYSVAQQNDWEATDPAFREANVQGKNLIEWLPGSTIWAGKRFYQRHDVHMIDFYYWDISGPGAGLENIDVGFGKLSLAATRSSEAGGSSSFASNNIYDYTNETANDVFDVRLAQMEINPGGTLELGVDYGRANLRDNYRLVDGASKDGWLFTAEHTQSVLKGFNKFVVQYATDSMTSQGKGLSQGSGVAFDNEKFAYNINNNGHMLRILDHGAISMGDNWDMMYVGMYQDINWDNDNGTKWWTVGIRPMYKWTPIMSTVMEIGYDNVESQRTGDKNNQYKITLAQQWQAGDSIWSRPAIRVFATYAKWDEKWGYDYNGDSKVNPNYGKAVPADFNGGSFGRGDSDEWTFGAQMEIWW

SEQ ID NO: 2177 - protein, 446 aa, Escherichia coli
MMITLRKLPLAVAVAAGVMSAQAMAVDFHGYARSGIGWTGSGGEQQCFQTTGAQSKYRLGNECETYAELKLGQEVWKEGDKSFYFDTNVAYSVAQQNDWEATDPAFREANVQGKNLIEWLPGSTIWAGKRFYQRHDVHMIDFYYWDISGPGAGLENIDVGFGKLSLAATRSSEAGGSSSFASNNIYDYTNETANDVFDVRLAQMEINPGGTLELGVDYGRANLRDNYRLVDGASKDGWLFTAEHTQSVLKGFNKFVVQYATDSMTSQGKGLSQGSGVAFDNEKFAYNINNNGHMLRILDHGAISMGDNWDMMYVGMYQDINWDNDNGTKWWTVGIRPMYKWTPIMSTVMEIGYDNVESQRTGDKNNQYKITLAQQWQAGDSIWSRPAIRVFATYAKWDEKWGYDYTGSSSTNPYYGKAVSADFNGGSFGRGDSDEWTFGAQMEIWW

SEQ ID NO: 2178 - protein, 446 aa, Escherichia coli; identical to SEQ ID NO: 2177

SEQ ID NO: 2179 - protein, 446 aa, Escherichia coli
MMITLRKLPLAVAVAAGVMSAQAMAVDFHGYARSGIGWTGSGGEQQCFQTTGAQSKYRLGNECETYAELKLGQEVWKEGDKSFYFDTNVAYSVAQQNDWEATDPAFREANVQGKNLIEWLPGSTIWAGKRFYQRHDVHMIDFYYWDISGPGAGLENIDVGFGKLSLAATRSSEAGGSSSFASNNIYDYTNETANDVFDVRLAQMEINPGGTLELGVDYGRANLRDNYRLVDGASKDGWLFTAEHTQSVLKGFNKFVVQYATDSMTSQGKGLSQGSGVAFDNEKFAYNINNNGHMLRILDHGAISMGDNWDMMYVGMYQDINWDNDNGTKWWTVGIRPMYKWTPIMSTVMEIGYDNVESQRTGDKNNQYKITLAQQWQAGDSIWSRPAIRVFATYAKWDEKWGYDYNGDSKVNPNYGKAVTADFNGGSFGRGDSDEWTFGAQMEIWW

SEQ ID NO: 2180 - protein, 446 aa, Escherichia coli
MMITLRKLPLAVAVAAGVMSAQAMAVDFHGYARSGIGWTGSGGEQQCFQTTGAQSKYRLGNECETYAELKLGQEVWKEGDKSFYFDTNVAYSVAQQNDWEATDPAFREANVQGKNLIEWLPGSTIWAGKRFYQRHDVHMIDFYYWDISGPGAGLENIDVGFGKLSLAATRSSEAGGSSSFASNNIYDYTNETANDVFDVRLAQMEVNPGGTLELGVDYGRANLRDNYRLVDGASKDGWLFTAEHTQSVLKGFNKFVVQYATDSMTSQGKGLSQGSGVAFDNEKFAYNINNNGHMLRILDHGAISMGDNWDMMYVGMYQDINWDNDNGTKWWTVGIRPMYKWTPIMSTVMEIGYDNVESQRTGDKNNQYKITLAQQWQAGDSIWSRPAIRVFATYAKWDEKWGYDYNGDSKVNPNYGKAVPADFNGGSFGRGDSDEWTFGAQMEIWW

SEQ ID NO: 2181 - protein, 446 aa, Escherichia coli; identical to SEQ ID NO: 2180

SEQ ID NO: 2182 - protein, 446 aa, Escherichia coli
MMITLRKLPLAVAVAAGVMSAQAMAVDFHGYARSGIGWTGSGGEQQCFQTTGAQSKYRLGNECETYAELKLGQEVWKEGDKSFYFDTNVAYSVAQQNDWEATDPAFREANVQGKNLIEWLPGSTIWAGKRFYQRHDVHMIDFYYWDISGPGAGLENIDVGFGKLSLAATRSSEAGGSSSFASNNIYDYTNETANDVFDVRLAQMEINPGGTLELGVDYGRANLRDNYRLVDGASKDGWLFTAEHTQSVLKGFNKFVVQYATDSMTSQGKGLSQGSGVAFDNEKFAYNINNNGHMLRILDHGAISMGDNWDMMYVGMYQDINWDNDNGTKWWTVGIRPMYKWTPIMSTVMEIGYDNVESQRTGDKNNQYKITLAQQWQAGDSIWSRPAIRVFATYAKWDEKWGYDYTGNANTNTNFGKAVPADFNGGSFGRGDSDEWTFGAQMEIWW

SEQ ID NO: 2183 - protein, 446 aa, Escherichia coli; identical to SEQ ID NO: 2177

SEQ ID NO: 2184 - protein, 446 aa, Escherichia coli; identical to SEQ ID NO: 2176

SEQ ID NO: 2185 - protein, 446 aa, Escherichia coli [sequence omitted]

SEQ ID NO: 2186 - protein, 446 aa, Escherichia coli [sequence omitted]

SEQ ID NO: 2187 - protein, 446 aa, Escherichia coli; identical to SEQ ID NO: 2176

SEQ ID NO: 2188 - protein, 446 aa, Escherichia coli; identical to SEQ ID NO: 2177

SEQ ID NO: 2189 - protein, 446 aa, Escherichia coli
MMITLRKLPLAVAVAAGVMSAQAMAVDFHGYARSGIGWTGSGGEQQCFQTTGAQSKYRLGNECETYAELKLGQEVWKEGDKSFYFDTNVAYSVAQKNDWEATDPAFREANVQGKNLIEWLPGSTIWAGKRFYQRHDVHMIDFYYWDISGPGAGLENIDVGFGKLSLAATRSSEAGGSSSFASNNIYDYTNETANDVFDVRLAQMEINPGGTLELGVDYGRANLRDNYRLVDGASKDGWLFTAEHTQSVLKGFNKFVVQYATDSMTSQGKGLSQGSGVAFDNEKFAYNINNNGHMLRILDHGAISMGDNWDMMYVGMYQDINWDNDNGTKWWTVGIRPMYKWTPIMSTVMEIGYDNVESQRTGDKNNQYKITLAQQWQAGDSIWSRPAIRVFATYAKWDEKWGYDYTGSSSTNPYYGKAVSADFNGGSFGRGDSDEWTFGAQMEIWW

SEQ ID NO: 2190 - protein, 446 aa, Escherichia coli; identical to SEQ ID NO: 2177

SEQ ID NO: 2191 - protein, 446 aa, Escherichia coli; identical to SEQ ID NO: 2176

SEQ ID NO: 2192 - protein, 446 aa, Escherichia coli [sequence omitted]

SEQ ID NO: 2193 - protein, 446 aa, Escherichia coli; identical to SEQ ID NO: 2176

SEQ ID NO: 2194 - protein, 446 aa, Escherichia coli
MMITLRKLPLAVAVAAGVMSAQAMAVDFHGYARSGIGWTGSGGEQQCFQTTGAQSKYRLGNECETYAELKLGQEVWKEGDKSFYFDTNVAYSVAQQNDWEATDPAFREANVQGKNLIEWLPGSTIWAGKRFYQRHDVHMIDFYYWDISGPGAGLENIDVGFGKLSLAATRSSEAGGSSSFASNNIYDYTNETANDVFDVRLAQMEINPGGTLELGVDYGRANLRDNYRLVDGASKDGWLFTAEHTQSVLKGFNKFVVQYATDSMTSQGKGLSQGSGVAFDNQKFAYNINNNGHMLRILDHGAISMGDNWDMMYVGMYQDINWDNDNGTKWWTVGIRPMYKWTPIMSTVMEIGYDNVESQRTGDKNNQYKITLAQQWQAGDSIWSRPAIRVFATYAKWDEKWGYDYNGDSKVNPNYGKAVPADFNGGSFGRGDSDEWTFGAQMEIWW

SEQ ID NO: 2195 - protein, 446 aa, Escherichia coli; identical to SEQ ID NO: 2182

SEQ ID NO: 2196 - protein, 446 aa, Escherichia coli; identical to SEQ ID NO: 2177

SEQ ID NO: 2197 - protein, 367 aa, Escherichia coli
MNIKGKALLAGCIALAFSNMALAEDIKVAVVGAMSGPVAQYGDQEFTGAEQAVADINAKGGIKGNKLQIVKYDDACDPKQAVAVANKVVNDGIKYVIGHLCSSSTQPASDIYEDEGILMITPAATAPELTARGYQLILRTTGLDSDQGPTAAKYILEKVKPQRIAIVHDKQQYGEGLARAVQDGLKKGNANVVFFDGITAGEKDFSTLVARLKKENIDFVYYGGYHPEMGQILRQARAAGLKTQFMGPEGVANVSLSNIAGESAEGLLVTKPKNYDQVPANKPIVDAIKAKKQDPSGAFVWTTYAALQSLQAGLNQSDDPAEIAKYLKANSVDTVMGPLTWDEKGDLKGFEFGVFDWHANGTATDAK

SEQ ID NO: 2198 - protein, 367 aa, Escherichia coli; identical to SEQ ID NO: 2197

SEQ ID NO: 2199 - protein, 367 aa, Escherichia coli; identical to SEQ ID NO: 2197

SEQ ID NO: 2200 - protein, 369 aa, Escherichia coli
MKRNAKTIIAGMIALAISHTAMADDIKVAVVGAMSGPIAQWGDMEFNGARQAIKDINAKGGIKGDKLVGVEYDDACDPKQAVAVANKIVNDGIKYVIGHLCSSSTQPASDIYEDEGILMISPGATNPELTQRGYQHIMRTAGLDSSQGPTAAKYILETVKPQRIAIIHDKQQYGEGLARSVQDGLKAANANVVFFDGITAGEKDFSALIARLKKENIDFVYYGGYYPEMGQMLRQARSVGLKTQFMGPEGVGNASLSNIAGDAAEGMLVTMPKRYDQDPANQGIVDALKADKKDPSGPYVWITYAAVQSLATALERTGSDEPLALVKDLKANGANTVIGPLNWDEKGDLKGFDFGVFQWHADGSSTAAK

SEQ ID NO: 2201 - protein, 203 aa, Escherichia coli
MKKIAITCALLSSLVASSVWADAASDLKSRLDKVSSFHASFTQKVTDGSGAAVQEGQGDLWVKRPNLFNWHMTQPDESILVSDGKTLWFYNPFVEQATATWLKDATGNTPFMLIARNQSSDWQQYNIKQNGDDFVLTPKASNGNLKQFTINVGRDGTIHQFSAVEQDDQRSSYQLKSQQNGAVDAAKFTFTPPQGVTVDDQRK

SEQ ID NO: 2202 - protein, 203 aa, Escherichia coli; identical to SEQ ID NO: 2201

SEQ ID NO: 2203 - protein, 203 aa, Escherichia coli; identical to SEQ ID NO: 2201

SEQ ID NO: 2204 - protein, 203 aa, Escherichia coli; identical to SEQ ID NO: 2201

SEQ ID NO: 2205 - protein, 203 aa, Escherichia coli; identical to SEQ ID NO: 2201

SEQ ID NO: 2206 - protein, 203 aa, Escherichia coli; identical to SEQ ID NO: 2201

SEQ ID NO: 2207 - protein, 203 aa, Escherichia coli; identical to SEQ ID NO: 2201

SEQ ID NO: 2208 - protein, 203 aa, Escherichia coli; identical to SEQ ID NO: 2201

SEQ ID NO: 2209 - protein, 203 aa, Escherichia coli; identical to SEQ ID NO: 2201

SEQ ID NO: 2210 - protein, 203 aa, Escherichia coli; identical to SEQ ID NO: 2201

SEQ ID NO: 2211 - protein, 207 aa, Escherichia coli
MPLPDFRLIRLLPLAALVLTACSVTTPKGPGKSPDSPQWRQHQQDVRNLNQYQTRGAFAYISDQQKVYARFFWQQTGQDRYRLLLTNPLGSTELELNAQPGNVQLVDNKGQRYTADDAEEMIGKLTGMPIPLNSLRQWILGLPGDATDYKLDDQYRLSEITYSQNGKNWKVVYGGYDTKTQPAMPANMELTDGGQRIKLKMDNWIVK

SEQ ID NO: 2212 - protein, 207 aa, Escherichia coli
MPLPDFRLIRLLPLAALVLTACSVTTPKGPGKSPDSPQWRQHQQDVRNLNQYQTRGAFAYISDQQKVYARFFWQQTGQDRYRLLLTNPLGSTELELNAQPGNVQLVDNKGQRYTSDDAEEMIGKLTGMPIPLNSLRQWILGLPGDATDYKLDDQYRLSEITYSQNGKNWKVVYGGYDTKTQPAMPANMELTDGGQRIKLKMDNWVVK

SEQ ID NO: 2213 - protein, 207 aa, Escherichia coli
MPLPDFRLIRLLPLAALVLTACSVTTPKGPGKSPDSPQWRQHQQDVRNLNQYQTRGAFAYISDQQKVYARFFWQQTGQDRYRLLLTNPLGSTELELNAQPGNVQLVDNKGQRYTSDDAEEMIGKLTGMPIPLNSLRQWILGLPGDATDYKLDDQYRLSEITYSQNGKNWKVVYGGYDTKTQPAMPANMELTDGGQRIKLKMDNWIVK

SEQ ID NO: 2214 - protein, 207 aa, Escherichia coli; identical to SEQ ID NO: 2211

SEQ ID NO: 2215 - protein, 207 aa, Escherichia coli; identical to SEQ ID NO: 2211

SEQ ID NO: 2216 - protein, 207 aa, Escherichia coli; identical to SEQ ID NO: 2211

SEQ ID NO: 2217 - protein, 207 aa, Escherichia coli
MPLPDFRLIRLLPLAALVLTACSVTTPKGPGKSPDSPQWRQHQQDVRNLNQYQTRGSFAYISDQQKVYARFFWQQTGQDRYRLLLTNPLGSTELELNAQPGNVQLVDNKGQRYTSDDAEEMIGKLTGMPIPLNSLRQWILGLPGDATDYKLDDQYRLSEITYSQNGKNWKVVYGGYDTKTQPAMPANMELTDGGQRIKLKMDNWIVK

SEQ ID NO: 2218 - protein, 207 aa, Escherichia coli; identical to SEQ ID NO: 2213

SEQ ID NO: 2219 - protein, 207 aa, Escherichia coli; identical to SEQ ID NO: 2211

SEQ ID NO: 2220 - protein, 207 aa, Escherichia coli; identical to SEQ ID NO: 2211

SEQ ID NO: 2221 - protein, 207 aa, Escherichia coli; identical to SEQ ID NO: 2211

SEQ ID NO: 2222 - protein, 207 aa, Escherichia coli; identical to SEQ ID NO: 2211

SEQ ID NO: 2223 - protein, 207 aa, Escherichia coli
MPLPDFRFIRLLPLAALVLTACSVTTPKGPGKSPDSPQWRQHQQDVRNLNQYQTRGAFAYISDQQKVYARFFWQQTGQDRYRLLLTNPLGSTELELNAQPGNVQLVDNKGQRYTSDDAEEMIGKLTGMPIPLNSLRQWILGLPGDATDYKLDDQYRLSEITYSQNGKNWKVVYGGYDTKTQPAMPANMELTDGGQRIKLKMDNWIVK

SEQ ID NO: 2224 - protein, 207 aa, Escherichia coli
MPLPDFRFIRLLPLAALVLTACSITTPKGPGKSPDSPQWRQHQQDVRNLNQYQTRGAFAYISDQQKVYARFFWQQTGQDRYRLLLTNPLGSTELELNAQPGNVQLVDNKGQRYTSDDAEEMIGKLTGMPIPLNSLRQWILGLPGDATDYKLDDQYRLSEITYSQNGKNWKVVYGGYDTKTQPAMPANMELTDGGQRIKLKMDNWIVK

SEQ ID NO: 2225 - protein, 207 aa, Escherichia coli; identical to SEQ ID NO: 2211

SEQ ID NO: 2226 - protein, 207 aa, Escherichia coli; identical to SEQ ID NO: 2211

SEQ ID NO: 2227 - protein, 207 aa, Escherichia coli; identical to SEQ ID NO: 2211

SEQ ID NO: 2228 - protein, 207 aa, Escherichia coli; identical to SEQ ID NO: 2211

SEQ ID NO: 2229 - protein, 207 aa, Escherichia coli; identical to SEQ ID NO: 2213

SEQ ID NO: 2230 - protein, 678 aa, Escherichia coli
MVPSTFSRLKAARCLPVVLAALIFAGCGTHTPDQSTAYMQGTAQADSAFYLQQMQQSSDDTRINWQLLAIRALVKEGKTGQAVELFNQLPQELNDTQRREKTLLAAEIKLAQKDFAGAQNLLAKITPADLEQNQQARYWQAKIDASQGRPSIDLLRALIAQEPLLGAKEKQQNIDATWQALSSMTQEQANTLVINADENILQGWLDLQRVWFDNRNDPDMMKAGIADWQKRYPNNPGAKMLPTQLVNVKAFKPASTNKIALLLPLNGQAAVFGRTIQQGFEAAKNIGTQPVVAQVAAAPAADVAEQPQPQTVDGVASPAQASVSDLTGEQPAAQSVPVSAPATSTAAVSAPANPSAELKIYDTSSQPLSQILSQVQQDGASIVVGPLLKNNVEELLKSNTPLNVLALNQPENIENRVNICYFALSPEDEARDAARHIRDQGKQAPLVLIPRSSLGDRVANAFAQEWQKLGGGTVLQQKFGSTSELRAGVNGGSGIALTGSPITPRETTDSGMTTNNPTLQTTPTDDQFTNNGGRVDAVYIVATPGEIAFIKPMIAMRNGSQSGATLYASSRSAQGTAGPDFRLEMEGLQYSEIPMLAGGNLPLMQQALSAVNNDYSLARMYAMGVDAWSLANHFSQMRQVQGFEINGNTGSLTANPDCVINRKLSWLQYQQGQVVPAS

SEQ ID NO: 2231 - protein, 678 aa, Escherichia coli
MVPSTFSRLKAARCLPVVLAALIFAGCGTHTPDQSTAYMQGTAQADSAFYLQQMQQSSDDTRINWQLLAIRALVKEGKTGQAVELFNQLPQELNDAQRREKTLLAVEIKLAQKDFAGAQNLLAKITPADLEQNQQARYWQAKIDASQGRPSIDLLRALIAQEPLLGAKEKQQNIDATWQALSSMTQEQANTLVINADENILQGWLDLQRVWFDNRNDPDMMKAGIADWQKRYPNNPGAKMLPTQLVNVKAFKPASTNKIALLLPLNGQAAVFGRTIQQGFEAAKNIGTQPVAAQVAAAPAADVAEQPQPQTVDGVASPAQASVSDLTGEQPAAQPVPVSAPATSTAAVSAPANPSAELKIYDTSSQPLSQILSQVQQDGASIVVGPLLKNNVEELLKSNTPLNVLALNQPENIENRVNICYFALSPEDEARDAARHIRDQGKQAPLVLIPRSSLGDRVANAFAQEWQKLGGGTVLQQKFGSTSELRAGVNGGSGIALTGSPITLRATTDSGMTTNNPTLQTTPTDDQFTNNGGRVDAVYIVATPGEIAFIKPMIAMRNGSQSGATLYASSRSAQGTAGPDFRLEMEGLQYSEIPMLAGGNLPLMQQALSAVNNDYSLARMYAMGVDAWSLANHFSQMRQVQGFEINGNTGSLTANPDCVINRNLSWLQYQQGQVVPVS

SEQ ID NO: 2232 - protein, 213 aa, Escherichia coli
MTKMSRYALITALAMFLAGCVGQREPAPVEEVKPAPEQPAEPQQPVPTVPSVPTIPQQPGPIEHEDQTAPPAPHIRHYDWNGAMQPMVSKMLGADGVTAGSVLLVDSVNNRTNGSLNAAEATETLRNALANNGKFTLVSAQQLSMAKQQLGLSPQDSLGTRSKAIGIARNVGAHYVLYSSASGNVNAPTLQMQLMLVQTGEIIWSGKGAVSQQ

SEQ ID NO: 2233 - protein, 213 aa, Escherichia coli; identical to SEQ ID NO: 2232

SEQ ID NO: 2234 - protein, 78 aa, Escherichia coli
MKATKLVLGAVILGSTLLAGCSSNAKIDQLSSDVQTLNAKVDQLSNDVNAMRSDVQAAKDDAARANQRLDNMATKYRK

SEQ ID NO: 2235 - protein, 78 aa, Escherichia coli; identical to SEQ ID NO: 2234

SEQ ID NO: 2236 - protein, 78 aa, Escherichia coli; identical to SEQ ID NO: 2234

SEQ ID NO: 2237 - protein, 185 aa, Escherichia coli
MKFKTNKLSLNLVLASSLLAASIPAFAVTGDTDQPIHIESDQQSLDMQGNVVTFTGNVIVTQGTIKINADKVVVTRPGGEQGKEVIDGYGKPATFYQMQDNGKPVEGHASQMHYELAKDFVVLTGNAYLQQVDSNIKGDKITYLVKEQKMQAFSDKGKRVTTVLVPSQLQDKNNKGQTPAQKKGN

SEQ ID NO: 2238 - protein, 185 aa, Escherichia coli; identical to SEQ ID NO: 2237

SEQ ID NO: 2239 - protein, 185 aa, Escherichia coli; identical to SEQ ID NO: 2237

SEQ ID NO: 2240 - protein, 784 aa, Escherichia coli
MKKRIPTLLATMIATALYSQQGLAADLASQCMLGVPSYDRPLVQGDTNDLPVTINANHAKGDYPDDAVFTGSVDIMQGNSRLQADEVQLHQKEAPGQPEPVRTVDALGNVHYDDNQVILKGPKGWANLNTKDTNVWEGDYQMVGRQGRGKADLMKQRGENRYTILDNGSFTSCLPGSDTWSVVGSEIIHDREEQVAEIWNARFKVGPVSIFYSPYLQLPVGDKRRSGFLIPNAKYTTTNYFEFYLPYYWNIAPNMDATITPHYMHRRGNIMWENEFRYLSQAGAGLMELDYLPSDKVYEDEHPNDDSSRRWLFYWNHSGVMDQVWRFNVDYTKVSDPSYFNDFDNKYGSSTDGYATQKFSVGYAVQNFNATVSTKQFQVFSEQNTSSYSAEPQLDVNYYQNDVGPFDTRIYGQAVHFVNTRDDMPEATRVHLEPTINLPLSNNWGSINTEAKLLATHYQQTNLDWYNSRNTTKLDESVNRVMPQFKVDGKMVFERDMEMLAPGYTQTLEPRAQYLYVPYRDQSDIYNYDSSLLQSDYSGLFRDRTYGGLDRIASANQVTTGVTSRIYDDAAVERFNISVGQIYYFTESRTGDDNITWENDDKTGSLVWAGDTYWRISERWGLRGGIQYDTRLDNVATSNSSIEYRRDEDRLVQLNYRYASPEYIQATLPKYYSTAEQYKNGISQVGAVASWPIADRWSIVGAYYYDTNANKQADSMLGVQYSSCCYAIRVGYERKLNGWDNDKQHAVYDNAIGFNIELRGLSSNYGLGTQEMLRSNILPYQNTL

SEQ ID NO: 2241 - protein, 784 aa, Escherichia coli
MKKRIPTLLATMIATALYSQQGLAADLASQCMLGVPSYDRPLVQGDTNDLPVTINADHAKGDYPDDAVFTGSVDIMQGNSRLQADEVQLHQKEAPGQPEPVRTVDALGNVHYDDNQVILKGPKGWANLNTKDTNVWEGDYQMVGRQGRGKADLMKQRGENRYTILDNGSFTSCLPGSDTWSVVGSEIIHDREEQVAEIWNARFKVGPVPIFYSPYLQLPVGDKRRSGFLIPNAKYTTTNYFEFYLPYYWNIAPNMDATITPHYMHRRGNIMWENEFRYLSQAGAGLMELDYLPSDKVYKDEHPNDDSSRRWLFYWNHSGVMDQVWRFNVDYTKVSDPSYFNDFDNKYGSSTDGYATQKFSVGYAVQNFNATVSTKQFQVFSEQNTSSYSAEPQLDVNYYQNDVGPFDTRIYGQAVHFVNTRDDMPEATRVHLEPTINLPLSNNWGSINTEAKLLATHYQQTNLDWYNSRNTTKLAESANRVMPQFKVDGRMVFERDMEMLAPGYTQTLEPRAQYLYVPYRDQSKIYNYDSSLLQSDYSGLFRDRTYGGLDRIASANQVTTGVTSRIYDDAAVERFNISVGQIYYFTESRTGDDNITWENDDKTGSLVWAGDTYWRISDRWGLRGGIQYDTRLDNVATSNSSIEYRRDEDRLVQLNYRYASPEYIQATLPKYYSTAEQYKNGISQVGAVASWPIADRWSIVGAYYYDTNANKQADSMLGVQYSSCCYAIRVGYERKLNGWDNDKQHAVYDNAIGFNIELRGLSSNYGLGTQEMLRSNILPYQNTL

SEQ ID NO: 2242 - protein, 784 aa, Escherichia coli
MKKRIPTLLATMIATALYSQQGLAADLASQCMLGVPSYDRPLVQGDTNDLPVTINADHAKGDYPDDAVFTGSVDIMQGNSRLQADEVQLHQKEAPGQPEPVRTVDALGNVHYDDNQVILKGPKGWANLNTKDTNVWEGDYQMVGRQGRGKADLMKQRGENRYTILDNGSFTSCLPGSDTWSVVGSEIIHDREEQVAEIWNARFKVGPVPIFYSPYLQLPVGDKRRSGFLIPNAKYTTTNYFEFYLPYYWNIAPNMDATITPHYMHRRGNIMWENEFRYLSQAGAGLMELDYLPSDKVYKDEHPNDDSSRRWLFYWNHSGVMDQVWRFNVDYTKVSDPSYFNDFDNKYGSSTDGYATQKFSVGYAVQNFNATVSTKQFQVFSEQNTSSYSAEPQLDVNYYQNDVGPFDTRIYGQAVHFVNTRDDMPEATRVHLEPTINLPLSNNWGSINTEAKLLATHYQQTNLDWYNSRNTTRLAESANRVMPQFKVDGRMVFERDMEMLAPGYTQTLEPRAQYLYVPYRDQSKIYNYDSSLLQSDYSGLFRDRTYGGLDRIASANQVTTGVTSRIYDDAAVERFNISVGQIYYFTESRTGDDNITWENDDKTGSLVWAGDTYWRISDRWGLRGGIQYDTRLDNVATSNSSIEYRRDEDRLVQLNYRYASPEYIQATLPKYYSTAEQYKNGISQVGAVASWPIADRWSIVGAYYYDTNANKQADSMLGVQYSSCCYAIRVGYERKLNGWDNDKQHAVYDNAIGFNIELRGLSSNYGLGTQEMLRSNILPYQNTL

SEQ ID NO: 2243 - protein, 784 aa, Escherichia coli; identical to SEQ ID NO: 2241

SEQ ID NO: 2244 - protein, 784 aa, Escherichia coli
MKKRIPTLLATMIATALYSQQGLAADLASQCMLGVPSYDRPLVQGDTNDLPVTINADHAKGDYPDDAVFTGSVDIMQGNSRLQADEVQLHQKEAPGQPEPVRTVDALGNVHYDDNQVILKGPKGWANLNTKDTNVWEGDYQMVGRQGRGKADLMKQRGENRYTILDNGSFTSCLPGSDTWSVVGSEIIHDREEQVAEIWNARFKVGPVPIFYSPYLQLPVGDKRRSGFLIPNAKYTTTNYFEFYLPYYWNIAPNMDATITPHYMHRRGNIMWENEFRYLSQAGAGLMELDYLPSDKVYEDEHPNDDSSRRWLFYWNHSGVMDQVWRFNVDYTKVSDPSYFNDFDNKYGSSTDGYATQKFSVGYAVQNFNATVSTKQFQVFSEQNTSSYSAEPQLDVNYYQNDVGPFDTRIYGQAVHFVNTRDDMPEATRVHLEPTINLPLSNNWGSINTEAKLLATHYQQTNLDWYNSRNTTKLDESVNRVMPQFKVDGKMVFERDMEMLAPGYTQTLEPRAQYLYVPYRDQSDIYNYDSSLLQSDYSGLFRDRTYGGLDRIASANQVTTGVTSRIYDDAAVERFNISVGQIYYFTESRTGDDNITWENDDKTGSLVWAGDTYWRISERWGLRGGIQYDTRLDNVATSNSSIEYRRDEDRLVQLNYRYASPEYIQATLPKYYSTAEQYKNGISQVGAVASWPIADRWSIVGAYYYDTNANKQADSMLGVQYSSCCYAIRVGYERKLNGWDNDKQHAVYDNAIGFNIELRGLSSNYGLGTQEMLRSNILPYQNTL

SEQ ID NO: 2245 - protein, 784 aa, Escherichia coli; identical to SEQ ID NO: 2241

SEQ ID NO: 2246 - protein, 193 aa, Escherichia coli
MRYLATLLLSLAVLITAGCGWHLRDTTQVPSTMKVMILDSGDPNGPLSRAVRNQLRLNGVELLDKETTRKDVPSLRLGKVSIAKDTASVFRNGQTAEYQMIMTVNATVLIPGRDIYPISAKVFRSFFDNPQMALAKDNEQDMIVKEMYDRAAEQLIRKLPSIRAADIRSDEEQTSTTTDTPATPARVSTTLGN

SEQ ID NO: 2247 - protein, 193 aa, Escherichia coli; identical to SEQ ID NO: 2246

SEQ ID NO: 2248 - protein, 193 aa, Escherichia coli; identical to SEQ ID NO: 2246

SEQ ID NO: 2249 - protein, 193 aa, Escherichia coli; identical to SEQ ID NO: 2246

SEQ ID NO: 2250 - protein, 193 aa, Escherichia coli
MRYLATLLLSLAVLITAGCGWHLRDTTQVPSTMKVMILDSGDPNGPLSRAVRNQLRLNGVELLDKETTRKDVPSLRLGAVSISQDTASVFRNGQTAEYQMVMTVSASVLIPGRDIYPISTKVFRSFFDNPQMALAKDNEQEMIIKEMYDRAAEQLIRKLPSIRAADIRSDEEQTSTTTDTPATPARVSTTLGN

SEQ ID NO: 2251 - protein, 193 aa, Escherichia coli; identical to SEQ ID NO: 2250

SEQ ID NO: 2252 - protein, 193 aa, Escherichia coli
MRYLATLLLSLAVLITAGCGWHLRDTTQVPSTMKVMILDSGDPNGPLSRAVRNQLRLNGVELLDKETTRKDVPSLRLGAVSISQDTASVFRNGQTAEYQMVMTVSASVLIPGRDIYPISAKVFRSFFDNPQMALAKDNEQEMIIKEMYDRAAEQLIRKLPSIRAADIRSDEEQTSTTTDTPATPARVSTTLGN

SEQ ID NO: 2253 - protein, 193 aa, Escherichia coli
MRYLATLLLSLAVLITAGCGWHLRDTTQVPSTMKVMILDSGDPNGPLSRAVRNQLRLNGVELLDKETTRKDVPSLRLGKVSIAKDTASVFRNGQTAEYQMIMTVNATVLIPGRDIYPISAKVFRSFFDNPQMALAKDNEQDMIVKEMYDRAAEQLIRKLPSIRAADIRSDEEQTSTTTDTLATPARVSTTLGN

SEQ ID NO: 2254 - protein, 193 aa, Escherichia coli; identical to SEQ ID NO: 2246

SEQ ID NO: 2255 - protein, 193 aa, Escherichia coli; identical to SEQ ID NO: 2246

SEQ ID NO: 2256 - protein, 193 aa, Escherichia coli; identical to SEQ ID NO: 2246

SEQ ID NO: 2257 - protein, 193 aa, Escherichia coli; identical to SEQ ID NO: 2246

SEQ ID NO: 2258 - protein, 193 aa, Escherichia coli; identical to SEQ ID NO: 2246

SEQ ID NO: 2259 - protein, 193 aa, Escherichia coli; identical to SEQ ID NO: 2246

SEQ ID NO: 2260 - protein, 193 aa, Escherichia coli; identical to SEQ ID NO: 2252

SEQ ID NO: 2261 - protein, 193 aa, Escherichia coli; identical to SEQ ID NO: 2246

SEQ ID NO: 2262 - protein, 193 aa, Escherichia coli; identical to SEQ ID NO: 2246

SEQ ID NO: 2263 - protein, 193 aa, Escherichia coli; identical to SEQ ID NO: 2246

SEQ ID NO: 2264 - protein, 193 aa, Escherichia coli; identical to SEQ ID NO: 2246

SEQ ID NO: 2265 - protein, 193 aa, Escherichia coli; identical to SEQ ID NO: 2246

SEQ ID NO: 2266 - protein, 340 aa, Escherichia coli
MTLHRFKKIALLSALGIAAISMNVQAAERIAFIPKLVGVGFFTSGGNGAQQAGKELSVDVTYDGPTEPSVSGQVQLINNFVNQGYNAIIVSAVSPDGLCPALKRAMQRGVRVLTWDSDTKPECRSYYINQGTPAQLGGMLVDMAARQVNKDKAKVAFFYSSPTVTDQNQWVKEAKAKIAKEHPGWEIVTTQFGYNDATKSLQTAEGILKAYSDLDAIIAPDANALPAAAQAAENLKNDKVAIVGFSTPNVMRPYVERGTVKEFGLWDVVQQGKISVYVADALLKKGSMKTGDKLDIQGVGQVEVSPNSVQGYDYEADGNGIVLLPERVIFNKENIGKYDF

SEQ ID NO: 2267 - protein, 340 aa, Escherichia coli
MTLHRFKKIALLSALGIAAISMNVQAAERIAFIPKLVGVGFFTSGGNGAQQAGKELGVDVTYDGPTEPSVSGQVQLINNFVNQGYNAIIVSAVSPDGLCPALKRAMQRGVRVLTWDSDTKPECRSYYINQGTPAQLGGMLVDMAARQVNKDKAKVAFFYSSPTVTDQNQWVKEAKAKIAKEHPGWEIVTTQFGYNDATKSLQTAEGILKAYSDLDAIIAPDANALPAAAQAAENLKNDKVAIVGFSTPNVMRPYVERGTVKEFGLWDVVQQGKISVYVADALLKKGSMKTGDKLDIQGVGQVEVSPNSVQGYDYEADGNGIVLLPERVIFNKENIGKYDF

SEQ ID NO: 2268 - protein, 340 aa, Escherichia coli
MTLHRFKKIALLSALGIAAISMNVQAAERIAFIPKLVGVGFFTSGGNGAQQAGKELGVDVTYDGPTEPSVSGQVQLINNFVNQGYNAIIVSAVSPDGLCPALKRAMQRGVRVLTWDSDTKPECRSYYINQGTPAQLGGMLVDMAARQVNKDKAKVAFFYSSPTVTDQNQWVKEAKAKIAKEHPGWEIVTTQFGYNDATKSLQTAEGILKAYSDLDAIIAPDANALPAAAQAAENLKNDKVAIVGFSTPNVMRPYVERGTVKEFGLWDVVQQGKISVYVADALLKKGSMKTGDKLDIKGVGQVEVSPNSVQGYDYEADGNGIVLLPERVIFNKENIGKYDF

SEQ ID NO: 2269 - protein, 340 aa, Escherichia coli
MTLHRFKKIALLSVLGIAAISMNVQAAERIAFIPKLVGVGFFTSGGNGAQQAGKELGVDVTYDGPTEPSVSGQVQLINNFVNQGYNAIIVSAVSPDGLCPALKRAMQRGVRVLTWDSDTKPECRSYYINQGTPAQLGGMLVDMAARQVNKDKAKVAFFYSSPTVTEQNQWVKEAKAKIAKEHPGWEIVTTQFGYNDATKSLQTAEGILKAYSDLDAIIAPDANALPAAAQAAENLKNDKVAIVGFSTPNVMRPYVERGTVKEFGLWDVVQQGKISVYVADALLKKGSMKTGDKLDIQGVGQVEVSPNSVQGYDYEADGNGIVLLPERVIFNKENIGKYDF

SEQ ID NO: 2270 - protein, 340 aa, Escherichia coli
MTLHRFKKIALLSVLGIAAISMNVQAAERIAFIPKLVGVGFFTSGGNGAQQAGKELGVDVTYDGPTEPSVSGQVQLINNFVNQGYNAIIVSAVSPDGLCPALKRAMQRGVRVLTWDSDTKPECRSYYINQGTPAQLGGMLVDMAARQVNKDKAKVAFFYSSPTVTDQNQWVKEAKAKIAKEHPGWEIVTTQFGYNDATKSLQTAEGILKAYSDLDAIIAPDANALPAAAQAAENLKNDKVAIVGFSTPNVMRPYVERGTVKEFGLWDVVQQGKISVYVADALLKKGSMKTGDKLDIQGVGQVEVSPNSVQGYDYEADGNGIVLLPERVIFNKENIGKYDF

SEQ ID NO: 2271 - protein, 340 aa, Escherichia coli; identical to SEQ ID NO: 2268

SEQ ID NO: 2272 - protein, 340 aa, Escherichia coli; identical to SEQ ID NO: 2267

SEQ ID NO: 2273 - protein, 49 aa, Escherichia coli
MKKAKAIFLFILIVSGFLLVACQANYIRDVQGGTVAPSSSSELTGIAVQ

SEQ ID NO: 2274 - protein, 47 aa, Escherichia coli
MKKITGIILLLLAVIILSACQANYIRDVQGGTVSPSSTAEVTGLATQ

SEQ ID NO: 2275 - protein, 45 aa, Escherichia coli
MRKRFFVGIFAINLLVGCQANYIRDVQGGTIAPSSSSKLTGIAVQ

SEQ ID NO: 2276 - protein, 52 aa, Escherichia coli
MCGKILLILFFIMTLSACQVNHIRDVKGGTVAPSSSSRLTGLKLSKRSKDPL

SEQ ID NO: 2277 - protein, 47 aa, Escherichia coli
MKKITWIILLLLAAIILAACQANYIHDVQGGTVSPSSSAELTGLATQ

SEQ ID NO: 2278 - protein, 47 aa, Escherichia coli
MKKITGIILLLLAVIILAACQANYIRDVQGGTVSPSSTAELTGVETQ

SEQ ID NO: 2279 - protein, 47 aa, Escherichia coli
MKKITGIILLLLAAIILAACQANYIRDVQGGTVSPSSTAELTGVETQ

SEQ ID NO: 2280 - protein, 47 aa, Escherichia coli
MKKITGIILLLLAVIILAACQANYIRDVQGGTVSPSSTAEVTGLATQ

SEQ ID NO: 2281 - protein, 47 aa, Escherichia coli
MKKITGIILLLLAAIILAACQANYIRDVQGGTVSPSSSAELTGLATQ

SEQ ID NO: 2282 - protein, 396 aa, Escherichia coli
MKIKTGARILALSALTTMMFSASALAKIEEGKLVIWINGDKGYNGLAEVGKKFEKDTGIKVTVEHPDKLEEKFPQVAATGDGPDIIFWAHDRFGGYAQSGLLAEITPDKAFQDKLYPFTWDAVRYNGKLIAYPIAVEALSLIYNKDLLPNPPKTWEEIPALDKELKAKGKSALMFNLQEPYFTWPLIAADGGYAFKYENGKYDIKDVGVDNAGAKAGLTFLVDLIKNKHMNADTDYSIAEAAFNKGETAMTINGPWAWSNIDTSKVNYGVTVLPTFKGQPSKPFVGVLSAGINAASPNKELAKEFLENYLLTDEGLEAVNKDKPLGAVALKSYEEELAKDPRIAATMENAQKGEIMPNIPQMSAFWYAVRTAVINAASGRQTVDEALKDAQTRITK

SEQ ID NO: 2283 - protein, 396 aa, Escherichia coli; identical to SEQ ID NO: 2282

SEQ ID NO: 2284 - protein, 306 aa, Escherichia coli
MKMNKSLIVLCLSAGLLASAPGISLADVNYVPQNTSDAPAIPSAALQQLTWTPVDQSKTQTTQLATGGQQLNVPGISGPVAAYSVPANIGELTLTLTSEVNKQTSVFAPNVLILDQNMTPSAFFPSSYFTYQEPGVMSADRLEGVMRLTPALGQQKLYVLVFTTEKDLQQTTQLLDPAKAYAKGVGNSIPDIPDPVARHTTDGLLKLKVKTNSSSSVLVGPLFGSSAPAPVTVGNTAAPAVAAPAPAPVKKSEPMLNDTESYFNTAIKNAVAKGDVDKALKLLDEAERLGSTSARSTFISSVKGKG

SEQ ID NO: 2285 - protein, 195 aa, Escherichia coli
MKKKVLAIALVTVFTGTGVAQAADVTAQAVATWSATAKKDTTSKLVVTPLGSLAFQYAEGIKGFNSQKGLFDVAIEGDSTATAFKLTSRLITNTLTQLDTSGSTLNVGVDYNGAAVEKTGDTVMIDTANGVLGGNLSPLANGYNASNRTTAQDGFTFSIISGTTNGTTAVTDYSTLPEGIWSGDVSVQFDATWTS

SEQ ID NO: 2286 - protein, 372 aa, Escherichia coli
MTGDNTLIHSHGINRRDFMKLCAALAATMGLSSKAAAEMAESVTNPQRPPVIWIGAQECTGCTESLLRATHPTVENLVLETISLEYHEVLSAAFGHQVEENKHNALEKYKGQYVLVVDGSIPLKDNGIYCMVAGEPIVDHIRKAAEGAAAIIAIGSCSAWGGVAAAGVNPTGAVSLQEVLPGKTVINIPGCPPNPHNFLATVAHIITYGKPPKLDDKNRPTFAYGRLIHEHCERRPHFDAGRFAKEFGDEGHREGWCLYHLGCKGPETYGNCSTLQFCDVGGVWPVAIGHPCYGCNEEGIGFHKGIHQLANVENQTPRSQKPDVNAKEGGNVSAGAIGLLGGVVGLVAGVSVMAVRELGRQQKKDNADSRGE

SEQ ID NO: 2287 - protein, 372 aa, Escherichia coli; identical to SEQ ID NO: 2286

SEQ ID NO: 2288 - protein, 372 aa, Escherichia coli; identical to SEQ ID NO: 2286

SEQ ID NO: 2289 - protein, 86 aa, Escherichia coli
MKKCLTLLIATVLSGISLTAYAAQPMSNLDSGQLRPAGTVSATGASNLSDLEDKLAEKAREQGAKGYVINSAGGNDQMFGTATIYK

SEQ ID NO: 2290 - protein, 86 aa, Escherichia coli; identical to SEQ ID NO: 2289

SEQ ID NO: 2291 - protein, 75 aa, Escherichia coli
MREITESQLRYISGAGGAPATSANAAGAAAIVGALAGIPGGPLGVVVGAVSAGLTTAIGSTVGSGSASSSAGGGS

SEQ ID NO: 2292 - protein, 75 aa, Escherichia coli; identical to SEQ ID NO: 2291

SEQ ID NO: 2293 - protein, 58 aa, Escherichia coli
MIKHFHFNKLSSGKKNNVPSPAKGVIQIKKSASQLTKGGAGHVPEYFVGIGTPISFYG

SEQ ID NO: 2294 - protein, 488 aa, Escherichia coli
MINRQLSRLLLCSILGSTTLISGCALVRKDSAPHQQLKPEQIKLADDIHLASSGWPQAQWWKQLNDPQLDALIQRTLSGSHTLAEAKLREEKAQSQADLLDAGSQLQVAALGMLNRQRVSANGFLSPYAMDAPALGMDGPYYTEATVGLFAGLDLDLWGVHRSAVTAAIGAHNAALAETAAVELSLTTGVAQLYYSMQASYQMLDLLEQTRDVIDYAVKAHQSKVAHGLEAQVPFHGARAQILAVDKQIAAVKGQITETRESLRALIGAGASDMPEIKPVALPRVQTGIPATLSYELLARRPDLQAMRWYVQASLDQVDSARALFYPSFDIKAFFGLDSIHLDTLFKKTSRQFNFIPGLKLPLFDGGRLNANLEGTRAASNMMIERYNQSVLNAVRDVAVNGTRLQTLNDEREMQAERVEATRFTQRAAEAAYQRGLTSRLQATEARLPVLAEEMSLLMLDSRRVIQSIQLMKSLGSGYQAAPVVEKK

SEQ ID NO: 2295 - protein, 488 aa, Escherichia coli
MINRQLSRLLLCSILGSTTLISGCALVRKDSAPHQQLKPEQIKLADDIHLASSGWPQAQWWKQLNDPQLDSLIQRTLSGSHPLAEAKLREEKAQSQADLLDAGSQLQVAALGMLNRQRVSANGFLSPYAMDAPALGMDGPYYTEATVGLFAGLDLDLWGVHRSAVAAAIGAHNAALAETAAVELSLTTGVAQLYYSMQASYQMLDLLEQTRDVIDYAVKAHQSKVAHGLEAQVPFHGARAQILAVDKQIAAVKGQITETRESLRALIGAGASDMPEIKPVALPRVQTGIPATLSYELLARRPDLQAMRWYVQASLDQVDSARALFYPSFDIKAFFGLDSIHLDTLFKKTSRQFNFIPGLKLPLFDGGRLNANLEGTRAASNMMIERYNQSVLNAVRDVAVNGTRLQTLNDEREMQAERVEATRFTQRAAEAAYQRGLTSRLQATEARLPVLAEEMSLLMLDSRRVIQSIQLMKSLGGGYQAAPIVEKK

SEQ ID NO: 2296 - protein, 488 aa, Escherichia coli
MINRQLSRLLLCSILGSTTLISGCALVRKDSAPHQQLKPEQIKLADDIHLASSGWPQAQWWKQLNDPQLDALIQRTLSGSHTLAEAKLREEKAQSQADLLDAGSQLQVAALGMLNRQRVSANGFLSPYSMDAPALGMDGPYYTEATVGLFAGLDLDLWGVHRSAVAAAIGAHNAALAETAAVELSLATGVAQLYYSMQASYQMLDLLEQTHDVIDYAVKAHQSKVAHGLEAQVPFHGARAQILAVDKQIVAVKGQITETRESLRALIGAGASDMPEIRPVALPQVQTGIPATLSYELLARRPDLQAMRWYVQASLDQVDSARALFYPSFDIKAFFGLDSIHLHTLFKKTSRQFNFIPGLKLPLFDGGRLNANLEGTRAASNMMIERYNQSVLNAVRDVAVNGTRLQTLNDEREMQAERVEATRFTQRAAEAAYQRGLTSRLQATEARLPVLAEEMSLLMLDSRRVIQSIQLMKSLGGGYQAGPVVEKK

SEQ ID NO: 2297 - protein, 478 aa, Escherichia coli
MNRDSFYPAIACFPLLLMLAGCAPMHETRQALSQQTPAAQVDTALPTALKNGWPDSQWWLEYHDNQLTSLINNALQNAPDMQVAEQRIQLAEAQAKAVATQDGPQIDFSADMERQKMSAEGLMGPFALNDPAAGTTGPWYTNGTFGLTAGWHLDIWGKNRAEVTARLGTVKARAAEREQTRQLLAGSVARLYWEWQTQAALNTVLQQIEKEQNTIIATDRQLYQNGITSSVEGVETDINASKTRQQLNDVAGKMKIIEARLIALTNHQTKSLTLKPVALPKVASQLPDELGYSLLARRADLQAAHWYVESSLSTIDAAKAAFYPDINLMAFLQQDALHLSDLFRHSAQQMGVTAGLTLPIFDSGRLNANLDIAKAESNLSIASYNKAVVEAVNDVARAASQVQTLAEKNQHQAQIERDALRVVGLAQARFNAGIIAGSRVSEARIPALRERANGLLLQGQWLDASIQLTGALGGGYKR

SEQ ID NO: 2298 - protein, 478 aa, Escherichia coli
MNRDSFYPAIACFPLLLMLAGCAPMHETRQALSQQTPAAQVDTALPTALKNGWPDSQWWLEYHDNQLTSLINNALQSAPDMQVAEQRIQLAEAQAKAVATQDGPQLDFSADMERQKMSAEGLMGPFALNDPAAGTTGPWYTNGTFGLTAGWHLDIWGKNRAEITARLGTVKARAAEREQTRQLLAGSVARLYWEWQTQAALNTVLQQIEKEQNTIIATDRQLYQNGITSSVEGVETDINASKTRQQLNDVAGKMKIIEARLNALTNHQTKSLKLKTVALPKVASQLPDELGYSLLARRADLQAAHWYVESSLSTIDAAKAAFYPDINLMAFLQQDALHLSDLFRHSAQQMGVTAGLTLPIFDSGRLNANLDIAKAESNLSIASYNKAVVEAVNDVARAASQVQTLAEKNQHQAQIERDALRVVGLAQARFNAGLIAGSRVSEARIPALRERANGLLLQGQWLDASIQLTGALGGGYKR

SEQ ID NO: 2299 - protein, 478 aa, Escherichia coli
  MOD_RES (56)..(56): Any amino acid
MNRDSFYPAIACFPLLLMLAGCAPMHETRQALSQQTPAAQVDTALPTALKMVGQTXQWWLEYHDNQLTSLINNALQNAPDMQVAEQRIQLAEAQAKAVATQDGPQIDFSADMERQKMSAEGLMGPFALNDPAAGTTGPWYTNGTFGLTAGWHLDIWGKNRAEVTARLGTVKARAAEREQTRQLLAGSVARLYWEWQTQAALNTVLQQIEKEQNTIIATDRQLYQNGITSSVEGVETDINASKTRQQLNDVAGKMKIIEARLSALTNNQTKSLKLKPVALPKVASQLPDELGYSLLARRADLQAAHWYVESSLSTIDAAKAAFYPDINLMAFLQQDALHLSDLFRHSAQQMGVTAGLTLPIFDSGRLNANLDIAKAESNLSIASYNKAVVEAVNDVARAASQVQTLAEKNQHQAQIERDALRVVGLAQARFNAGIIAGSRVSEARIPALRERANGLLLQGQWLDASIQLTGALGGGYKR

SEQ ID NO: 2300 - protein, 274 aa, Escherichia coli
MNKTAIALLALLASSASLAATPWQKITQPVPGSAQSIGSFSNGCIVGADTLPIQSEHYQVMRTDQRRYFGHPDLVMFIQRLSSQVSNLGMGTVLIGDMGMPAGGRFNGGHASHQTGLDVDIFLQLPKTRWTSAQLLRPQALDLVSRDGKHVVSTLWKPEIFSLIKLAAQDKDVTRIFVNPAIKQQLCLDAGTDRDWLRKVRPWFQHRAHMHVRLRCPADSLECEDQPLPPPGDGCGAELQSWFEPPKPGTTKPEKKTPPPLPPSCQALLDEHVI

SEQ ID NO: 2301 - protein, 274 aa, Escherichia coli
MNKTAIALLALLASSASLAATPWQKITQPVPGSAQSIGSFSNGCIVGADTLPIQSEHYQVMRTDQRRYFGHPDLVMFIQRLSRQVSNLGMGTVLIGDMGMPAGGRFNGGHASHQTGLDVDIFLQLPKTRWTSAQLLRPQALDLVSRDGKHVVPALWKPEIFSLIKLAAQDKDVTRIFVNPAIKQQLCLDAGTDRDWLRKVRPWFQHRAHMHVRLRCPADSLECEDQPLPPPGDGCGAELQSWFEPPKPGTTKPEKKTPPPLPPSCQALLDEHVI

SEQ ID NO: 2302 - protein, 274 aa, Escherichia coli; identical to SEQ ID NO: 2301

SEQ ID NO: 2303 - protein, 274 aa, Escherichia coli
MNKTAIALLALLASSASLAATPWQKITQPVPGSAQSIGSFSNGCIVGADTLPIQSEHYQVMRTDQRRYFGHPDLVMFIQRLSSQVSNLGMGTVLIGDMGMPAGGRFNGGHASHQTGLDVDIFLQLPKTRWTSAQLLRPQALDLVSRDGKHVVSTLWKPEIFSLIKLAAQDKDVTRIFVNPAIKQQLCLDAGTDRDWLRKVRPWFQHRAHMHVRLRCPADSLECEDQPLPPPGDGCGAELQSWFAPPKPGTTKPEKKTPSPLPPSCQALLDEHVI

SEQ ID NO: 2304 - protein, 274 aa, Escherichia coli
MNKTAIALLALLASSVSLAATPWQKITQPVPGSAQSIGSFSNGCIVGADTLPIQSEHYQVMRTDQRRYFGHPDLVMFIQRLSSQVSNLGMGTVLIGDMGMPAGGRFNGGHASHQTGLDVDIFLQLPKTRRTSAQLLRPQALDLVSRDGKHVVSTLWKPEIFSLIKLAAQDKDVTRIFVNPAIKQQLCLDAGTDRDWLRKVRPWFQHRAHMHVRLRCPADSLECEDQPLPPPGDGCGAELQSWFEPPKPGTTKPEKKTPPPLPPSCQALLDEHVI

SEQ ID NO: 2305 - protein, 274 aa, Escherichia coli; identical to SEQ ID NO: 2304

SEQ ID NO: 2306 - protein, 274 aa, Escherichia coli; identical to SEQ ID NO: 2301

SEQ ID NO: 2307 - protein, 274 aa, Escherichia coli; identical to SEQ ID NO: 2301

SEQ ID NO: 2308 - protein, 274 aa, Escherichia coli; identical to SEQ ID NO: 2300

SEQ ID NO: 2309 - protein, 274 aa, Escherichia coli
MNKTAIALLALLASSASLAATPWQKITQPVPGSAQSIGSFSNGCIVGADTLPIQSEHYQVMRTDQRRYFGHPDLVMFIQRLSSQVSNLGMGTVLIGDMGMPAGGRFNGGHASHQTGLDVDIFLQLPKTRWTSAQLLRPQALDLVSRDGKHVVSTLWKPEIFSLIKLAAQDKDVTRIFVNPAIKQQLCLDAGTDRDWLRKVRPWFQHRAHMHVRLRCPADSLECEDQPLPPSGDGCGAELQSWFEPPKPGTTKPEKKTPPPLPPSCQALLDEHVI

SEQ ID NO: 2310 - protein, 274 aa, Escherichia coli; identical to SEQ ID NO: 2309

SEQ ID NO: 2311 - protein, 274 aa, Escherichia coli
MNKTAIALLALLASSASLAATPWQKITQPVPGSAQSIGSFSNGCIVGADTLPIQSEHYQVMRTDQRRYFGHPDLVMFIQRLSSQVSNLGMGTVLIGDMGMPAGGRFNGGHASHQTGLDVDIFLQLPKTRWTSAQLLRPQALDLVSRDGKHVVSTLWKPEIFSLIKLAAQDKDVTRIFVNPAIKQQLCFDAGTDRDWLRKVRPWFQHRAHMHVRLRCPADSLECEDQPLPPPGDGCGAELQSWFEPPKPGTTKPEKKTPPPLPPSCQALLDEHVI

SEQ ID NO: 2312 - protein, 274 aa, Escherichia coli; identical to SEQ ID NO: 2301

SEQ ID NO: 2313 - protein, 274 aa, Escherichia coli
MNKTAIALLALLASSASLAATPWQKITQPVPGSAQSIGSFSNGCIVGADTLPIQSEHYQVMRTDQRRYFGHPDLVMFIQRLSRQVSNLGMGTVLIGDMGMPAGGRFNGGHASHQTGLDVDIFLQLPKTRWTSAQLLRPQALDLVSRDGKHVVPTLWKPEIFSLIKLAAQDKDVTRIFVNPAIKQQLCLDAGTDRDWLRKVRPWFQHRAHMHVRLRCPADSLECEDQPLPPPGDGCGAELQSWFEPPKPGTTKPEKKTPPPLPPSCQALLDEHVI

SEQ ID NO: 2314 - protein, 274 aa, Escherichia coli; identical to SEQ ID NO: 2301

SEQ ID NO: 2315 - protein, 274 aa, Escherichia coli; identical to SEQ ID NO: 2300

SEQ ID NO: 2316 - protein, 274 aa, Escherichia coli; identical to SEQ ID NO: 2309

SEQ ID NO: 2317 - protein, 274 aa, Escherichia coli
MNKTAIALLALLASSASLAATPWQKITQPVPGSAQSIGSFSNGCIVGADTLPIQSEHYQVMRTDQRRYFGHPDLVMFIQRLSSQVSNLSLGTVLIGDMGMPAGGRFNGGHASHQTGLDVDIFLQLPKTRWTSAQLLRPQALDLVSRDGKHVVPTLWKPEIFSLIKLAAQDKDVTRIFVNPAIKQQLCLDAGTDRDWLRKVRPWFQHRAHMHVRLRCPADSLECEDQPLPPPGDGCGAELQSWFEPPKPGTTKPEKKTPPPLPPSCQALLDEHVI

SEQ ID NO: 2318 - protein, 274 aa, Escherichia coli
MNKTAIALLALLASSASLAATPWQKITQPVPGSAQSIGSFSNGCIVGADTLPIQSEHYQVMRTDLRRYFGHPDLVMFIQRLSSQVSNLGMGTVLIGDMGMPAGGRFNGGHASHQTGLDVDIFLQLPKTRWTSAQLLRPQALDLVSRDGKHVVPTLWKPEIFSLIKLAAQDKDVTRIFVNPAIKQQLCLDAGTDRDWLRKVRPWFQHRAHMHVRLRCPADSLECEDQPLPPPGDGCGAELQSWFEPPKPGTTKPEKKTPPPLPPSCQALLDEHVI

SEQ ID NO: 2319 - protein, 274 aa, Escherichia coli; identical to SEQ ID NO: 2301

SEQ ID NO: 2320 - protein, 274 aa, Escherichia coli; identical to SEQ ID NO: 2301

SEQ ID NO: 2321 - protein, 248 aa, Escherichia coli
MTKLKLLALGVLIATSAGVAHAEGKFSLGAGVGVVEHPYKDYDTDVYPVPVINYEGDNFWFRGLGGGYYLWNDATDKLSITAYWSPLYFKAKDSGDHQMRHLDDRKSTMMAGLSYAHFTQYGYLRTTLAGDTLDNSNGIVWDMAWLYRYTNGGLTVTPGIGVQWNSENQNEYYYGVSRKESARSGLRGYNPNDSWSPYLELSASYNFLGDWSVYGTARYTRLSDEVTDSPMVDKSWTGLISTGITYKF

SEQ ID NO: 2322 - protein, 251 aa, Escherichia coli
MKLRLSALALGTTLLVGCASSGTDQQGRSDPLEGFNRTMYNFNFNVLDPYIVRPVAVAWRDYVPQPARNGLSNFTGNLEEPAVMVNYFLQGDPYQGMVHFTRFFLNTILGMGGFIDVAGMANPKLQRTEPHRFGSTLGHYGVGYGPYVQLPFYGSFTLRDDGGDMADGFYPVLSWLTWPMSVGKWTLEGIETRAQLLDSDGLLRQSSDPYIMVREAYFQRHDFIANGGELKPQENPNAQAIQDDLKDIDSE

SEQ ID NO: 2323 - protein, 211 aa, Escherichia coli [sequence omitted]

SEQ ID NO: 2324 - protein, 109 aa, Escherichia coli
MTMKKLLIIILPVLLSGCSAFNQLVERMQTDTLEYQCDEKPLTVKLNNPRQEVSFVYDNQLLHLKQGISASGARYTDGIYVFWSKGDEATVYKRDRIVLNNCQLQNPQR

SEQ ID NO: 2325 - protein, 365 aa, Escherichia coli
MKGRWVKYLLMGTVVAMLAACSSKPTDRGQQYKDGKFTQPFSLVNQPDAVGAPINAGDFAEQINHIRNSSPRLYGNQSNVYNAVQEWLRAGGDTRNMRQFGIDAWQMEGADNYGNVQFTGYYTPVIQARHTRQGEFQYPIYRMPPKRGRLPSRAEIYAGALSDKYILAYSNSLMDNFIMDVQGSGYIDFGDGSPLNFFSYAGKNGHAYRSIGKVLIDRGEVKKEDMSMQAIRHWGETHSEAEVRELLEQNPSFVFFKPQSFAPVKGASAVPLVGRASVASDRSIIPPGTTLLAEVPLLDNNGKFNGQYELRLMVALDVGGAIKGQHFDIYQGIGPEAGHRAGWYNHYGRVWVLKTAPGAGNVFSG

SEQ ID NO: 2326 - protein, 365 aa, Escherichia coli; identical to SEQ ID NO: 2325

SEQ ID NO: 2327 - protein, 361 aa, Escherichia coli
MFKRRYVTLLPLFVLLAACSSKPKPTETDTTTGTPSGGFLLEPQHNVMQMGGDFANNPNAQQFIDKMVNKHGFDRQQLQEILSQAKRLDSVLRLMDNQAPTTSVKPPSGPNGAWLRYRKKFITPDNVQNGVVFWNQYEDALNRAWQVYGVPPEIIVGIIGVETRWGRVMGKTRILDALATLSFNYPRRAEYFSGELETFLLMARDEQDDPLNLKGSFAGAMGYGQFMPSSYKQYAVDFSGDGHINLWDPVDAIGSVANYFKAHGWVKGDQVAVMANGQAPGLPNGFKTKYSISQLAAAGLTPQQPLGNHQQASLLRLDVGTGYQYWYGLPNFYTITRYNHSTHYAMAVWQLGQAVALARVQ

SEQ ID NO: 2328 - protein, 359 aa, Escherichia coli
MKKYLALALIAPLLISCSTTKKGDTYNEAWVKDTNGFDILMGQFAHNIENIWGFKEVVIAGPKDYVKYTDQYQTRSHINFDDGTITIETIAGTEPAAHLRRAIIKTLLMGDDPSSVDLYSDVDDITISKEPFLYGQVVDNTGQPIRWEGRASNFADYLLKNRLQSRSNGLRIIYSVTINMVPNHLDKRAHKYLGMVRQASRKYGVDESLILAIMQTESSFNPYAVSRSDALGLMQVVQHTAGKDVFRSQGKSGTPSRSFLFDPASNIDTGTAYLAMLNNVYLGGIDNPTSRRYAVITAYNGGAGSVLRVFSNDKIQAANIINTMTPGDVYQTLTTRHPSAESRRYLYKVNTAQKSYRRR

SEQ ID NO: 2329 - protein, 359 aa, Escherichia coli
MKKYLALALIAPLLISCSTTKKGDTYNEAWVKDTNGFDILMGQFAHNIENIWGFKEVVIAGPKDYVKYTDQYQTRSHINFDDGTITIETIAGTEPAAHLRRAIIKTLLMGDDPSSVDLYSDVDDITISKEPFLYGQVVDNTGQPIRWEGRASNFADYLLKNRLKSRSNGLRIIYSVTINMVPNHLDKRAHKYLGMVRQASRKYGVDESLILAIMQTESSFNPYAVSRSDALGLMQVVQHTAGKDVFRSQGKSGTPSRSFLFDPASNIDTGTAYLAMLNNVYLGGIDNPTSRRYAVITAYNGGAGSVLRVFSNDKIQAANIINTMTPGDVYQTLTTRHPSAESRRYLYKVNTAQKSYRRR

SEQ ID NO: 2330 - protein, 359 aa, Escherichia coli; identical to SEQ ID NO: 2329

SEQ ID NO: 2331 - protein, 359 aa, Escherichia coli; identical to SEQ ID NO: 2328

SEQ ID NO: 2332 - protein, 359 aa, Escherichia coli
MKKYLALALIAPLLISCSTTKKGGTYNEAWVKDTNGFDILMGQFAHNIENIWGFKEVVIAGPKDYVKYTDQYQTRSHINFDDGTITIETIAGTEPAAHLRRAIIKTLLMGDDPSSVDLYSDVDDITISKEPFLYGQVVDNTGQPIRWEGRASNFADYLLKNRLKSRSNGLRIIYSVTINMVPNHLDKRAHKYLGMVRQASRKYGVDESLILAIMQTESSFNPYAVSRSDALGLMQVVQHTAGKDVFRSQGKSGTPSRSFLFDPASNIDTGTAYLAMLNNVYLGGIDNPTSRRYAVITAYNGGAGSVLRVFSNDKIQAANIINTMTPGDVYQTLTTRHPSAESRRYLYKVNTAQKSYRRR

SEQ ID NO: 2333 - protein, 359 aa, Escherichia coli; identical to SEQ ID NO: 2332

SEQ ID NO: 2334 - protein, 359 aa, Escherichia coli
MKKYLALALIAPLLISCSTTKKGDTYNEAWVKDTNGFDILMGQFAHNIENFWGFKEVVIAGPKDYVKYTDQYQTRSHINFDDGTITIETIAGTEPAAHLRRAIIKTLLMGDDPSSVDLYSDVDDITISKEPFLYGQVVDNTGQPIRWEGRASNFADYLLKNRLKSRSNGLRIIYSVTINMVPNHLDKRAHKYLGMVRQASRKYGVDESLILAIMQTESSFNPYAVSRSDALGLMQVVQHTAGKDVFRSQGKSGTPSRSFLFDPASNIDTGTAYLAMLNNVYLGGIDNPTSRRYAVITAYNGGAGSVLRVFSNDKIQAANIINTMTPGDVYQTLTTRHPSAESRRYLYKVNTAQKSYRRR

SEQ ID NO: 2335 - protein, 359 aa, Escherichia coli
MKKYLALALIAPLLISCSTTKKGDTYNEAWVKDTNGFDILMGQFAHNIENIWGFKEVVIAGPKDYVKYTDQYQTRSHINFDDGTITIETIAGTEPAAHLRRAIIKTLLMGDDPSSVDLYSDVDDITISKEPFLYGQVVDNTGQPIRWEGRASNFADYLLKNRLKSRSNGMRIIYSVTINMVPNHLDKRAHKYLGMVRQASRKYGVDESLILAIMQTESSFNPYAVSRSDALGLMQVVQHTAGKDVFRSQGKSGTPSRSFLFDPASNIDTGTAYLAMLNNVYLGGIDNPTSRRYAVITAYNGGAGSVLRVFSNDKIQAANIINTMTPGDVYQTLTTRHPSAESRRYLYKVNTAQKSYRRR

SEQ ID NO: 2336 - protein, 359 aa, Escherichia coli
MKKYLALALIAPLLISCSTTKKGDTYNEAWVKDTNGFDILMGQFAHNIENIWGFKEVVIAGPKDYVKYTDQYQTRSHINFDDGTITIETIAGTEPAAHLRRAIIKTLLMGDDPSSVDLYSDVDDITISKEPFLYGQVVDNTGQPIRWEGRASNFADYLLKNRLQSRNNGLRIIYSVTINMVPNHLDKRAHKYLGMVRQASRKYGVDESLILAIMQTESSFNPYAVSRSDALGLMQVVQHTAGKDVFRSQGKSGTPSRSFLFDPASNIDTGTAYLAMLNNVYLGGIDNPTSRRYAVITAYNGGAGSVLRVFSNDKIQAANIINTMTPGDVYQTLTTRHPSAESRRYLYKVNTAQKSYRRR

SEQ ID NO: 2337 - protein, 359 aa, Escherichia coli; identical to SEQ ID NO: 2329

SEQ ID NO: 2338 - protein, 359 aa, Escherichia coli; identical to SEQ ID NO: 2329

SEQ ID NO: 2339 - protein, 359 aa, Escherichia coli; identical to SEQ ID NO: 2328

SEQ ID NO: 2340 - protein, 359 aa, Escherichia coli; identical to SEQ ID NO: 2329

SEQ ID NO: 2341 - protein, 359 aa, Escherichia coli; identical to SEQ ID NO: 2329

SEQ ID NO: 2342 - protein, 359 aa, Escherichia coli; identical to SEQ ID NO: 2329

SEQ ID NO: 2343 - protein, 359 aa, Escherichia coli; identical to SEQ ID NO: 2328

SEQ ID NO: 2344 - protein, 359 aa, Escherichia coli; identical to SEQ ID NO: 2329

SEQ ID NO: 2345 - protein, 359 aa, Escherichia coli; identical to SEQ ID NO: 2328

SEQ ID NO: 2346 - protein, 359 aa, Escherichia coli
MKKYLALALIAPLLISCSTTKKGDTYNEAWVKDTNGFDILMGQFAHNIENIWGFKEVVIAGPKDYVKYTDQYQTRSHINFDDGTITIETIAGTEPAAHLRRAIIKTLLMGDDPSSVDLYSDVDDITISKEPFLYGQVVDNTGQPIRWEGRASNFADYLLKNRLKSRSNGLRIIYSVTINMVPNHLDKRAHKYLGMVRQASRKYGVDESLILAIMQTESSFNPYAVSRSDALGLMQVVQHTAGKDVFRSQGKSGTPSRNFLFDPASNIDTGTAYLAMLNNVYLGGIDNPTSRRYAVITAYNGGAGSVLRVFSNDKIQAANIINTMTPGDVYQTLTTRHPSAESRRYLYKVNTAQKSYRRR

SEQ ID NO: 2347 - protein, 359 aa, Escherichia coli
MKKYLALALIAPLLISCSTTKKGDTYNEAWVKDTNGFDILMGQFAHNIENIWGFKEVVIAGPKDYVKYTDQYQTRSHINFDDGTITIETIAGTEPAAHLRRAIIKTLLMGDDPSSVDLYSDVDDITISKEPFLYGQVVDNTGQPIRWEGRASNFADYLLKNRLKSRSNGLRIIYSVTINMVPNHLDKRAHKYLGMVRQASRKYGVDESLILAIMQTESSFNPYAVSRSDALGLMQVVQHTAGKDVFRSQGKSGTPSRSFLFDPASNIDIGTAYLAMLNNVYLGGIDNPTSRRYAVITAYNGGAGSVLRVFSNDKIQAANIINTMTPGDVYQTLTTRHPSAESRRYLYKVNTAQKSYRRR

SEQ ID NO: 2348 - protein, 359 aa, Escherichia coli; identical to SEQ ID NO: 2329

SEQ ID NO: 2349 - protein, 518 aa, Escherichia coli
MKKLKINYLFIGILALLLAVALWPSIPWFGKADNRIAAIQARGELRVSTIHTPLTYNEINGKPFGLDYELAKQFADYLGVKLKVTVRQNISQLFDDLDNGNADLLAAGLVYNSERVKNYQPGPTYYSVSQQLVYKVGQYRPRTLGNLTAEQLTVAPGHVVVNDLQTLKETKFPELSWKVDDKKGSAELMEDVIEGKLDYTIADSVAISLFQRVHPELAVALDITDEQPVTWFSPLDGDNTLSAALLDFFNEMNEDGTLARIEEKYLGHGDDFDYVDTRTFLRAVDAVLPQLKPLFEKYAEEIDWRLLAAIAYQESHWDAQATSPTGVRGMMMLTKNTAQSLGITDRTDAEQSISGGVRYLQDMMSKVPESVPENERIWFALAAYNMGYAHMLDARALTAKTKGNPDSWADVKQRLPLLSQKPYYSKLTYGYARGHEAYAYVENIRKYQISLVGYLQEKEKQATEAAMQLAQDYPAVSPTELGKEKFPFLSFLSQSSSNYLTHSPSLLFSRKGSEEKQN

SEQ ID NO: 2350 - protein, 518 aa, Escherichia coli
MKKLKINYLFIGILALLLAVALWPSIPWFGKADNRIAAIQARGELRVSTIHTPLTYNEINGKPFGLDYELAKQFADYLGVKLKVTVRQNISQLFDDLDNGNADLLAAGLVYNSERVKNYQPGPTYYSVSQQLVYKVGQYRPRTLGNLTAEQLTVAPGHVVVNDLQTLKDTKFPELSWKVDDKKGSAELMEDVIEGKLDYTIADSVAISLFQRVHPELAVALDITDEQPVTWFSPLDGDNTLSAALLDFFNEMNEDGTLARIEEKYLGHGDDFDYVDTRTFLRAVDAVLPQLKPLFEKYAEEIDWRLLAAIAYQESHWDAQATSPTGVRGMMMLTKNTAQSLGITDRTDAEQSISGGVRYLQDMMSKVPESVPENERIWFALAAYNMGYAHMLDARALTAKTKGNPDSWADVKQRLPLLSQKPYYSKLTYGYARGHEAYAYVENIRKYQISLVGYLQEKEKQATEAAMQLAQDYPAVSPTELGKEKFPFLSFLSQSSSNYLTHSPSLLFSRKGSEEKQN

SEQ ID NO: 2351 - protein, 518 aa, Escherichia coli
MKKLKINYLFIGILALLLAVALWPSIPWFGKADNRIAAIQARGELRVSTIHTPLTYNEINGKPFGLDYELAKQFADYLGVKLKVTVRQNISQLFDDLDNGNADLLAAGLVYNSERVKNYQPGPTYYSVSQQLVYKVGQYRPRTLGNLTAEQLTVAPGHVVVNDLQTLKETKFPELSWKVDDKKGSAELMEDVIEGKLDYTIADSVAISLFQRVHPELAVALDITDEQPVTWFSPLDGDNTLSAALLDFFNEMNEDGTLARIEEKYLGHGDDFDYVDTRTFLRAVDAVLPQLKPLFEKYAEEIDWRLLAAIAYQESHWDAQATSPTGVRGMMMLTKNTAQSLGITDRTDAEQSISGGVRYLQDMMSKVPESVPENERIWFALAAYNMGYAHMQDARALTAKTKGNPDSWADVKQRLPLLSQKPYYSKLTYGYARGHEAYAYVENIRKYQISLVGYLQEKEKQATEAAMQLAQDYPAVSPTELGKEKFPFLSFLSQSSSNYLTHSPSLLFSRKGSEEKQN

SEQ ID NO: 2352 - protein, 518 aa, Escherichia coli; identical to SEQ ID NO: 2349

SEQ ID NO: 2353 - protein, 518 aa, Escherichia coli; identical to SEQ ID NO: 2349

SEQ ID NO: 2354 - protein, 518 aa, Escherichia coli; identical to SEQ ID NO: 2350

SEQ ID NO: 2355 - protein, 518 aa, Escherichia coli; identical to SEQ ID NO: 2350

SEQ ID NO: 2356 - protein, 518 aa, Escherichia coli
MKKLKINYLFIGILALLLAVALWPSIPWFGKADNRIAAIQARGELRVSTIHTPLTYNEINGKPFGLDYELAKQFADYLGVKLKVTVRQNISQLFDDLDNGNADLLAAGLVYNSERVKNYQPGPTYYSVSQQLVYKVGQYRPRTLGNLTAEQLTVAPGHVVVNDLQTLKDTKFPELSWKVDDKKGSVELMEDVIEGKLDYTIADSVAISLFQRVHPELAVALDITDEQPVTWFSPLDGDNTLSAALLDFFNEMNEDGTLARIEEKYLGHGDDFDYVDTRTFLRAVDAVLPQLKPLFEKYAEEIDWRLLAAIAYQESHWDAQATSPTGVRGMMMLTKNTAQSLGITDRTDAEQSISGGVRYLQDMMSKVPESVPENERIWFALAAYNMGYAHMLDARALTTKTKGNPDSWADVKQRLPLLSQKPYYSKLTYGYARGHEAYAYVENIRKYQISLVGYLQEKEKQATEAAMQLAQDYPAVSPTELGKEKFPFLSFLSQSSSNYLTHSPSLLFSRKGSEEKQN

SEQ ID NO: 2357 - protein, 518 aa, Escherichia coli; identical to SEQ ID NO: 2349

SEQ ID NO: 2358 - protein, 518 aa, Escherichia coli; identical to SEQ ID NO: 2349

SEQ ID NO: 2359 - protein, 518 aa, Escherichia coli
MKKLKINYLFIGILALLLAVALWPSIPWFGKADNRIAAIQARGELRVSTINTPLTYNEINGKPFGLDYELAKQFADYLGVKLKVTVRQNISQLFDDLDNGNADLLAAGLVYNSERVKNYQPGPTYYSVSQQLVYKVGQYRPRTLGNLTAEQLTVAPGHVVVNDLQTLKETKFPELSWKVDDKKGSAELMEDVIEGKLDYTIADSVAISLFQRVHPELAVALDITDEQPVTWFSPLDGDNTLSAALLDFFNEMNEDGTLARIEEKYLGHGDDFDYVDTRTFLRAVDAVLPQLKPLFEKYAEEIDWRLLAAIAYQESHWDAQATSPTGVRGMMMLTKNTAQSLGITDRTDAEQSISGGVRYLQDMMSKVPESVPENERIWFALAAYNMGYAHMLDARALTAKTKGNPDSWADVKQRLPLLSQKPYYSKLTYGYARGHEAYAYVENIRKYQISLVGYLQEKEKQATEAAMQLAQDYPAVSPTELGKEKFPFLSFLSQSSSNYLTHSPSLLFSRKGSEEKQN

SEQ ID NO: 2360 - protein, 518 aa, Escherichia coli; identical to SEQ ID NO: 2350

SEQ ID NO: 2361 - protein, 257 aa, Escherichia coli
MARKWLNLFAGAALSFAVAGNALADEGKITVFAAASLTNAMQDIATQFKKEKGVDVVSSFASSSTLARQIEAGAPADLFISADQKWMDYAVDKKAIDTATRQTLLGNSLVVVAPKASVQKDFTIDSKTNWTSLLNGGRLAVGDPEHVPAGIYAKEALQKLGAWDTLSPKLAPAEDVRGALALVERNEAPLGIVYGSDAVASKGVKVVATFPEDSHKKVEYPVAVVEGHNNATVKAFYDYLKGPQAAEIFKRYGFTIK

SEQ ID NO: 2362 - protein, 457 aa, Escherichia coli
MRIHILGICGTFMGGLAMLARQLGHEVTGSDANVYPPMSTLLEKQGIELIQGYDASQLEPQPDLVIIGNAMTRGNPCVEAVLEKNIPYMSGPQWLHDFVLRDRWVLAVAGTHGKTTTAGMATWILEQCGYKPGFVIGGVPGNFEVSAHLGESDFFVIEADEYDCAFFDKRSKFVHYCPRTLILNNLEFDHADIFDDLKAIQKQFHHLVRIVPGQGRIIWPENDINLKQTMAMGCWSEQELVGEQGHWQAKKLTTDASEWEVLLDGEKVGEVKWSLVGEHNMHNGLMAIAAARHVGVAPADAANALGSFINARRRLELRGEANGVTVYDDFAHHPTAILATLAALRGKVGGTARIIAVLEPRSNTMKMGICKDDLAPSLGRADEVFLLQPAHIPWQVAEVAEACVQPAHWSGDVDTLADMVVKTAQPGDHILVMSNGGFGGIHQKLLDGLAKKAEAAQ

SEQ ID NO: 2363 - protein, 537 aa, Escherichia coli
MKHSVSVTCCALLVSSISLSYAAEVPSGTVLAEKQELVRHIKDEPASLDPAKAVGLPEIQVIRDLFEGLVNQNEKGEIVPGVATQWKSNDNRIWTFTLRDNAKWADGTPVTAQDFVYSWQRLVDPKTLSPFAWFAALAGINNAQAIIDGKATPDQLGVTAVDAHTLKIQLDKPLPWFVNLTANFAFFPVQKANVESGKEWTKPGNLIGNGAYVLKERVVNEKLVVVPNTHYWDNAKTVLQKVTFLPINQESAATKRYLAGDIDITESFPKNMYQKLLKDIPGQVYTPPQLGTYYYAFNTQKGPTADQRVRLALSMTIDRRLMTEKVLGTGEKPAWHFTPDVTAGFTPEPSPFEQMSQEELNAQAKTLLSAAGYGPQKPLKLTLLYNTSENHQKIAIAVASMWKKNLGVDVKLQNQEWKTYIDSRNTGNFDVIRASWVGDYNEPSTFLTLLTSTHSGNISRFNNPAYDKVLAQASTENTVKARNADYNAAEKILMEQAPIAPIYQYTNGRLIKPWLKGYPINNPEDVAYSRTMYIVKH

SEQ ID NO: 2364 - protein, 238 aa, Escherichia coli
MKKAKILSGVLLLCFSSPLISQAATLDVRGGYRSGSHAYETRLKVSEGWQNGWWASMESNTWNTIHDNKKENAALNDVQVEVNYAIKLDDQWTVRPGMLTHFSSNGTRYGPYVKLSWDATKDLNFGIRYRYDWKAYRQQDLSGDMSRDNVHRWDGYVTYHINSDFTFAWQTTLYSKQNDYRYANHKKWATENAFVLQYHMTPDITPYIEYDYLDRQGVYNGRDNLSENSYRIGVSFKL

SEQ ID NO: 2365 - protein, 238 aa, Escherichia coli
MKKAKILSGVLLLCFSSPLISQAATLDVRGGYRSGSHAYETRLKVSEGWQNGWWASMESNTWNTIHDNKKENAALNDVQVEVNYAIKLDDQWTVRPGMLTHFSSNGTRYGPYVKLSWDATKDLKFGIRYRYDWKAYRQQDLSGDMSRDNVHRWDGYVTYHINSDFTFAWQTTLYSKQNDYRYANHKKWATENAFVLQYHMTPDITPYIEYDYLDRQGVYNGRDNLSENSYRIGVSFKL

SEQ ID NO: 2366 - protein, 238 aa, Escherichia coli; identical to SEQ ID NO: 2364

SEQ ID NO: 2367 - protein, 372 aa, Escherichia coli
MITMKVKNFIYLPFCLFIGTSVAGALPEIPEPFKYGVGGIENGKIYIGLGSLGNNWYMIDTNQSEKKWTKIAQWPTVPREQATATIIDGKIYVFGGIGKDTSGVITLQKDVYSYDIAKDKWEKLMTRPPVSLAGHVSFIHNGHAVSTGGVNENIFNGYFSDVELSKGNSALTEKVNRDYFSKPADDYFLNNHIISYDPSKNQWKNLGTTPFPGTAGSSVIFAEQQIYILGGERKPGLRSVRSWTGELSHDRIKWSELPPVASPEGVSGAYASVIDGNIFLAGGAYFPGAAEKYSNGEYWSHKGLDKAYSKEIYQLIKNDWKKVGSLPEGLAYGVSLPWQGGMLILGGEKKDGKAVSDVIYLKKNDKQIKIVK

SEQ ID NO: 2368 - protein, 368 aa, Escherichia coli
MNKTITALAILMASFAANASVLPETPVPFKSGTGVIDNDTVYIGLGSAGTAWYKLDTQAKDKRWTALAAFPGGPRDQATSAFIDGNLYVFGGIGKNSEGLTQVFNDVHKYNPKTNSWVKLMSHAPMGMAGHVTFVHNGKAYVTGGVNQNIFNGYFEDLNEAGKDSTAIDKINAYYFDKKAEDYFFNKFLLSFDPSTQQWSYAGESPWYGTAGAAVVNKGDKTWLINGEAKPGLRTDAVFELDFTGNNLKWNKLAPVASPDGVAGGFAGMSNDSLIFAGGAGFKGSRENYQNGKNYAHEGLKKSYSADIHLWHNGKWDKSGELSQGRAYGVSLLWNNSLLIIGGEAAGGKAVTDSVLISVKDNKVTVQN

SEQ ID NO: 2369 - protein, 368 aa, Escherichia coli
MNKTITALAIIMASFAANASVLPETPVPFKSGTGAIDNDTVYIGLGSAGTAWYKLDTQAKDKKWTALAAFPGGPRDQATSAFIDGNLYVFGGIGKNSEGLTQVFNDVHKYNPKTNSWVKLMSHAPMGMAGHVTFVHNGKAYVTGGVNQNIFNGYFEDLNEAGKDSTAVDKINAYYFDKKAEDYFFNKFLLSFDPSTQQWSYAGESPWYGTAGAAVVNKGDKTWLINGEAKPGLRTDAVFELDFTGNNLKWNKLAPVSSPDGVAGGFAGISNDSLIFAGGAGFKGSRENYQNGKNYAHEGLKKSYSTDIHLWHNGKWDKSGELSQGRAYGVSLPWNNSLLIIGGETAGGKAVTDSVFISVKDNKVTVQN

SEQ ID NO: 2370 - protein, 368 aa, Escherichia coli
MNKTITALAILMASFAANASVLPETPVPFKSGTGAIDNDTVYIGLGSAGTAWYKLETQAKDKKWTALAAFPGGPRDQATSAFIDGNLYVFGGIGKNSEGLTQVFNDVHKYNPKTNSWVKLISHAPMGMAGHVTFVHNGKAYVTGGVNQNIFNGYFEDLNEAGKDSTAVDKINAHYFDKKAEDYFFNKFLLSFDPSTQQWSYAGESPWYGTAGAAVVNKGDKTWLINGEAKPGLRTDAVFELDFTGNNLKWNRLAPVSSPDGVAGGFAGISNDSLIFAGGAGFKGSRENYQNGKNYAHEGLKKSYSTDIHLWHNGKWDKSGELSQGRAYGVSLPWNNSLLIIGGETAGGKAVTDSVLISVKDNKVTVQN

SEQ ID NO: 2371 - protein, 368 aa, Escherichia coli
MNKTITALAIMMASFAANASVLPETPVPFKSGTGAIDNDTVYIGLGSAGTAWYKLDTQAKDKKWTALAAFPGGPRDQATSAFIDGNLYVFGGIGKNSKGLTQVFNDVHKYNPKTNSWVKLMSHAPMGMAGHVTFVHNGKAYVTGGVNQNIFNGYFEDLNEAGKDSATIDKINAHYFDKKAEDYFFNKFLLSFDPSTQQWSYAGESPWYGTAGAAVVNKGDKTWLINGEAKPGLRTDAVFELDFTGNNLKWNKLAPVSSPDGVAGGFAGISNDSLIFAGGAGFKGSRENYQNGKNYAHEGLKKSYSTDIHLWHNGKWDKSGELSQGRAYGVSLPWNNSLLIIGGETAGGKAVTDSVLISVKDNKVTVQN

SEQ ID NO: 2372 - protein, 368 aa, Escherichia coli
MNKTITALTIIMASFATNASVLPETPVPFKSGTGAIDNDTVYIGLGSAGTAWYKLDTQAKDKKWTALAAFPGGPRDQATSAFIDGNLYVFGGIGKNSEGLTQVFNDVHKYNPKTNSWVKLMSHAPMGMAGHVTFVHNGKAYVTGGVNQNIFNGYFEDLNEAGKDSTTIDKINAHYFDKKAEDYFFNKFLLSFDPSTQQWSYAGESPWYGTAGAAVVNKGDKTWLINGEAKPGLRTDAVFELDFTGNNLKWNKLAPVASPDGVAGGFAGMSNDSLIFAGGAGFKGSRENYQNGKNYAHEGLKKSYSADIHLWHNGKWDKSGELSQGRAYGVSLPWNNSLLIIGGETAGGKAVTDSVLISVKDNKVTVQN

SEQ ID NO: 2373 - protein, 368 aa, Escherichia coli; identical to SEQ ID NO: 2372

SEQ ID NO: 2374 - protein, 368 aa, Escherichia coli
MNKTITALAIMMASFAANASVLPETPVPFKSGTGAIDNDTVYIGLGSAGTAWYKLDTQAKDKKWTALAAFPGGPRDQATSAFIDGNLYVFGGIGKNSEGLTQVFNDVHKYNPKTNSWVKLMSHAPMGMAGHVTFVHNGKAYVTGGVNQNIFNGYFEDLNEAGKDSTAIDKINAHYFDKKAEDYFFNKFLLSFDPSTQQWSYAGESPWYGTAGAAVVNKGDKTWLINGEAKPGLRTDAVFELDFTGNNLKWNKLAPVSSPDGVAGGFAGISNDSLIFAGGAGFKGSRENYQNGKNYAHEGLKKSYSTDIHLWHNGKWDKSGELSQGRAYGVSLPWNNSLLIIGGETAGGKAVTDSVLITVKDNKVTVQN

SEQ ID NO: 2375 - protein, 368 aa, Escherichia coli; identical to SEQ ID NO: 2372

SEQ ID NO: 2376 - protein, 326 aa, Escherichia coli
MNAIISPDYYYVLTVAGQSNAMAYGEGLPLPDREDAPHPRIKQLARFAHTHPGGPPCHFNDIIPLTHCPHDVQDMQGYHHPLATNHQTQYGTVGQALHIARKLLPFIPDNAGILIVPCCRGGSAFTAGSEGTYSERHGASHDACRWGTDTPLYQDLVSRTRAALAKNPQNKFLGACWMQGEFDLMTSDYASHPQHFNHMVEAFRRDLKQYHSQLNNITDAPWFCGDTTWYWKENFPHSYEAIYGNYQNNVLANIIFVDFQQQGERGLTNAPDEDPDDLSTGYYGSAYRSPENWTTALRSSHFSTAARRGIISDRFVEAILQFWRER

SEQ ID NO: 2377 - protein, 828 aa, Escherichia coli
MKLSRRSFMKANAVAAAAAAAGLSVPGVARAVVGQQEAIKWDKAPCRFCGTGCGVLVGTQQGRVVACQGDPDAPVNRGLNCIKGYFLPKIMYGKDRLTQPLLRMKNGKYDKEGEFTPITWDQAFDVMEEKFKTALKEKGPESIGMFGSGQWTIWEGYAASKLFKAGFRSNNIDPNARHCMASAVVGFMRTFGMDEPMGCYDDIEQADAFVLWGANMAEMHPILWSRITNRRLSNQNVTVAVLSTYQHRSFELADNGIIFTPQSDLVILNYIANYIIQNNAINQDFFSKHVNLRKGATDIGYGLRPTHPLEKAAKNPGSDASEPMSFEDYKAFVAEYTLEKTAEMTGVPKDQLEQLAQLYADPNKKVISYWTMGFNQHTRGVWANNLVYNLHLLTGKISQPGCGPFSLTGQPSACGTAREVGTFAHRLPADMVVTNEKHRDICEKKWNIPSDTIPAKIGLHAVAQDRALKDGKLNVYWTMCTNNMQAGPNINEERMPGWRDPRNFIIVSDPYPTVSALAADLILPTAMWVEKEGAYGNAERRTQFWRQQVQAPGEAKSDLWQLVQFSRRFKTEEVWPEELLAKKPELRGKTLYEVLYATPEVSKYPVSELAEDQLNDESRELGFYLQKGLFEEYAWFGRGHGHDLAPFDDYHKARGLRWPVVNGKETQWRYSEGNDPYVKAGEGYKFYGKPDGKAVIFALPFEPAAEAPDEEYDLWLSTGRVLEHWHTGSMTRRVPELHRAFPEAVLFIHPLDAKARDLRRGDKVKVVSRRGEVISIVETRGRNRPPQGLVYMPFFDAAQLVNKLTLDATDPLSKETDFKKCAVKLEKV

SEQ ID NO: 2378 - protein, 828 aa, Escherichia coli
MKLSRRSFMKANAVAAAAAAAGLSVPGVARAVVGQQEAIKWDKAPCRFCGTGCGVLVGTQQGRVVACQGDPDAPVNRGLNCIKGYFLPKIMYGKDRLTQPLLRMKNGKYDKEGEFTPITWDQAFDVMEEKFKTALKEKGPESIGMFGSGQWTIWEGYAASKLFKAGFRSNNIDPNARHCMASAVVGFMRTFGMDEPMGCYDDIEQADAFVLWGSNMAEMHPILWSRITNRRLSNQNVTVAVLSTYQHRSFELADNGIIFTPQSDLVILNYIANYIIQNNAINQDFFSKHVNLRKGATDIGYGLRPTHPLEKAAKNPGSDASEPMSFEDYKAFVAEYTLEKTAEMTGVPKDQLEQLAQLYADPNKKVISYWTMGFNQHTRGVWANNLVYNLHLLTGKISQPGCGPFSLTGQPSACGTAREVGTFAHRLPADMVVTNEKHRDICEKKWNIPSGTIPAKIGLHAVAQDRALKDGKLNVYWTMCTNNMQAGPNINEERMPGWRDPRNFIIVSDPYPTVSALAADLILPTAMWVEKEGAYGNAERRTQFWRQQVQAPGEAKSDLWQLVQFSRRFKTEEVWPEELLAKKPELRGKTLYEVLYATPEVSKFPLSELAEDQLNDESHELGFYLQKGLFEEYAWFGRGHGHDLAPFDDYHKARGLRWPVVNGKETQWRYSEGNDPYVKAGEGYKFYGKPDGKAVIFALPFEPAAEAPDEEYDLWLSTGRVLEHWHTGSMTRRVPELHRAFPEAVLFIHPLDAKARDLRRGDKVKVVSRRGEVISIVETRGRNRPPQGLVYMPFFDAAQLVNKLTLDATDPLSKETDFKKCAVKLEKV

SEQ ID NO: 2379 - protein, 828 aa, Escherichia coli
MKLSRRSFMKANAVAAAAAAAGLSVPGVARAVVGQQEAIKWDKAPCRFCGTGCGVLVGTQQGRVVACQGDPDAPVNRGLNCIKGYFLPKIMYGKDRLTQPLLRMKNGKYDKEGEFTPITWDQAFDVMEDKFKTALKEKGPESIGMFGSGQWTIWEGYAASKLFKAGFRSNNIDPNARHCMASAVVGFMRTFGMDEPMGCYDDIEQADAFVLWGSNMAEMHPILWSRITNRRLSNQNVTVAVLSTYQHRSFELADNGIIFTPQSDLVILNYIANYIIQNNAINQDFFSKHVNLRKGATDIGYGLRPTHPLEKAAKNPGSDASEPMSFEDYKAFVAEYTLEKTAEMTGVPKDQLEQLAQLYADPNKKVISYWTMGFNQHTRGVWANNLVYNLHLLTGKISQPGCGPFSLTGQPSACGTAREVGTFAHRLPADMVVTNEKHRDICEKKWNIPSGTIPAKIGLHAVAQDRALKDGKLNVYWTMCTNNMQAGPNINEERMPGWRDPRNFIIVSDPYPTVSALAADLILPTAMWVEKEGAYGNAERRTQFWRQQVQAPGEAKSDLWQLVQFSRRFKTEEVWPEELLAKKPELRGKTLYEVLYATPEVSKFPVSELAEDQLNDESRELGFYLQKGLFEEYAWFGRGHGHDLAPFDDYHKARGLRWPVVNGKETQWRYSEGNDPYVKAGEGYKFYGKPDGKAVIFALPFEPAAEAPDEEYDLWLSTGRVLEHWHTGSMTRRVPELHRAFPEAVLFIHPLDAKARDLRRGDKVKVVSRRGEVISIVETRGRNRPPQGLVYMPFFDAAQLVNKLTLDATDPLSKETDFKKCAVKLEKV

SEQ ID NO: 2380 - protein, 828 aa, Escherichia coli
MKLSRRSFMKANAVAAAAAAAGLSVPGVARAVVGQQEAIKWDKAPCRFCGTGCGVLVGTQQGRVVACQGDPDAPVNRGLNCIKGYFLPKIMYGKDRLTQPLLRMKNGKYDKEGEFTPITWDQAFDVMEEKFKTALKEKGPESIGMFGSGQWTIWEGYAASKLFKAGFRSNNIDPNARHCMASAVVGFMRTFGMDEPMGCYDDIEQADAFVLWGANMAEMHPILWSRITNRRLSNQNVTVAVLSTYQHRSFELADNGIIFTPQSDLVILNYIANYIIQNNAINQDFFSKHVNLRKGATDIGYGLRPTHPLEKAAKNPGSDASEPMSFEDYKAFVAEYTLEKTAEMTGVPKDQLEQLAQLYADPNKKVISYWTMGFNQHTRGVWANNLVYNLHLLTGKISQPGCGPFSLTGQPSACGTAREVGTFAHRLPADMVVTNEKHRDICEKKWNIPGGTIPAKIGLHAVAQDRALKDGKLNVYWTMCTNNMQAGPNINEERMPGWRDPRNFIIVSDPYPTVSALAADLILPTAMWVEKEGAYGNAERRTQFWRQQVQAPGEAKSDLWQLVQFSRRFKTEEVWPEELLAKKPELRGKTLYEVLYATPEVSKFPVSELAEDQLNDESRELGFYLQKGLFEEYAWFGRGHGHDLAPFDDYHKARGLRWPVVNGKETQWRYSEGNDPYVKAGEGYKFYGKPDGKAVIFALPFEPAAEAPDEEYDLWLSTGRVLEHWHTGSMTRRVPELHRAFPEAVLFIHPLDAKARDLRRGDKVKVVSRRGEVISIVETRGRNRPPQGLVYMPFFDAAQLVNKLTLDATDPLSKETDFKKCAVKLEKV

SEQ ID NO: 2381 - protein, 828 aa, Escherichia coli
MKLSRRSFMKANAVAAAAAAAGLSVPGVARAVVGQQEAIKWDKAPCRFCGTGCGVLVGTQQGRVVACQGDPDAPVNRGLNCIKGYFLPKIMYGKDRLTQPLLRMKNGKYDKEGEFTPITWDQAFDVMEEKFKTALKEKGPESIGMFGSGQWTIWEGYAASKLFKAGFRSNNIDPNARHCMASAVVGFMRTFGMDEPMGCYDDIEQADAFVLWGANMAEMHPILWSRITNRRLSNQDVTVAVLSTYQHRSFELADNGIIFTPQSDLVILNYIANYIIQNNAINQDFFSKHVNLRKGATDIGYGLRPTHPLEKAAKNPGSDASEPMSFEDYKAFVAEYTLEKTAEMTGVPKDQLEQLAQLYADPNKKVISYWTMGFNQHTRGVWANNLVYNLHLLTGKISQPGCGPFSLTGQPSACGTAREVGTFAHRLPADMVVTNEKHRDICEKKWNIPSGTIPAKIGLHAVAQDRALKDGKLNVYWTMCTNNMQAGPNINEERMPGWRDPRNFIIVSDPYPTVSALAADLILPTAMWVEKEGAYGNAERRTQFWRQQVQAPGEAKSDLWQLVQFSRRFKTEEVWPEELLAKKPELRGKTLYEVLYATPEVSKFPVSELAEDQLNDESRELGFYLQKGLFEEYAWFGRGHGHDLAPFDDYHKARGLRWPVVNGKETQWRYSEGNDPYVKAGEGYKFYGKPDGKAVIFALPFEPAAEAPDEEYDLWLSTGRVLEHWHTGSMTRRVPELHRAFPEAVLFIHPLDAKARDLRRGDKVKVVSRRGEVISIVETRGRNRPPQGLVYMPFFDAAQLVNKLTLDATDPLSKETDFKKCAVKLEKV

SEQ ID NO: 2382 - protein, 828 aa, Escherichia coli; identical to SEQ ID NO: 2381

SEQ ID NO: 2383 - protein, 828 aa, Escherichia coli
MKLSRRSFMKANAVAAAAAAAGLSVPGVARAVVGQQEAIKWDKAPCRFCGTGCGVLVGTQQGRVVACQGDPDAPVNRGLNCIKGYFLPKIMYGKDRLTQPLLRMKNGKYDKEGEFTPITWDQAFDVMEEKFKTALKEKGPESIGMFGSGQWTIWEGYAASKLFKAGFRSNNIDPNARHCMASAVVGFMRTFGMDEPMGCYDDIEQADAFVLWGANMAEMHPILWSRITNRRLSNQNVTVAVLSTYQHRSFELADNGIIFTPQSDLVILNYIANYIIQNNAINQDFFSKHVNLRKGATDIGYGLRPTHPLEKAAKNPGSDASEPMSFEDYKAFVAEYTLEKTAEMTGVPKDQLEQLAQLYADPNKKVISYWTMGFNQHTRGVWANNLVYNLHLLTGKISQPGCGPFSLTGQPSACGTAREVGTFAHRLPADMVVTNEKHRDICEKKWNIPSGTIPAKIGLHAVAQDRALKDGKLNVYWTMCTNNMQAGPNINEERMPGWRDPRNFIIVSDPYPTVSALAADLILPTAMWVEKEGAYGNAERRTQFWRQQVQAPGEAKSDLWQLVQFSRRFKTEEVWPEELLAKKPELRGKTLYEVLYATPEVSKFPVSELAEDQLNDESRELGFYLQKGLFEEYAWFGRGHGHDLAPFDDYHKARGLRWPVVNGKETQWRYSEGNDPYVKMGEGYKFYGKPDGKAVIFALPFEPAAEAPDEEYDLWLSTGRVLEHWHTGSMTRRVPELHRAFPEAVLFIHPLDAKARDLRRGDKVKVVSRRGEVISIVETRGRNRPPQGLVYMPFFDAAQLVNKLTLDATDPLSKETDFKKCAVKLEKV

SEQ ID NO: 2384 - protein, 828 aa, Escherichia coli
MKLSRRSFMKANAVAAAAAAAGLSVPGVARAVVGQQEAIKWDKAPCRFCGTGCGVLVGTQQGRVVACQGDPDAPVNRGLNCIKGYFLPKIMYGKDRLTQPLLRMKNGKYDKEGEFTPITWDQAFDVMEDKFKTALKEKGPESIGMFGSGQWTIWEGYAASKLFKAGFRSNNIDPNARHCMASAVVGFMRTFGMDEPMGCYDDIEQADAFVLWGSNMAEMHPILWSRITNRRLSNQNVTVAVLSTYQHRSFELADNGIIFTPQSDLVILNYIANYIIQNNAINQDFFSKHVNLRKGATDIGYGLRPTHPLEKAAKNPGSDASEPMSFEDYKAFVAEYTLEKTAEMTGVPKDQLEQLAQLYADPNKKVISYWTMGFNQHTRGVWANNLVYNLHLLTGKISQPGCGPFSLTGQPSACGTAREVGTFAHRLPADMVVTNEKHRDICEKKWNIPSGTIPAKIGLHAVAQDRALKDGKLNVYWTMCTNNMQAGPNINEERMPGWRDPRNFIIVSDPYPTVSALAADLILPTAMWVEKEGAYGNAERRTQFWRQQVQAPGEAKSDLWQLVQFSRRFKTEEVWPEELLAKKPELRGKTLYDVLYATPEVSKFPVSELAEDQLNDESRELGFYLQKGLFEEYAWFGRGHGHDLAPFDDYHKARGLRWPVVNGKETQWRYSEGNDPYVKAGEGYKFYGKPDGKAVIFALPFEPAAEAPDEEYDLWLSTGRVLEHWHTGSMTRRVPELHRAFPEAVLFIHPLDAKARDLRRGDKVKVVSRRGEVISIVETRGRNRPPQGLVYMPFFDAAQLVNKLTLDATDPLSKETDFKKCAVKLEKV

SEQ ID NO: 2385 - protein, 828 aa, Escherichia coli; identical to SEQ ID NO: 2380

SEQ ID NO: 2386 - protein, 828 aa, Escherichia coli
MKLSRRSFMKANAVAAAAAAAGLSVPGVARAVVGQQEAIKWDKAPCRFCGTGCGVLVGTQQGRVVACQGDPDAPVNRGLNCIKGYFLPKIMYGKDRLTQPLLRMKNGKYDKEGEFTPITWDQAFDVMEEKFKTALKEKGPESIGMFGSGQWTIWEGYAASKLFKAGFRSNNIDPNARHCMASAVVGFMRTFGMDEPMGCYDDIEQADAFVLWGANMAEMHPILWSRITNRRLSNQNVTVAVLSTYQHRSFELADNGIIFTPQSDLVILNYIANYIIQNNAINQDFFSKHVNLRKGATDIGYGLRPTHPLEKAAKNPGSDASEPMSFEDYKAFVAEYTLEKTAEMTGVPKDQLEQLAQLYADPNKKVISYWTMGFNQHTRGVWANNLVYNLHLLTGKISQPGCGPFSLTGQPSACGTAREVGTFAHRLPADMVVTNEKHRDICEKKWNIPSGTIPAKIGLHAVAQDRALKDGKLNVYWTMCTNNMQAGPNINEERMPGWRDPRNFIIVSDPYPTVSALAADLILPTAMWVEKEGAYGNAERRTQFWRQQVQAPGEAKSDLWQLVQFSRRFKTEEVWPEDLLAKKPELRGKTLYEVLYATPEVSKFPVSELAEDQLNDESRELGFYLQKGLFEEYAWFGRGHGHDLAPFDDYHKARGLRWPVVNGKETQWRYSEGNDPYVKAGEGYKFYGKPDGKAVIFALPFEPAAEAPDEEYDLWLSTGRVLEHWHTGSMTRRVPELHRAFPEAVLFIHPLDAKARDLRRGDKVKVVSRRGEVISIVETRGRNRPPQGLVYMPFFDAAQLVNKLTLDATDPLSKETDFKKCAVKLEKV

SEQ ID NO: 2387 - protein, 828 aa, Escherichia coli; identical to SEQ ID NO: 2386

SEQ ID NO: 2388 - protein, 828 aa, Escherichia coli
MKLSRRSFMKANAVAAAAAAAGLSVPGVARAVVGQQEAIKWDKAPCRFCGTGCGVLVGTQQGRVVACQGDPDAPVNRGLNCIKGYFLPKIMYGKDRLTQPLLRMKNGKYDKEGEFTPITWDQAFDVMEEKFKTALKEKGPESIGMFGSGQWTIWEGYAASKLFKAGFRSNNIDPNARHCMASAVVGFMRTFGMDEPMGCYDDIEQADAFVLWGANMAEMHPILWSRITNRRLSNQNVTVAVLSTYQHRSFELADNGIIFTPQSDLVILNYIANYIIQNNAINQDFFSKHVNLRKGATDIGYGLRPTHPLEKAAKNPGSDASEPMSFEDYKAFVAEYTLEKTAEMTGVPKDQLEQLAQLYADPNKKVISYWTMGFNQHTRGVWANNLVYNLHLLTGKISQPGCGPFSLTGQPSACGTAREVGTFAHRLPADMVVTNEKHRDICEKKWNIPSGTIPAKIGLHAVAQDRALKDGKLNVYWTMCTNNMQAGPNINEERMPGWRDPRNFIIVSDPYPTVSALAADLILPTAMWVEKEGAYGNAERRTQFWRQQVQAPGEAKSDLWQLVQFSRRFKTEEVWPEELLAKKPELRGKTLYEVLYATPEVSKFPVSELAEDQLNDESRELGFYLQKGLFEEYAWFGRGHGHDLAPFDDYHKARGLRWPVVNGKETQWRYSEGNDPYVKAGEGYKFYGKPDGKAVIFALPFEPAAEAPDEEYDLWLSTGRVLEHWHTGSMTRRVPELHRAFPEAVLFIHPLDAKARDLRRGDKVKVVSRRGEVISIVETRGRNRPPQGLVYMPFFDAAQLVNKLTLDATDPLSKETDFKKCAVKLEKV

SEQ ID NO: 2389 - protein, 828 aa, Escherichia coli; identical to SEQ ID NO: 2379

SEQ ID NO: 2390 - protein, 828 aa, Escherichia coli
MKLSRRSFMKANAVAAAAAAAGLSVPGVARAVVGQQEAIKWDKAPCRFCGTGCGVLVGTQQGRVVACQGDPDAPVNRGLNCIKGYFLPKIMYGKDRLTQPLLRMKNGKYDKEGEFTPITWDQAFDVMEEKFKTALKEKGPESIGMFGSGQWTIWEGYAASKLFKAGFRSNNIDPNARHCMASAVVGFMRTFGMDEPMGCYDDIEQADAFVLWGANMAEMHPILWSRITNRRLSNQNVTVAVLSTYQHRSFELADNGIIFTPQSDLVILNYIANYIIQNNAINQDFFSKHVNLRKGATDIGYGLRPTHPLEKAAKNPGSDASEPMSFEDYKAFVAEYTLEKTAEMTGVPKDQLEQLAQLYADPNKKVISYWTMGFNQHTRGVWANNLVYNLHLLTGKISQPGCGPFSLTGQPSACGTAREVGTFAHRLPADMVVTNEKHRDICEKKWNIPSGTIPAKIGLHAVAQDRALKDGKLNVYWTMCTNNMQAGPNINEERMPGWRDPRNFIIVSDPYPTVSALAADLILPTAMWVEKEGAYGNAERRTQFWRQQVQAPGEAKSDLWQLVQFSRRFKTEEVWPEELLAKKPELRGKTLYEVLYATPEVSKFPLSELAEDQLNDESRELGFYLQKGLFEEYAWFGRGHGHDLAPFDDYHKARGLRWPVVNGKETQWRYSEGNDPYVKAGEGYKFYGKPDGKAVIFALPFEPAAEAPDEEYDLWLSTGRVLEHWHTGSMTRRVPELHRAFPEAVLFIHPLDAKARDLRRGDKVKVVSRRGEVISIVETRGRNRPPQGLVYMPFFDAAQLVNKLTLDATDPLSKETDFKKCAVKLEKV

SEQ ID NO: 2391 - protein, 828 aa, Escherichia coli; identical to SEQ ID NO: 2388

SEQ ID NO: 2392 - protein, 828 aa, Escherichia coli; identical to SEQ ID NO: 2388

SEQ ID NO: 2393 - protein, 828 aa, Escherichia coli; identical to SEQ ID NO: 2386

SEQ ID NO: 2394 - protein, 828 aa, Escherichia coli; identical to SEQ ID NO: 2388

SEQ ID NO: 2395 - protein, 828 aa, Escherichia coli; identical to SEQ ID NO: 2388

SEQ ID NO: 2396 - protein, 828 aa, Escherichia coli; identical to SEQ ID NO: 2390

SEQ ID NO: 2397 - protein, 828 aa, Escherichia coli; identical to SEQ ID NO: 2379

SEQ ID NO: 2398 - protein, 149 aa, Escherichia coli
MKSHDLKKALCQWTAMLALVVSGAVWAANGVDFSQSPEVSGTQEGAIRMPKEQDRMPLNYVNQPPMIPHSVEGYQVTTNTNRCLQCHGVESYRTTGAPRISPTHFMDSDGKVGAEVAPRRYFCLQCHVPQADTAPIVGNTFTPSKGYGK

SEQ ID NO: 2399 - protein, 247 aa, Escherichia coli
MKMRAVAVFTGMLTGVLSVTGLLSAGAYAAGGEGNMSASATETNARVFSLHLGATRVVYNPASSGETLTVINDQDYPMLVQSEVLSEDQKSPAPFWWTPPLFRRDGQQSSRRRSVSTGGEFPSDRESRQWICVKGIPPKEDDRWAEGKDGEKKADKVSLNVQLSVSSCIKLFVRPPAVKGRPDDVAGKVEWQRAGNRLKGVNPTPFYINLSTLTVGGKEVKEREYIAPFSSREYPLPAGHRVRFSGR

SEQ ID NO: 2400 - protein, 990 aa, Escherichia coli
MKENNLNRVIGWSGLLLTSLLSTSALADNIGTSAEELGLSDYRHFVIYPRLDKALKAQKNNDEATAIREFEYIHQQVPDNIPLTLYLAEAYRHFGHDDRARLLLEDQLKRHPGDARLERSLAAIPVEVKSVTTVEELLAQQKACDAAPTLRCRSEVGQNALRLAQLPVARAQLNDATFAASPEGKTLRTDLLQRAIYLKQWSQADTLYNEARQQNTLSAAERRQWFDVLLAGQLDDRILALQSQGIFTDPQSYITYATALAYRGEKARLQHYLIENKPLFTTDAQEKSWLYLLSKYSANPVQALANYTVQFADNRQYVVGATLPVLLKEGQYDAAQKLLATLPANEMLEERYAVSVATRNKAEALRLARLLYQQEPANLTRLDQLTWQLMQNEQSREAADLLLQRYPFQGDARVSQTLMARLASLLESHPYLATPAKVAILSKPLPLAEQRQWQSQLPGIADNCPAIVRLLGDMSPSYDAAAWNRLAKCYRDTLPGVALYAWLQAEQRQPSAWQHRAVAYQAYQVEDYATALAAWQKISLHDMSNEDLLAAANTAQAAGNGAARDRWLQQAEKRGLGSNALYWWLHAQRYIPGQPELALNDLTRSINIAPSANAYVARATIYRQRHNVPAAVSDLRAALELEPNNSNTQAALGYALWDSGDIAQSREMLEPAHKGLPDDPALIRQLAYVNQRLDDMPATQHYARLVIDDIDNQALITPLTPEQNQQRFNFRRLHEEVGRRWTFSFDSSIGLRSGAMSTANNNVGGAAPGKSYRSYGQLEAEYRIGRNMLLEGDLLSVYSRVFADTGENGVMMPVKNPMSGTGLRWKPLRDQIFFIAVEQQLPLNGQNGASDTMLRASASFFNGGKYSDEWHPNGSGWFAQNLYLDAAQYIRQDIQAWTADYRVSWHQKVANGQTIEPYAHVQDNGYRDKGTQGAQLGGVGVRWNIWTGETHYDAWPHKVSLGVEYQHTFKAINQRNGERNNAFLTIGVHW

SEQ ID NO: 2401 - protein, 524 aa, Escherichia coli
MLSTLRRTLFALLACASFIVHAAAPDEITTAWPVNVGPLNPHLYTPNQMFAQSMVYEPLVKYQADGSVIPWLAKSWTHSEDGKTWTFTLRDDVKFSNGEPFDAEAAAENFRAVLDNRQRHAWLELANQIVDVKALSKTELQITLKSAYYPFLQELALPRPFRFIAPSQFKNHETMNGIKAPIGTGPWILQESKLNQYDVFVRNENYWGEKPAIKKITFNVIPDPTTRAVAFETGDIDLLYGNEGLLPLDTFARFSQNPAYHTQLSQPIETVMLALNTAKAPTNELAVREALNYAVNKKSLIDNALYGTQQVADTLFAPSVPYANLGLKPSQYDPQKAKALLEKAGWTLPAGKDIREKNGQPLRIELSFIGTDALSKSMAEIIQADMRQIGADVSLIGEEESSIYARQRDGRFGMIFHRTWGAPYDPHAFLSSMRVPSHADFQAQQGLADKPLIDKEIGEVLATHDETQRQALYRDILTRLHDEAVYLPISYISMMVVSKPELGNIPYAPIATEIPFEQIKPVKP

SEQ ID NO: 2402 - protein, 236 aa, Escherichia coli
MVKKAIVTAMAVISLFTLMGCNNRAEVDTLSPAQAAELKPMPQSWRGVLPCADCEGIETSLFLEKDGTWVMNERYLGAREEPSSFASYGTWARTADKLVLTDSKGEKSYYRAKGDALEMLDREGNPIESQFNYTLEAAQSSLPMTPMTLRGMYFYMADAATFTDCATGKRFMVANNAELERSYLAARGHSEKPVLLSVEGHFTLEGNPDTGAPTKVLAPDTAGKFYPNQDCSSLGQ

SEQ ID NO: 2403 - protein, 365 aa, Escherichia coli
MKKLTVAISAVAASVLMAMSAQAAEIYNKDSNKLDLYGKVNAKHYFSSNDADDGDTTYARLGFKGETQINDQLTGFGQWEYEFKGNRAESQGSSKDKTRLAFAGLKFGDYGSIDYGRNYGVAYDIGAWTDVLPEFGGDTWTQTDVFMTQRATGVATYRNNDFFGLVDGLNFAAQYQGKNDRSDFDNYTEGNGDGFGFSATYEYEGFGIGATYAKSDRTDTQVNAGKVLPEVFASGKNAEVWAAGLKYDANNIYLATTYSETQNMTVFADHFVANKAQNFEAVAQYQFDFGLRPSVAYLQSKGKDLGVWGDQDLVKYVDVGATYYFNKNMSTFVDYKINLLDKNDFTKALGVSTDDIVAVGLVYQF

SEQ ID NO: 2404 - protein, 478 aa, Escherichia coli
MTRIKINARRIFSLLIPFFFFTSVHAEQTAAPAKPVTVEAKNETFAPQHPDQYLSWKATSEQSERVDALAEDPRLVILWAGYPFSRDYNKPRGHAFAVTDVRETLRTGAPKNAEDGPLPMACWSCKSPDVARLIQKDGEDGYFHGKWARGGPEIVNNLGCADCHNTASPEFAKGKPELTLSRPYAARAMEAIGKPFEKAGRFDQQSMVCGQCHVEYYFDGKNKAVKFPWDDGMKVENMEQYYDKIAFSDWTNSLSKTPMLKAQHPEYETWTAGIHGKNNVTCIDCHMPKVQNAEGKLYTDHKIGNPFDNFAQTCANCHTQDKAALQKVVAERKQSINDLKIKVEDQLVHAHFEAKAALDAGATEAEMKPIQDDIRHAQWRWDLAIASHGIHMHAPEEGLRMLGTAMDKAADARTKLARLLATKGITHEIQIPDISTKEKAQQAIGLNMEQIKAEKQDFIKTVIPQWEEQARKNGLLSQ

SEQ ID NO: 2405 - protein, 478 aa, Escherichia coli
MTRIKINARRIFSLLIPFFFFTSVHAEQTAAPATPVTVEAKNETFAPQHPDQYLSWKATSEQSERVDALAEDPRLVILWAGYPFSRDYNKPRGHAFAVTDVRETLRTGAPKNAEDGPLPMACWSCKSPDVARLIQKDGEDGYFHGKWARGGPEIVNNLGCADCHNTASPEFAKGKPELTLSRPYAARAMEAIGKPFEKAGRFDQQSMVCGQCHVEYYFDGKNKAVKFPWDDGMKVENMEQYYDKIAFSDWTNSLSKTPMLKAQHPEYETWTAGIHGKNNVTCIDCHMPKVQNAEGKLYTDHKIGNPFDNFAQTCANCHTQDKAALQKVVAERKQSINDLKIKVEDQLVHAHFEAKAALDAGATEAEMKPIQDDIRHAQWRWDLAIASHGIHMHAPEEGLRMLGTAMDKAADARTKLARLLATKGITHEIQIPDISTKEKAQQAIGLNMEQIKAEKQDFIKTVIPQWEEQARKNGLLSQ

SEQ ID NO: 2406 - protein, 478 aa, Escherichia coli; identical to SEQ ID NO: 2405

SEQ ID NO: 2407 - protein, 478 aa, Escherichia coli; identical to SEQ ID NO: 2404

SEQ ID NO: 2408 - protein, 478 aa, Escherichia coli; identical to SEQ ID NO: 2404

SEQ ID NO: 2409 - protein, 478 aa, Escherichia coli
MTRIKINARRIFSLLIPFFFFTSVHAEQTAAPAKPVTVEAKNETFAPQHPDQYLSWKATSEQSERVDALAEDPRLVILWAGYPFSHDYNKPRGHAFAVTDVRETLRTGAPKNAEDGPLPMACWSCKSPDVARLIQKDGEDGYFHGKWARGGPEIVNNLGCADCHNTASPEFAKGKPELTLSRPYAARAMEAIGKPFEKAGRFDQQSMVCGQCHVEYYFDGKNKAVKFPWDDGMKVENMEQYYDKIAFSDWTNSLSKTPMLKAQHPEYETWTAGIHGKNNVTCIDCHMPKVQNAEGKLYTDHKIGNPFDNFAQTCANCHTQDKAALQKVVAERKQSINDLKIKVEDQLVHAHFEAKAALDAGATEAEMKPIQDDIRHAQWRWDLAIASHGIHMHAPEEGLRMLGTAMDKAADARTKLARLLATKGITHEIQIPDISTKEKAQQAIGLNMEQIKAEKQDFIKTVIPQWEEQARKNGLLSQ

SEQ ID NO: 2410 - protein, 478 aa, Escherichia coli; identical to SEQ ID NO: 2404

SEQ ID NO: 2411 - protein, 478 aa, Escherichia coli
MTRIKINARRIFSLLIPFFFFTSVHAEQTAAPATPVTVEAKNKTFAPQHPDQYLSWKATSEQSERVDALAEDPRLVILWAGYPFSRDYNKPRGHAFAVTDVRETLRTGAPKNAEDGPLPMACWSCKSPDVARLIQKDGEDGYFHGKWARGGPEIVNNLGCADCHNTASPEFAKGKPELTLSRPYAARAMEAIGKPFEKAGRFDQQSMVCGQCHVEYYFDGKNKAVKFPWDDGMKVENMEQYYDKIAFSDWTNSLSKTPMLKAQHPEYETWTAGIHGKNNVTCIDCHMPKVQNAEGKLYTDHKIGNPFDNFAQTCANCHTQDKAALQKVVAERKQSINDLKIKVEDQLVHAHFEAKAALDAGATEAEMKPIQDDIRHAQWRWDLAIASHGIHMHAPEEGLRMLGTAMDKAADARTKLARLLATKGITHEIQIPDISTKEKAQQAIGLNMEQIKAEKQDFIKTVIPQWEEQARKNGLLSQ

SEQ ID NO: 2412 - protein, 478 aa, Escherichia coli; identical to SEQ ID NO: 2404

SEQ ID NO: 2413 - protein, 478 aa, Escherichia coli; identical to SEQ ID NO: 2404

SEQ ID NO: 2414 - protein, 478 aa, Escherichia coli; identical to SEQ ID NO: 2404

SEQ ID NO: 2415 - protein, 478 aa, Escherichia coli
MTRIKINARRIFSLLIPFFFFTSVHAEQTAAPAKTVTVEAKNETFAPQHPDQYLSWKATSEQSERVDALAEDPRLVILWAGYPFSRDYNKPRGHAFAVTDVRETLRTGAPKNAEDGPLPMACWSCKSPDVARLIQKDGEDGYFHGKWARGGPEIVNNLGCADCHNTASPEFAKGKPELTLSRPYAARAMEAIGKPFEKAGRFDQQSMVCGQCHVEYYFDGKNKAVKFPWDDGMKVENMEQYYDKIAFSDWTNSLSKTPMLKAQHPEYETWTAGIHGKNNVTCIDCHMPKVQNAEGKLYTDHKIGNPFDNFAQTCANCHTQDKAALQKVVAERKQSINDLKIKVEDQLVHAHFEAKAALDAGATEAEMKPIQDDIRHAQWRWDLAIASHGIHMHAPEEGLRMLGTAMDKAADARTKLARLLATKGITHEIEIPDISTKEKAQQAIGLNMEQIKAEKQDFIKTVIPQWEEQARKNGLLSQ

SEQ ID NO: 2416 - protein, 478 aa, Escherichia coli; identical to SEQ ID NO: 2405

SEQ ID NO: 2417 - protein, 478 aa, Escherichia coli; identical to SEQ ID NO: 2405

SEQ ID NO: 2418 - protein, 478 aa, Escherichia coli; identical to SEQ ID NO: 2405

SEQ ID NO: 2419 - protein, 478 aa, Escherichia coli; identical to SEQ ID NO: 2404

SEQ ID NO: 2420 - protein, 478 aa, Escherichia coli; identical to SEQ ID NO: 2404

SEQ ID NO: 2421 - protein, 478 aa, Escherichia coli
MTRIKINARRIFSLLIPFFFFTSVHAEQTATPAKPVTVEAKNETFAPQHPDQYLSWKATSEQSERVDALAEDPRLVILWAGYPFSRDYNKPRGHAFAVTDVRETLRTGAPKNAEDGPLPMACWSCKSPDVARLIQKDGEDGYFHGKWARGGPEIVNNLGCADCHNTASPEFAKGKPELTLSRPYAARAMEAIGKPFEKAGRFDQQSMVCGQCHVEYYFDGKNKAVKFPWDDGMKVENMEQYYDKIAFSDWTNSLSKTPMLKAQHPEYETWTAGIHGKNNVTCIDCHMPKVQNAEGKLYTDHKIGNPFDNFAQTCANCHTQDKAALQKVVAERKQSINDLKIKVEDQLVHAHFEAKAALDAGATEAEMKPIQDDIRHAQWRWDLAIASHGIHMHAPEEGLRMLGTAMDKAADARTKLARLLATKGITHEIQIPDISTKEKAQQAIGLNMEQIKAEKQDFIKTVIPQWEEQERKNGLLSQ

SEQ ID NO: 2422 - protein, 478 aa, Escherichia coli; identical to SEQ ID NO: 2404

SEQ ID NO: 2423 - protein, 478 aa, Escherichia coli; identical to SEQ ID NO: 2404

SEQ ID NO: 2424 - protein, 478 aa, Escherichia coli; identical to SEQ ID NO: 2405

SEQ ID NO: 2425 - protein, 188 aa, Escherichia coli
MSVLRSLLTAGVLASGLLWSLNGITATPAAQASDDRYEVTQQRNPDAACLDCHKPDTEGMHGKHASVINPNNKLPVTCTNCHGQPSPQHREGVKDVMRFNEPMYKVGEQNSVCMSCHLPEQLQKAFWPHDVHVTKVACASCHSLHPQQDTMQTLSDKGRIKICVDCHSDQRTNPNFNPASVPLLKEQP

SEQ ID NO: 2426 - protein, 188 aa, Escherichia coli; identical to SEQ ID NO: 2425

SEQ ID NO: 2427 - protein, 127 aa, Escherichia coli
MYKGLLTLLLLFTCFARAQVVDTWQFANPQQQQQALNIASQLRCPQCQNQNLLESNAPVAVSMRHQVYSMVAEGKSEVEIIGWMTERYGDFVRYNPPLTGQTLVLWALPVVLLLLMALILWRVRAKR

SEQ ID NO: 2428 - protein, 127 aa, Escherichia coli
MNKGLLTLLLLFTCFAHAQVVDTWQFANPQQQQQALNIASQLRCPQCQNQNLLESNAPVAVSMRHQVYSMVAEGKNEVEIIGWMTERYGDFVRYNPPLTGQTLVLWALPVVLLLLMALILWRVRAKR

SEQ ID NO: 2429 - protein, 346 aa, Escherichia coli
MKKTAIAIAVALAGFATVAQAAPKDNTWYTGAKLGWSQYHDTGFINNNGPTHENQLGAGAFGGYQVNPYVGFEMGYDWLGRMPYKGSVENGAYKAQGVQLTAKLGYPITDDLDIYTRLGGMVWRADTKSNVYGKNHDTGVSPVFAGGVEYAITPEIATRLEYQWTNNIGDAHTIGTRPDNGMLSLGVSYRFGQGEAAPVVAPAPAPAPEVQTKHFTLKSDVLFNFNKATLKPEGQAALDQLYSQLSNLDPKDGSVVVLGYTDRIGSDAYNQGLSERRAQSVVDYLISKGIPADKISARGMGESNPVTGNTCDNVKQRAALIDCLAPDRRVEIEVKGIKDVVTQPQA

SEQ ID NO: 2430 - protein, 346 aa, Escherichia coli; identical to SEQ ID NO: 2429

SEQ ID NO: 2431 - protein, 367 aa, Escherichia coli
MKVKVLSLLVPALLVAGAANAAEVYNKDGNKLDLYGKVDGLHYFSDDKSVDGDQTYMRLGFKGETQVTDQLTGYGQWEYQIQGNSAENENNSWTRVAFAGLKFQDVGSFDYGRNYGVVYDVTSWTDVLPEFGGDTYGSDNFMQQRGNGFATYRNTDFFGLVDGLNFAVQYQGKNGSVSGEGMTNNGREALRQNGDGVGGSITYDYEGFGIGAAVSSSKRTDDQNSPLYIGNGDRAETYTGGLKYDANNIYLAAQYTQTYNATRVGSLGWANKAQNFEAVAQYQFDFGLRPSLAYLQSKGKNLGVINGRNYDDEDILKYVDVGATYYFNKNMSTYVDYKINLLDDNQFTRDAGINTDNIVALGLVYQF

SEQ ID NO: 2432 - protein, 375 aa, Escherichia coli
MKVKVLSLLVPALLVAGAANAAEVYNKDGNKLDLYGKVDGLHYFSDDKSVDGDQTYMRLGFKGETQVTDQLTGYGQWEYQIQGNAPESENNSWTRVAFAGLKFQDIGSFDYGRNYGVVYDVTSWTDVLPEFGGDTYGSDNFMQQRGNGFATYRNTDFFGLVDGLNFAVQYQGQNGSVSGENDPDFTGHGITNNGRKALRQNGDGVGGSITYDYEGFGVGAAVSSSKRTWDQNNTGLIGTGDRAETYTGGLKYDANNIYLAAQYTQTYNATRVGSLGWANKAQNFEAVAQYQFDFGLRPSVAYLQSKGKNLGVVAGRNYDDEDILKYVDVGATYYFNKNMSTYVDYKINLLDDNQFTRAAGINTDDIVALGLVYQF

SEQ ID NO: 2433 - protein, 367 aa, Escherichia coli
MKVKVLSLLVPALLVAGAANAAEVYNKDGNKLDLYGKVDGLHYFSDNKDVDGDQTYMRLGFKGETQVTDQLTGYGQWEYQIQGNSAENENNSWTRVAFAGLKFQDVGSFDYGRNYGVVYDVTSWTDVLPEFGGDTYGSDNFMQQRGNGFATYRNTDFFGLVDGLNFAVQYQGKNGNPSGEGFTSGVTNNGRDALRQNGDGVGGSITYDYEGFGIGGAISSSKRTDAQNTAAYIGNGDRAETYTGGLKYDANNIYLAAQYTQTYNATRVGSLGWANKAQNFEAVAQYQFDFGLRPSLAYLQSKGKNLGRGYDDEDILKYVDVGATYYFNKNMSTYVDYKINLLDDNQFTRDAGINTDNIVALGLVYQF

SEQ ID NO: 2434 - protein, 362 aa, Escherichia coli
MMKRNILAVIVPALLVAGTANAAEIYNKDGNKVDLYGKAVGLHYFSKGNGENSYGGNGDMTYARLGFKGETQINSDLTGYGQWEYNFQGNNSEGADAQTGNKTRLAFAGLKYADVGSFDYGRNYGVVYDALGYTDMLPEFGGDTAYSDDFFVGRVGGVATYRNSNFFGLVDGLNFAVQYLGKNERDTARRSNGDGVGGSISYEYEGFGIVGAYGAADRTNLQEAQPLGNGKKAEQWATGLKYDANNIYLAANYGETRNATPITNKFTNTSGFANKTQDVLLVAQYQFDFGLRPSIAYTKSKAKDVEGIGDVDLVNYFEVGATYYFNKNMSTYVDYIINQIDSDNKLGVGSDDTVAVGIVYQF

SEQ ID NO: 2435 - protein, 301 aa, Escherichia coli
MKKLLPCTALVMCAGMACAQAEERNDWHFNIGAMYEIENVEGYGEDMDGLAEPSVYFNAANGPWRIALAYYQEGPVDYSAGKRGTWFDRPELEVHYQFLENDDFSFGLTGGFRNYGYHYVDEPGKDTANMQRWKIAPDWDVKLTDDLRFNGWLSMYKFANDLNTTGYADTRVETETGLQYTFNETVALRVNYYLERGFNMDDSRNNGEFSTQEIRAYLPLTLGNHSVTPYTRIGLDRWSNWDWQDDIEREGHDFNRVGLFYGYDFQNGLSVSLEYAFEWQDHDEGDSDKFHYAGVGVNYSF

SEQ ID NO: 2436 - protein, 230 aa, Escherichia coli
MKNINAIILLSSLTSASVFAGAYVENREAYNLASDQGEVMLRVGYNFDMGAGIMLTNTYTFQREDELKHGYNEIEGWYPLFKPTDKLTIQPGGLINDKSIGSGGAVYLDVNYKFTPWFNLTVRNRFNHNNYSSTDLNGDLDNNDSYEIGNYWNFIITDKFSYTFEPHYFYNINDFNSGNGTKHHWEITNTFRYRINEHWLPYIELRWLDRNVEPYHREQNQIRIGTKYFF

SEQ ID NO: 2437 - protein, 230 aa, Escherichia coli
MKKINAIILLSSLTSASVFAGAYVENREAYNLASDQGEVMLRVGYNFDMGAGIMLTNTYNFQREDELKHGYNEIEGWYPLFKPTDKLTIQPGGLINDKSIGSGGAVYLDVNYKFVPWFNLTVRNRYNHNNYSSTDLSGELDNNDTYEIGTYWNFKITDKFSYTFEPHYFMRVNDFNSSNGKDHHWEITNTFRYRINEHWLPYFELRWLDRNVEPYHREQNQIRIGTKYFF

SEQ ID NO: 2438 - protein, 377 aa, Escherichia coli
MKSKVLALLIPALLAAGAAHAAEVYNKDGNKLDLYGKVDGLHYFSDNSAKDGDQSYARLGFKGETQINDQLTGYGQWEYNIQANNTESSKNQSWTRLAFAGLKFADYGSFDYGRNYGVMYDIEGWTDMLPEFGGDSYTNADNFMTGRANGVATYRNTDFFGLVNGLNFAVQYQGNNEGASNGQEGTNNGRDVRHENGDGWGLSTTYDLGMGFSAGAAYTSSDRTNDQVNHTAAGGDKADAWTAGLKYDANNIYLATMYSETRNMTPFGDSDYAVANKTQNFEVTAQYQFDFGLRPAVSFLMSKGRDLHAAGGADNPAGVDDKDLVKYADIGATYYFNKNMSTYVDYKINLLDEDDSFYAANGISTDDIVALGLVYQF

SEQ ID NO: 2439 - protein, 315 aa, Escherichia coli
MQTKLLAIMLAAPVVFSSQEASASDFFGPEKISTEINLGTLSGKTKERVYEPEEGGRKVSQLDWKYSNAAILKGAVNWELNPWLSVGAAGWTTLNSRGGNMVDQDWMDSGTPGTWTDESRHPDTRLNYANEFDLNVKGWFLKESDYRLAIMAGYQESRYSFNATGGTYIYSENGGFRNETGALPDKIKVIGYKQHFKIPYVGLTGNYRYDNFEFGGAFKYSGWVRGSDNDEHYVRQTTFRSKVINQNYYSVAVNAGYYITPEAKVYIEGVWSRLTNKKGDTSLYDRSDNTSEHNNNGAGIENYNFITTAGLKYTF

SEQ ID NO: 2440 - protein, 317 aa, Escherichia coli
MRAKLLGIVLTTPIAISSFASTETLSFTPDNINADISLGTLSGKTKERVYLAEEGGRKVSQLDWKFNNAAIIKGAINWDLMPQISIGAAGWTTLGSRGGNMVDQDWMDSSNPGTWTDESRHPDTQLNYANEFDLNIKGWLLNEPNYRLGLMAGYQESRYSFTARGGSYIYSSEEGFRDDIGSFPNGERAIGYKQRFKMPYIGLTGSYRYEDFELGGTFKYSGWVEASDNDEHYDPGKRITYRSKVKDQNYYSVSVNAGYYVTPNAKVYVEGTWNRVTNKKGNTSLYDHNDNTSDYSKNGAGIENYNFITTAGLKYTF

SEQ ID NO: 2441 - protein, 317 aa, Escherichia coli
MRAKLLGIVLTTPIAISSFASTETLSFTPDNINADISLGTLSGKTKERVYLAEEGGRKVSQLDWKFNNAAIIKGAINWDLMPQISIGAAGWTTLGSRGGNMVDQDWMDSSNPGTWTDESRHPDTQLNYANEFDLNIKGWLLNEPNYRLGLMAGYQESRYSFTARGGSYIYSSEEGFRDDIGSFPNGERAIGYKQRFKMPYIGLTGSYRYEDFELGGTFKYSGWVESSDNDEHYDPGKRITYRSKVKDQNYYSVAVNAGYYVTPNAKVYVEGAWNRVTNKKGNTSLYDHNNNTSDYSKNGAGIENYNFITTAGLKYTF

SEQ ID NO: 2442 - protein, 212 aa, Escherichia coli
MKKLTVAALAVTTLLSGSAFAHEAGEFFMRAGSATVRPTEGAGGTLGSLGGFSVTNNTQLGLTFTYMATDNIGVELLAATPFRHKIGTRATGDIATVHHLPPTLMAQWYFGDASSKFRPYVGAGINYTTFFDNGFNDHGKEAGLSDLSLKDSWGAAGQVGVDYLINRDWLVNMSVWYMDIDTTANYKLGGAQQHDSVRLDPWVFMFSAGYRF

SEQ ID NO: 2443 - protein, 171 aa, Escherichia coli
MKKIACLSALAAVLAFTAGTSVAATSTVTGGYAQSDAQGQMNKMGGFNLKYRYEEDNSPLGVIGSFTYTEKSRTASSGDYNKNQYYGITAGPAYRINDWASIYGVVGVGYGKFQTTEYPTYKHDTSDYGFSYGAGLQFNPMENVALDFSYEQSRIRSVDVGTWIAGVGYRF

SEQ ID NO: 2444 - protein, 171 aa, Escherichia coli; identical to SEQ ID NO: 2443

SEQ ID NO: 2445 - protein, 171 aa, Escherichia coli; identical to SEQ ID NO: 2443

SEQ ID NO: 2446 - protein, 551 aa, Escherichia coli
MDRRRFIKGSMAMAAVCGTSGIASLFSQAAFAADSDIADGQTQRFDFSILQSMAHDLAQTAWRGAPRPLPDTLATMTPQAYNSIQYDAEKSLWHNVENRQLDAQFFHMGMGFRRRVRMFSVDPATHLAREIHFRPELFKYNDAGVDTKQLEGQSDLGFAGFRVFKAPELARRDVVSFLGASYFRAVDDTYQYGLSARGLAIDTYTDSKEEFPDFTAFWFDTVKPGATTFTVYALLDSASITGAYKFTIHCEKSQVIMDVENHLYARKDIKQLGIAPMTSMFSCGTNERRMCDTIHPQIHDSDRLSMWRGNGEWICRPLNNPQKLQFNAYTDNNPKGFGLLQLDRDFSHYQDIMGWYNKRPSLWVEPRNKWGKGTIGLMEIPTTGETLDNIVCFWQPEKAVKAGDEFAFQYRLYWSAQPPVHCPLARVMATRTGMGGFPEGWAPGEHYPEKWARRFAVDFVGGDLKAAAPKGIEPVITLSSGEAKQIEILYIEPIDGYRIQFDWYPTSDSTDPVDMRMYLRCQGDAISETWLYQYFPPAPDKRQYVDDRVMS

SEQ ID NO: 2447 - protein, 551 aa, Escherichia coli
MDRRRFIKGSMAMAAVCGTSGIASLFSQAAFAADSDIADGQTQRFDLSILQSMAHDLAQTAWRGAPRPLPDTLATMTPQAYNSIQYDAEKSLWHNVENRQLDAQFFHMGMGFRRRVRMFSVDPATHLAREIHFRPELFKYNDAGVDTKQLEGQSDLGFAGFRVFKAPELARRDVVSFLGASYFRAVDDTYQYGLSARGLAIDTYTDSKEEFPDFTAFWFDTVKPGATTFTVYALLDSASITGAYKFTIHCEKNQVIMDVENHLYARKDIKQLGIAPMTSMFSCGTNERRMCDTIHPQIHDSDRLSMWRGNGEWICRPLNNPQKLQFNAYTDNNPKGFGLLQLDRDFSHYQDIMGWYNKRPSLWVEPRNKWGKGTIGLMEIPTTGETLDNIVCFWQPEKAVKAGDEFAFQYRLYWSAQPPVHCPLARVMATRTGMGGFPEGWAPGEHYPEKWARRFAVDFVGGDLKAAAPKGIEPVITLSSGEAKQIEILYIEPIDGYRIQFDWYPTSDSTDPVDMRMYLRCQGDAISETWLYQYFPPAPDKRQYVDDRVMS

SEQ ID NO: 2448 - protein, 551 aa, Escherichia coli; identical to SEQ ID NO: 2446

SEQ ID NO: 2449 - protein, 551 aa, Escherichia coli
MDRRRFIKGSMAMAAVCGTSGIASLFSQAAFAADSDIADGQTQRFDFSILQSMAHDLAQTAWRGAPRPLPDTLATMTPQAYNSIQYDAEKSLWHNVENRQLDAQFFHMGMGFRRRVRMFSVDPATHLAREIHFRPELFKYNDAGVDTKQLEGQSDLGFAGFRVFKAPELARRDVVSFLGASYFRAVDDTYQYGLSARGLAIDTYTDSKEEFPDFTAFWFDTVKPGATTFTVYALLDSASITGAYKFTIHCEKSQVIMDVENHLYARKDIKQLGIAPMTSMFSCGTNERRMCDTIHPQIHDSDRLSMWRGNGEWICRPLNNPQKLQFNAYTDNNPKGFGLLQLDRDFSHYQDIMGWYNKRPSLWVEPRNKWGKGTIGLMEIPTTGETLDNIVCFWQPEKAVKAGDEFAFQYRLYWSAQPPVHCPLARVMATRTGMGGFSEGWAPGEHYPEKWARRFAVDFVGGDLKAAAPKGIEPVITLSSGEAKQIEILYIEPIDGYRIQFDWYPTSDSTDPVDMRMYLRCQGDAISETWLYQYFPPAPDKRQYVDDRVMS

SEQ ID NO: 2450 - protein, 551 aa, Escherichia coli; identical to SEQ ID NO: 2449

SEQ ID NO: 2451 - protein, 551 aa, Escherichia coli
MDRRRFIKGSMAMAAVCGTSGIASLFSQAAFAADSDIADGQTQRFDFSILQSMAHDLAQTAWHGAPRPLPDTLATMTPQAYNSIQYDAEKSLWHNVENRQLDAQFFHMGMGFRRRVRMFSVDPATHLAREIHFRPELFKYNDAGVDTKQLEGQSDLGFAGFRVFKAPELARRDVVSFLGASYFRAVDDTYQYGLSARGLAIDTYTDSKEEFPDFTAFWFDTVKPGATTFTVYALLDSASITGAYKFTIHCEKSQVIMDVENHLYARKDIKQLGIAPMTSMFSCGTNERRMCDTIHPQIHDSDRLSMWRGNGEWICRPLNNPQKLQFNAYTDNNPKGFGLLQLDRDFSHYQDIMGWYNKRPSLWVEPRNKWGKGTIGLMEIPTTGETLDNIVCFWQPEKAVKAGDEFAFQYRLYWSAQPPVHCPLARVMATRTGMGGFPEGWAPGEHYPEKWARRFAVDFVGGDLKAAAPKGIEPVITLSSGEAKQIEILYIEPIDGYRIQFDWYPTSDSTDPVDMRMYLRCQGDAISETWLYQYFPPAPDKRQYVDDRVMS

SEQ ID NO: 2452 - protein, 551 aa, Escherichia coli
MDRRRFIKGSMAMAAVCGTSGIASLFSQAAFAADSDIADGQTQRFDFSILQSMAHDLAQTAWRGAPRPLPDTLATMTPQAYNSIQYDAEKSLWHNVENRQLDAQFFHMGMGFRRRVRMFSVDPATHLAREIHFRPELFKYNDAGVDTKQLEGQSDLGFAGFRVFKAPELARRDVVSFLGASYFRAVDDTYQYGLSARGLAIDTYTDSKEEFPDFTAFWFDTVKPGATTFTVYALLDSASITGAYKFTIHCEKNQVIMDVENHLYARKDIKQLGIAPMTSMFSCGTNERRMCDTIHPQIHDSDRLSMWRGNGEWICRPLNNPQKLQFNAYTDNNPKGFGLLQLDRDFSHYQDIMGWYNKRPSLWVEPRNKWGKGTIGLMEIPTTGETLDNIVCFWQPEKAVKAGDEFAFQYRLYWSAQPPVHCPLARVMATRTGMGGFPEGWAPGEHYPEKWARRFAVDFVGGDLKAAAPKGIEPVITLSSGEAKQIEILYIEPIDGYRIQFDWYPTSDSTDPVDMRMYLRCQGDAISETWLYQYFPPAPDKRQYVDDRVMS

SEQ ID NO: 2453 - protein, 551 aa, Escherichia coli; identical to SEQ ID NO: 2452

SEQ ID NO: 2454 - protein, 551 aa, Escherichia coli; identical to SEQ ID NO: 2449

SEQ ID NO: 2455 - protein, 551 aa, Escherichia coli; identical to SEQ ID NO: 2446

SEQ ID NO: 2456 - protein, 551 aa, Escherichia coli; identical to SEQ ID NO: 2452

SEQ ID NO: 2457 - protein, 511 aa, Escherichia coli
MMKMRWLSAAVMLTLYTSSSWAFSIDDVAKQAQSLAGKGYEAPKSNLPSVFRDMKYADYQQIQFNHDKAYWNNLKTPFKLEFYHQGMYFDTPVKINEVTATAVKRIKYSPDYFTFGDVQHDKDTVKDLGFAGFKVLYPINSKDKNDEIVSMLGASYFRVIGAGQVYGLSARGLAIDTALPSGEEFPRFKEFWIERPKPTDKRLTIYALLDSPRATGAYKFVVMPGRDTVVDVQSKIYLRDKVGKLGVAPLTSMFLFGPNQPSPANNYRPELHDSNGLSIHAGNGEWIWRPLNNPKHLAVSSFSMENPQGFGLLQRGRDFSRFEDLDDRYDLRPSAWVTPKGEWGKGSVELVEIPTNDETNDNIVAYWTPDQLPEPGKEMNFKYTITFSRDEDKLHAPDNAWVQQTRRSTGDVKQSNLIRQPDGTIAFVVDFTGAEMKKLPEDTPVTAQTSIGDNGEIVESTVRYNPVTKGWRLVMRVKVKDAKKTTEMRAALVNADQTLSETWSYQLPANE

SEQ ID NO: 2458 - protein, 511 aa, Escherichia coli; identical to SEQ ID NO: 2457

SEQ ID NO: 2459 - protein, 511 aa, Escherichia coli; identical to SEQ ID NO: 2457

SEQ ID NO: 2460 - protein, 511 aa, Escherichia coli; identical to SEQ ID NO: 2457

SEQ ID NO: 2461 - protein, 511 aa, Escherichia coli; identical to SEQ ID NO: 2457

SEQ ID NO: 2462 - protein, 517 aa, Escherichia coli
MKHKLQMMKMRWLSAAVMLTLYTSSSWAFSIDDVAKQAQSLAGKGYEAPKSNLPSVFRDMKYADYQQIQFNHDKAYWNNLKTPFKLEFYHQGMYFDTPVKINEVTATAVKRIKYSPDYFTFGDVQHDKDTVKDLGFAGFKVLYPINSKDKNDEIVSMLGASYFRVIGAGQVYGLSARGLAIDTALPSGEEFPRFKEFWIERPKPTDKRLTIYALLDSPRATGAYKFVVMPGRDTVVDVQSKIYLRDKVGKLGVAPLTSMFLFGPNQPSPANNYRPELHDSNGLSIHAGNGEWIWRPLNNPKHLAVSSFSMENPQGFGLLQRGRDFSRFEDLDDRYDLRPSAWVTPKGEWGKGSVELVEIPTNDETNDNIVAYWTPDQLPEPGKEMNFKYTITFSRDEDKLHAPDNAWVQQTRRSTGDVKQSNLIRQPDGTIAFVVDFTGAEMKKLPEDTPVTAQTSIGDNGEIVESTVRYNPVTKGWRLVMRVKVKDAKKTTEMRAALVNADQTLSETWSYQLPANE

SEQ ID NO: 2463 - protein, 511 aa, Escherichia coli; identical to SEQ ID NO: 2457

SEQ ID NO: 2464 - protein, 511 aa, Escherichia coli; identical to SEQ ID NO: 2457

SEQ ID NO: 2465 - protein, 511 aa, Escherichia coli
MMKMRWLSAAVMLTLYTSSSWAFSIDDVAKQAQSLAGKGYEAPKSNLPSVFRDMKYADYQQIQFNHDKAYWNNLKTPFKLEFYHQGMYFDTPVKINEVTATAVKRIKYSPDYFTFGDVQHDKDTVKDLGFAGFKVLYPINSKDKNDEIVSMLGASYFRVIGAGQVYGLSARGLAIDTALPSGEEFPRFKEFWIERPKPTDKRLTIYALLDSPRATGAYKFVVMPGRDTVVDVQSKIYLREKVGKLGVAPLTSMFLFGPNQPSPANNYRPELHDSNGLSIHAGNGEWIWRPLNNPKHLAVSSFSMENPQGFGLLQRGRDFSRFEDLDDRYDLRPSAWVTPKGEWGKGSVELVEIPTNDETNDNIVAYWTPDQLPEPGKEMNFKYTITFSRDEDKLHAPDNAWVQQTRRSTGDVKQSNLIRQPDGTIAFVVDFTGAEMKKLPEDTPVTAQTSIGDNGEIVESTVRYNPVTKGWRLVMRVKVKDAKKTTEMRAALVNADQTLSETWSYQLPANE

SEQ ID NO: 2466 - protein, 511 aa, Escherichia coli
MMKMRWLSAAVMLTLYTSSSWAFSIDDVAKQAQSLAGKGYETPKSNLPSVFRDMKYADYQQIQFNHDKAYWNNLKTPFKLEFYHQGMYFDTPVKINEVTATAVKRIKYSPDYFTFGDVQHDKDTVKDLGFAGFKVLYPINSKDKNDEIVSMLGASYFRVIGAGQVYGLSARGLAIDTALPSGEEFPRFKEFWIERPKPTDKRLTIYALLDSPRATGAYKFVVMPGRDTVVDVQSKIYLRDKVGKLGVAPLTSMFLFGPNQPSPANNYRPELHDSNGLSIHAGNGEWIWRPLNNPKHLAVSSFSMENPQGFGLLQRGRDFSRFEDLDDRYDLRPSAWVTPKGEWGKGSVELVEIPTNDETNDNIVAYWTPDQLPEPGKEMNFKYTITFSRDEDKLHAPDNAWVQQTRRSTGDVKQSNLIRQPDGTIAFVVDFTGAEMKKLPEDTPVTAQTSIGDNGEIVESTVRYNPVTKGWRLVMRVKVKDAKKTTEMRAALVNADQTLSETWSYQLPANE

SEQ ID NO: 2467 - protein, 511 aa, Escherichia coli; identical to SEQ ID NO: 2466

SEQ ID NO: 2468 - protein, 511 aa, Escherichia coli; identical to SEQ ID NO: 2457

SEQ ID NO: 2469 - protein, 517 aa, Escherichia coli; identical to SEQ ID NO: 2462

SEQ ID NO: 2470 - protein, 511 aa, Escherichia coli; identical to SEQ ID NO: 2457

SEQ ID NO: 2471 - protein, 511 aa, Escherichia coli; identical to SEQ ID NO: 2457

SEQ ID NO: 2472 - protein, 511 aa, Escherichia coli; identical to SEQ ID NO: 2457

SEQ ID NO: 2473 - protein, 511 aa, Escherichia coli; identical to SEQ ID NO: 2466

SEQ ID NO: 2474 - protein, 511 aa, Escherichia coli; identical to SEQ ID NO: 2457

SEQ ID NO: 2475 - protein, 511 aa, Escherichia coli; identical to SEQ ID NO: 2457

SEQ ID NO: 2476 - protein, 517 aa, Escherichia coli; identical to SEQ ID NO: 2462

SEQ ID NO: 2477 - protein, 517 aa, Escherichia coli; identical to SEQ ID NO: 2462

SEQ ID NO: 2478 - protein, 543 aa, Escherichia coli
MTNITKRSLVAAGVLAALMAGNVALAADVPAGVTLAEKQTLVRNNGSEVQSLDPHKIEGVPESNISRDLFEGLLVSDLDGHPAPGVAESWDNKDAKVWTFHLRKDAKWSDGTPVTAQDFVYSWQRSVDPNTASPYASYLQYGHIAGIDEILEGKKPITDLGVKAIDDHTLEVTLSEPVPYFYKLLVHPSTSPVPKAAIEKFGEKWTQPGNIVTNGAYTLKDWVVNERIVLERSPTYWNNAKTVINQVTYLPIASEVTDVNRYRSGEIDMTNNSMPIELFQKLKKEIPDEVHVDPYLCTYYYEINNQKPPFNDVRVRTALKLGMDRDIIVNKVKAQGNMPAYGYTPPYTDGAKLTQPEWFGWSQEKRNEEAKKLLAEAGYTADKPLTINLLYNTSDLHKKLAIAASSLWKKNIGVNVKLVNQEWKTFLDTRHQGTFDVARAGWCADYNEPTSFLNTMLSNSSMNTAHYKSPAFDSIMAETLKVTDEAQRTALYTKAEQQLDKDSAIVPVYYYVNARLVKPWVGGYTGKDPLDNTYTRNMYIVKH

SEQ ID NO: 2479 - protein, 305 aa, Escherichia coli
MPLLKLWAGSLVMLAAVSLPLQAASPVKVGSKIDTEGALLGNIILQVLESHGVPTVNKVQLGTTPVVRGAITSGELDIYPEYTGNGAFFFKDENDAAWKNAQQGYEKVKKLDSEHNKLIWLTPAPANNTWTIAVRQDVAEKNKLTSLADLSRYLQEGGTFKLAASAEFIERADALPAFEKAYGFKLGQDQLLSLAGGDTAVTIKAAAQQTSGVNAAMAYGTDGPVAALGLQTLSDPQGVQPIYAPAPVVRESVLREYPQMAQWLQPVFASLDAKTLQQLNASIAVEGLDAKKVAADYLKQKGWTK

SEQ ID NO: 2480 - protein, 201 aa, Escherichia coli
MTMTRLKISKTLLAVMLTSAVATGSAYAENNAQTTNESAGQKVDSSMNKVGNFMDDSAITAKVKAALVDHDNIKSTDISVKTDQKVVTLSGFVESQAQAEEAVKVAKGVEGVTSVSDKLHVRDAKEGSVKGYAGDTATTSEIKAKLLADDIVPSRHVKVETTDGVVQLSGTVDSQAQSDRAESIAKAVDGVKSVKNDLKTK

SEQ ID NO: 2481 - protein, 201 aa, Escherichia coli; identical to SEQ ID NO: 2480

SEQ ID NO: 2482 - protein, 289 aa, Escherichia coli
MRTLQGWLLPVFMLPMAVYAQEATVKEVHDAPAVRGSIIANMLQEHDNPFTLYPYDTNYLIYTQTSDLNKEAIASYDWAENARKDEVKFQLSLAFPLWRGILGPNSVLGASYTQKSWWQLSNSEESSPFRETNYEPQLFLGFATDYRFAGWTLRDVEMGYNHDSNGRSDPTSRSWNRLYTRLMAENGNWLVEVKPWYVVGNTDDNPDITKYMGYYQLKIGYHLGDAVLSAKGQYNWNTGYGGAELGLSYPITKHVRLYTQVYSGYGESLIDYNFNQTRVGVGVMLNDLF

SEQ ID NO: 2483 - protein, 289 aa, Escherichia coli; identical to SEQ ID NO: 2482

SEQ ID NO: 2484 - protein, 846 aa, Escherichia coli
MKNRNRMIVNCVTASLMYYWSLPALAEQSSSEIKIVRDEYGMPHIYANDTWHLFYGYGYVVAQDRLFQMEMARRSTQGTVAEVLGKDFVKFDKDIRRNYWPDAIRAQIAALSPEDMSILQGYADGMNAWIDKVNTNPETLLPKQFNTFGFTPKRWEPFDVAMIFVGTMANRFSDSTSEIDNLALLTALKDKYGVSQGMAVFNQLKWLVNPSAPTTIAVQESNYPLKFNQQNSQTAALLPRYDLPAPMLDRPAKGADGALLALTAGKNRETIAAQFAQGGANGLAGYPTTSNMWVIGKSKAQDAKAIMVNGPQFGWYAPAYTYGIGLHGAGYDVTGNTPFAYPGLVFGHNGVISWGSTAGFGDDVDIFAERLSAEKPGYYLHNGKWVKMLSREETITVKNGQAETFTVWRTVHGNILQTDQTTQTAYAKSRAWDGKEVASLLAWTHQMKAKNWQEWTQQAAKQALTINWYYADVNGNIGYVHTGAYPDRQSGHDPRLPVPGTGKWDWKGLLPFEMNPKVYNPQSGYIANWNNSPQKDYPASDLFAFLWGGADRVTEIDRLLEQKPRLTADQAWDVIRQTSRQDLNLRLFLPTLQAATSGLTQSDPRRQLVETLTRWDGINLLNDDGKTWQQPGSAILNVWLTSMLKRTVVAAVPMPFDKWYSASGYETTQDGPTGSLNISVGAKILYEAVQGDKSPIPQAVDLFAGKPQQEVVLAALEDTWETLSKRYGNNVSNWKTPAMALTFRANNFFGVPQAAAEETRHQAEYQNRGTENDMIVFSPTTSDRPVLAWDVVAPGQSGFIAPDGTVDKHYEDQLKMYENFGRKSLWLTKQDVEAHKESQEVLHVQR

SEQ ID NO: 2485 - protein, 186 aa, Escherichia coli
MNVSKYVAIFSFVFIQLISVGKVFANADEWMTTFRENIVQTWQQPEHYDLYIPAITWHARFAYDKEKTDRYNERPWGGGFGLSRWDEKGNWHGLYAMAFKDSWNKWEPIAGYGWESTWRPLADENFHLGLGFTAGVTARDNWNYIPLPVLLPLASVGYGPVTFQMTYIPGTYNNGNVYFAWMRFQF

SEQ ID NO: 2486 - protein, 186 aa, Escherichia coli
MNVSKYVAIFSFVFIQLISVGKVFANADEWMTTFRENIAQTRQQPEHYDLYIPAITWHARFAYDKEKTDRYNERPWGGGFGLSRWDEKGNWHGLYAMAFKDSWNKWEPIAGYGWESTWRPLADENFHLGLGFTAGVTARDNWNYIPLPVLLPLASVGYGPVTFQMTYIPGTYNNGNVYFAWMRFQF

SEQ ID NO: 2487 - protein, 186 aa, Escherichia coli
MKVSKYVAIFFFVFIQLISVGKVFANADEWMTTFRENIAQTWQQPEHYDLYIPAITWHARFAYDKEKTDRYNERPWGGGFGQSRWDEKGNWHGLYAMAFKDSWNKWEPIAGYGWESTWRPLADENFHLGLGFTAGVTARDNWNYIPLPVLLPLASVGYGPATFQMTYIPGTYNNGNVYFAWMRFQF

SEQ ID NO: 2488 - protein, 186 aa, Escherichia coli
MNVSKYVAIFFFVFIQLISVGKVFANADEWMTTFRENIAQTWQQPEHYDLYIPAITWHARFAYDKEKTDRYNERPWGGGFGQSRWDEKGNWHGLYAMAFKDSWNKWEPIAGYGWESTWRPLADENFHLGLGFTAGVTARDNWNYIPLPVLLPLASVGYGPATFQMTYIPGTYNNGNVYFAWMRFQF

SEQ ID NO: 2489 - protein, 186 aa, Escherichia coli
MNVSKYVAIFSFVFIQLISVGKVFANADEWMTTFRENIAQTWQQPEHYDLYIPAITWHARFAYDKEKTDRYNERPWGGGFGLSRWDEKGNWHGLYAMAFKDSWNKWEPIAGYGWESTWRPLADENFHLGLGFTAGVTARDNWNYIPLPVLLPLASVGYGPVTFQMTYIPGTYNNGNVYFAWMRFQF

SEQ ID NO: 2490 - protein, 186 aa, Escherichia coli; identical to SEQ ID NO: 2486

SEQ ID NO: 2491 - protein, 186 aa, Escherichia coli
MNVSKYVAIFFFVFIQLISVGKVFANADEWMTTFRENIAQTWQQPEHYDLYIPAITWHARFAYDKEKTDRYNERPWGGGFGQSRWDEKGNWHGLYAMAFKDSWNKWEPIAGYGWESTRRPLADENFHLGLGFTAGVTARDNWNYIPLPVLLPLASVGYGPATFQMTYIPGTYNNGNVYFAWMRFQF

SEQ ID NO: 2492 - protein, 173 aa, Escherichia coli
MQLNKVLKGLMIALPVMAIAACSSNKNASNDGSEGMLGAGTGMDANGGNGNMSSEEQARLQMQQLQQNNIVYFDLDKYDIRSDFAQMLDAHANFLRSNPSYKVTVEGHADERGTPEYNISLGERRANAVKMYLQGKGVSADQISIVSYGKEKPAVLGHDEAAYSKNRRAVLVY

SEQ ID NO: 2493 - protein, 173 aa, Escherichia coli; identical to SEQ ID NO: 2492

SEQ ID NO: 2494 - protein, 185 aa, Escherichia coli
MIKSVIAGAVAMAVVSFGVNNAAPTIPQGQGKVTFNGTVVDAPCSISQKSADQSIDFGQLSKSFLEAGGVSKPMDLDIELVNCDITAFKGGNGAKKGTVKLAFTGPIVNGHSDELDTNGGTGTAIVVQGAGKNVVFDGSEGDANTLKDGENVLHYTAVVKKSSAVGAAVTEGAFSAVANFNLTYQ

SEQ ID NO: 2495 - protein, 836 aa, Escherichia coli
MKDRIPFAVNNITCVILLSLFCNAASAVEFNTDVLDAADKKNIDFTRFSEAGYVLPGQYLLDVIVNGQSISPASLQISFVEPALSGDKAEKKLPQACLTSDMVRLMGLTAESLDKVVYWHDGQCADFHGLPGVDIRPDTGAGVLRINMPQAWLEYSDATWLPPSRWDDGIPGLMLDYNLNGTVSRNYQGGDSHQFSYNGTVGGNLGPWRLRADYQGSQEQSRYNGEKTTNRNFTWSRFYLFRAIPRWRANLTLGENNINSDIFRSWSYTGASLESDDRMLPPRLRGYAPQITGIAETNARVVVSQQGRVLYDSMVPAGPFSIQDLDSSVRGRLDVEVIEQNGRKKTFQVDTASVPYLTRPGQVRYKLVSGRSRGYGHETEGPVFATGEASWGLSNQWSLYGGAVLAGDYNALAAGAGWDLGVPGTLSADITQSVARIEGERTFQGKSWRLSYSKRFDNADADITFAGYRFSERNYMTMEQYLNARYRNDYSSREKEMYTVTLNKNVADWNTSFNLQYSRQTYWDIRKTDYYTVSVNRYFNVFGLQGVAVGLSASRSKYLGRDNDSAYLRISVPLGTGTASYSGSMSNDRYVNMAGYTDTFNDGLDSYSLNAGLNSGGGLTSQRQINAYYSHRSPLANLSANIASLQKGYTSFGVSASGGATITGKGAALHAGGMSGGTRLLVDTDGVGGVPVDGGQVVTNRWGTGVVTDISSYYRNTTSVDLKRLPDDVEATRSVVESALTEGAIGYRKFSVLKGKRLFAILRLADGSQPPFGASVTSEKGRELGMVADEGLAWLSGVTPGETLSVNWDGKIQCQVNVPETAISDQQLLLPCTPQK

SEQ ID NO: 2496 - protein, 239 aa, Escherichia coli
MIRKKILMAAIPLFVISGADAAVSLDRTRAVFDGSEKSMTLDISNDNKQLPYLAQAWIENENQEKIITGPVIATPPVQRLEPGAKSMVRLSTTPDISKLPQDRESLFYFNLREIPPRSEKANVLQIALQTKIKLFYRPAAIKTRPNEVWQDQLILNKVSGGYRIENPTPYYVTVIGLGGSEKQAEEGEFETVMLSPRSEQTVKSANYNTPYLSYINDYGGRPVLSFICNGSRCSVKKEK

SEQ ID NO: 2497 - protein, 173 aa, Escherichia coli
MKKIRGLCLPVMLGAVLMSQHVHAVDNLTFRGKLIIPACTVSNTTVDWQDVEIQTLSQNGNHEKEFTVNMRCPYNLGTMKVTITATNTYNNAILVQNTSNTSSDGLLVYLYNSNAGNIGTAITLGTPFTPGKITGNNADKTISLHAKLGYKGNMQNLIAGPFSATATLVASYS

SEQ ID NO: 2498 - protein, 167 aa, Escherichia coli
MIRLSLFISLLLTSVAVLADVQINIRGNVYIPPCTINNGQNIVVDFGNINPEHVDNSRGEVTKTISISCPYKSGSLWIKVTGNTMGGGQNNVLATNITHFGIALYQGKGMSTPLILGNGSGNGYGVTAGLDTARSTFTFTSVPFRNGSGILNGGDFQTTASMSMIYN

SEQ ID NO: 2499 - protein, 335 aa, Escherichia coli
MKKWFPAFLFLSLSGGNDALAGWHNVMFYAFNDYLTTNAGNVKVIDQPQLYIPWNTGSATATYYSCSGPEFASGVYFQEYLAWMVVPKHVYTNEGFNIFLDVQSKYGWSMENENDKDFYFFVNGYEWDTWTNNGARICFYPGNMKQLNNKFNDLVFRVLLPVDLPKGHYNFPVRYIRGIQHHYYDLWQDHYKMPYDQIKQLPATNTLMLSFDNVGGCQPSTQVLNIDHGSIVIDRANGNIASQTLSIYCDVPVSVKISLLRNTPPIYNNNKFSVGLGNGWDSIISLDGVEQSEEILRWYTAGSKTVKIESRLYGEEGKRKPGELSGSMTMVLSFP

SEQ ID NO: 2500 - protein, 195 aa, Escherichia coli
MRLRFSVPLFFFGCVFVHGVFAGPFPPPGMSLPEYWGEEHVWWDGRAAFHGEVVRPACTLAMEDAWQIIDMGETPVRDLQNGFSGPERKFSLRLRNCEFNSQGGNLFSDSRIRVTFDGVRGETPDKFNLSGQAKGINLQIADVRGNIARAGKVMPAIPLTGNEEALDYTLRIVRNGKKLEAGNYFAVLGFRVDYE

SEQ ID NO: 2501 - protein, 193 aa, Escherichia coli
MVVNKTTAVLYLIALSLSGFIHTFLRAEERGIYDDVFTADALRHYRINERGGRTGSLTCSGALLSSPCTLVSNEVPLSLRPENHSAAAGAPLMLRLAGCGDGGALQPGKRGVAMTVSGSLVTGPGSGSALLPDRKLSGCDHLVIHDGDTFLLCRPDRRQEEMLAAWRKRATQEGEYSDARSNPAMLRLSIKYE

SEQ ID NO: 2502 - protein, 178 aa, Escherichia coli
MIKSTGALLLFAALSAGQAIASDVAFRGNLLDRPCHVSGDSLNKHVVFKTRASRDFWYPPGRSPTESFVIRLENCHATAVGKIVTLTFKGTEEAALPGHLKVTGVNAGRLGIALLDTDGSSLLKPGTSHNKGQGEKVTGNSLELPFGAYVVATPEALRTKSVVPGDYEATATFELTYR

SEQ ID NO: 2503 - protein, 178 aa, Escherichia coli; identical to SEQ ID NO: 2502

SEQ ID NO: 2504 - protein, 167 aa, Escherichia coli
MRSPKVKFLTIFTLSILITKMSFASSACFNEAGTMFRIEPNLIKAIALVESNLKKDSIGKNRDKKNNIKSFDYGLMQINQMHIPMLKKRGIIKDERDLLDNPCLNIKIGTEILYKHFSRCGMTWQCLGTYNAGFAMDNQKKRLQYAKKIYIVYTRLNELDNRKALAK

SEQ ID NO: 2505 - protein, 158 aa, Escherichia coli
MRSPKVKFLTIFTFCIFITKMSFASNSCSNEAGTMFRIEPNLIKAIALVESNLKKDSIGKNRDKNNNIKSLDYWLMQINQMHIPLLKKRGIIKDERDLLDNPCLNIKIGTEILYNHFSRCGVTWQCLGTYNAGFAMDNQKKRQQYAPKYILYIPGLMN

SEQ ID NO: 2506 - protein, 310 aa, Escherichia coli
MPKFRVSLFSLALMLAVPFAPQAVAKTAAATTASQPEIASGSAMIVDLNTNKVIYSNHPDLVRPIASISKLMTAMVVLDARLPLDEKLKVDISQTPEMKGVYSRVRLNSEISRKDMLLLALMSSENRAAASLAHHYPGGYKAFIKAMNAKAKSLGMNNTRFVEPTGLSVHNVSTARDLTKLLIASKQYPLIGQLSTTREDMATFSNPTYTLPFRNTNHLVYRDNWNIQLTKTGFTNAAGHCLVMRTVINNKPVALVVMDAFGKYTHFADASRLRTWIETGKVMPVPAAALSYKKQKAAQMAAAGQTAQND

SEQ ID NO: 2507 - protein, 605 aa, Escherichia coli
MLLKTSRRTFLKGLTLSGVAGSLGVWSFNARSSLSLPVAASLQGTQFDLTIGETAVNITGSERQAKTINGGLPGPVLRWKEGDTITLKVKNRLNEQTSIHWHGIILPANMDGVPGLSFMGIEPDDTYVYTFKVKQNGTYWYHSHSGLQEQEGVYGAIIIDAREPEPFAYDREHVVMLSDWTDENPHSLLKKLKKQSDYYNFNKPTVGSFFRDVNTRGLSATIADRKMWAEMKMNPTDLADVSGYTYTYLMNGQAPLKNWTGLFRPGEKIRLRFINGSAMTYFDIRIPGLKMTVVAADGQYVNPVTVDEFRIAVAETYDVIVEPQGEAYTIFAQSMDRTGYARGTLATREGLSAAVPPLDPRPLLTMEDMGMGGMGHDMAGMDHSQMGGMDNSGEMMSMDGADLPDSGTSSAPMDHSSMAGMDHSRMAGMPGMQSHPASETDNPLVDMQAMSVSPKLNDPGIGLRNNGRKVLTYADLKSRFEDPDGREPGRTIELHLTGHMEKFAWSFNGIKFSDAAPVLLKYGERLRITLINDTMMTHPIHLHGMWSDLEDENGNFMVRKHTIDVPPGTKRSYRVTADALGRWAYHCHLLYHMEMGMFREVRVEE

SEQ ID NO: 2508 - protein, 296 aa, Escherichia coli
MKRNLKAIPVLVAGLFTSQLSIAAGSVSADPHAGHDMSAMQMPADENFTEMTSMEPIVTESRTPIPPVTDADRKAAFGNLQGHAIHDSAINYLVLLDQLEWQRSDNTNNFSWSVNSWIGGDTDRIWLKSEGERSNGETEAAEAQLLWGHAVGPWWDLVAGVRQDFRPASARTWAAVGFQGLALYNFESEITGFVSNGGKAALRLGGEYDVLLTNRLILQPSYEVNFYSQDDESRGRGRGLTDTELGLRLRYEIRREFAPYIGVSWNQLYGKTSDMAKREGEKDHQVVFLAGARIWF

SEQ ID NO: 2509 - protein, 126 aa, Escherichia coli
MSILNKAILTGGLVMGVAFSAMAHPELKSSVPQADSAVAAPEKIQLNFSENLTVKFSGAKLTMTGMKGMSSHSPMPVAAKVAPGADPKSMVIIPREPLPAGTYRVDWRAVSSDTHPITGNYTFTVK

SEQ ID NO: 2510 - protein, 144 aa, Escherichia coli
MKKILVSFVAIMAVASSAMAAETMNMHDQVNNAQAPAHQMQSSAEKSAVQGDSMTMMDMSSHDQAAMSHDMMQNGNSAAHQDMAEMHKKMMKSKPAASNETAKSFSEMNEHEKSAVVHEKANNGQSSVIHQQQAEKHRSQITQN

SEQ ID NO: 2511 - protein, 1295 aa, Escherichia coli
MNKIYSIKYSAATGGLIAVSELAKKVICKTNRKISAALLSLAVISYTNIIYAANMDISKAWARDYLDLAQNKGVFQPGSTHVKIKLKDGTDFSFPALPVPDFSSATANGAATSIGGAYAVTVAHNAKNKSSANYQTYGSTQYTQINRMTTGNDFSIQRLNKYVVETRGADTSFNYNENNQNIIDRYGVDVGNGKKEIIGFRVGSGNTTFSGIKTSQTYQADLLSASLFHITNLRANTVGGNKVEYENDSYFTNLTTNGDSGSGVYVFDNKEDKWVLLGTTHGIIGNGKTQKTYVTPFDSKTTNELKQLFIQNVNIDNNTATIGGGKITIGNTTQDIEKNKNNQNKDLVFSGGGKISLKENLDLGYGGFIFDENKKYTVSAEGNNNVTFKGAGIDIGKGSTVDWNIKYASNDALHKIGEGSLNVIQAQNTNLKTGNGTVILGAQKTFNNIYVAGGPGTVQLNAENALGEGDYAGIFFTENGGKLDLNGHNQTFKKIAATDSGTTITNSNTTKESVLSVNNQNNYIYHGNVDGNVRLEHHLDTKQDNARLILDGDIQANSISIKNAPLVMQGHATDHAIFRTTKTNNCPEFLCGVDWVTRIKNAENSVNQKNKTTYKSNNQVSDLSQPDWETRKFRFDNLNIEDSSLSIARNADVEGNIQAKNSVINIGDKTAYIDLYSGKNITGAGFTFRQDIKSGDSIGESKFTGGIMATDGSISIGDKAIVTLNTVSSLDRTALTIHKGANVTASSSLFTTSNIKSGGDLTLTGATESTGEITPSMFYAAGGYELTEDGANFTAKNQASVTGDIKSEKAAKLSFGSADKDNSATRYSQFALAMLDGFDTSYQGSIKAAQSSLAMNNALWKVTGNSELKKLNSTGSMVLFNGGKNIFNTLTVDELTTSNSAFVMRTNTQQADQLIVKNKLEGANNLLLVDFIEKKGNDKNGLNIDLVKAPENTSKDVFKTETQTIGFSDVTPEIKQQEKDGKSVWTLTGYKTVANADAAKKATSLMSGGYKAFLAEVNNLNKRMGDLRDINGEAGAWARIMSGTGSAGGGFSDNYTHVQVGADNKHELDGLDLFTGVTMTYTDSHAGSDAFSGETKSVGAGLYASAMFESGAYIDLIGKYVHHDNEYTATFAGLGTRDYSSHSWYAGAEVGYRYHVTDSAWIEPQAELVYGAVSGKQFSWKDQGMNLTMKDKDFNPLIGRTGVDVGKSFSGKDWKVTARAGLGYQFDLFANGETVLRDASGEKRIKGEKDGRMLMNVGLNAEIRDNVRFGLEFEKSAFGKYNVDNAINANFRYSF

SEQ ID NO: 2512 - protein, 807 aa, Escherichia coli
MYSSSRKRCPKTKWALKLLTAAFLAASPAAKSAVNNAYDALIIEARKGNTQPALSWFALKSALSNNQIADWLQIALWAGQDKQVITVYNRYRHQQLPARGYAAVAVAYRNLQQWQNSLTLWQKALSLEPQNKDYQRGQILTLADAGHYDTALVKLKQLNSGAPDKANLLAEAYIYKLAGRHQDELRAMTESLPENASTQQYPTEYVQALRNNQLAAAIDDANLTPDIRADIHAELVRLSFMPTRSESERYAIADRALAQYAALEILWHDNPDRTAQYQRIQVDHLGALLTRDRYKDVISHYQRLKKTGQIIPPWGQYWVASAYLKDHQPKKAQSIMTELFYHKETIAPDLSDEELADLFYSHLESENYPGALTVTQHTINTSPPFLRLMGTPTSIPNDTWLQGHSFLSTVAKYSNDLPQAEMTARELAYNAPGNQGLRIDYASVLQARGWPRAAENELKKAEVIEPRNINLEVEQAWTALTLQEWQQAAVLTHDVVEREPQDPGVVRLKRAVDVHNLAELRIAGSTGIDAEGPDSGKHDVDLTTIVYSPPLKDNWRGFAGFGYADGQFSEGKGIVRDWLAGVEWRSRNIWLEAEYAERVFNHEHKPGARLSGWYDFNDNWRIGSQLERLSHRVPLRAMKNGVTGNSAQAYVRWYQNERRKYGVSWAFTDFSDSNQRHEVSLEGQERIWSSPYLIVDFLPSLYYEQNTEHDTPYYNPIKTFDIVPAFEASHLLWRSYENSWEQIFSAGVGASWQKHYGTDVVTQLGYGQRISWNDVIDAGATLRWEKRPYDGDREHNLYVEFDMTFRF

SEQ ID NO: 2513 - protein, 807 aa, Escherichia coli; identical to SEQ ID NO: 2512

SEQ ID NO: 2514 - protein, 672 aa, Escherichia coli
MLRNGNKYLLMLVSIIMLTACISQSRTSFIPPQDRKSLLAEQPWPHNGFVAISWHNVEDEAADQRFMSVRTSALREQFAWLRENGYQPVSIAQIREAHRGGKPLPEKAVVLTFDDGYQSFYTRVFPILQAFQWPAVWAPVGSWVDTPADKQVKFGDELVDREYFATWQQVREVARSRLVELASHTWNSHYGIQANATGSLLPVYVNRAYFTDHARYETAAEYRERIRLDAVKMTEYLRTKVEVNPHVFIWPYGEANGIAIEELKKLGYDMFFTLESGLANASQLDSIPRVLIANNPSLKEFAQQIITVQEKSPQRIMHIDLDYVYDENLQQMDRNIDVLIQRVKDMQISTVYLQAFADPDGDGLVKEVWFPNRLLPMKADIFSRVAWQLRTRSGVNIYAWMPVLSWDLDPTLTRVKYLPTGEKKAQIHPEQYHRLSPFDDRVRAQVGMLYEDLAGHAAFDGILFHDDALLSDYEDASAPAITAYQQAGFSGSLSEIRQNPEQFKQWARFKSRALTDFTLELSARVKAIRGPHIKTARNIFALPVIQPESEAWFAQNYADFLKSYDWTAIMAMPYLEGVAEKSADQWLIQLTNQIKNIPQAKDKSILELQAQNWQKNGQHQAISSQQLAHWMSLLQLNGVKNYGYYPDNFLHNQPEIDLIRPEFSTAWYPKND

SEQ ID NO: 2515 - protein, 672 aa, Escherichia coli
MLRNGNKYLLMLVSIIMLTACISQSRTSFIPPQDRESLLAEQPWPHNGFVAISWHNVEDEAADQRFMSVRTSALREQFAWLRENGYQPVSIAQIREAHRGGKPLPEKAVVLTFDDGYQSFYTRVFPILQAFQWPAVWAPVGSWVDTPADKQVKFGDELVDREYFATWQQVREVARSRLVELASHTWNSHYGIQANATGSLLPVYVNRAYFTDHARYETAAEYRERIRLDAVKMTEYLRTKVEVNPHVFVWPYGEANGIAIEELKKLGYDMFFTLESGLANASQLDSIPRVLIANNPSLKEFAQQIITVQEKSPQRIMHIDLDYVYDENLQQMDRNIDVLIQRVKDMQISTVYLQAFADPDGDGLVKEVWFPNRLLPMKADIFSRVAWQLRTRSGVNIYAWMPVLSWDLDPTLTRVKYLPTGEKKAQIHPEQYHRLSPFDDRVRAQVGMLYEDLAGHAAFDGILFHDDALLSDYEDASAPAITAYQQAGFSGSLSEIRQNPEQFKQWARFKSRALTDFTLELSARVKAIRGPHIKTARNIFALPVIQPESEAWFAQNYADFLKSYDWTAIMAMPYLEGVAEKSADQWLIQLTNQIKNIPQAKDKSILELQAQNWQKNGQHQAISSQQLAHWMSLLQLNGVKNYGYYPDNFLHNQPEIDLIRPEFSTAWYPKND

SEQ ID NO: 2516 - protein, 254 aa, Escherichia coli
MRSIARRTAVGAALLLVMPVAVWISGWRWQPGEQSWLLKAAFWVTETVTQPWGVITHLILFGWFLWCLRFRIKAAFVLFAILAAAILVGQGVKSWIKDKVQEPRPFVIWLEKTHHIPVDEFYTLKRAERGNLVKEQLAEEKNIPQYLRSHWQKETGFAFPSGHTMFAASWALLAVGLLWPRRRTLTIAILLVWATGVMGSRLLLGMHWPRDLVVATLISWALVAVATWLAQRICGPLTPPAEENREIAQREQES

SEQ ID NO: 2517 - protein, 254 aa, Escherichia coli; identical to SEQ ID NO: 2516

SEQ ID NO: 2518 - protein, 338 aa, Escherichia coli
MNAKIIASLAFTSMFSLSTLLSPAHAEEQEKALNFGIISTESQQNLKPQWTPFLQDMEKKLGVKVNAFFAPDYAGIIQGMRFNKVDIAWYGNLSAMEAVDRANGQVFAQTVAADGSPGYWSVLIVNKDSPINNLNDLLAKRKDLTFGNGDPNSTSGFLVPGYYVFAKNNISASDFKRTVNAGHETNALAVANKQVDVATNNTENLDKLKTSAPEKLKELKVIWKSPLIPGDPIVWRKNLSETTKDKIYDFFMNYGKTPEEKAVLERLGWAPFRASSDLQLVPIRQLALFKEMQGVKSNKGLNEQDKLAKTTEIQAQLDDLDRLNNALSAMSSVSKAVQ

SEQ ID NO: 2519 - protein, 351 aa, Escherichia coli
MKKSTLALVVMGIVASASVQAAEIYNKDGNKLDVYGKVKAMHYMSDNASKDGDQSYIRFGFKGETQINDQLTGYGRWEAEFAGNKAESDTAQQKTRLAFAGLKYKDLGSFDYGRNLGALYDVEAWTDMFPEFGGDSSAQTDNFMTKRASGLATYRNTDFFGVIDGLNLTLQYQGKNENRDVKKQNGDGFGTSLTYDFGGSDFAISGAYTNSDRTNEQNLQSRGTGKRAEAWATGLKYDANNIYLATFYSETRKMTPITGGFANKTQNFEAVAQYQFDFGLRPSLGYVLSKGKDIEGIGDEDLVNYIDVGATYYFNKNMSAFVDYKINQLDSDNKLNINNDDIVAVGMTYQF

SEQ ID NO: 2520 - protein, 1372 aa, Escherichia coli
MNKVYSLKYCPVTGGLIAVSELARRVIKKTCRRLTHILLAGIPAICLCYSQISQAGIVRSDIAYQIYRDFAENKGLFVPGANDIPVYDKDGKLVGRLGKAPMADFSSVSSNGVATLVSPQYIVSVKHNGGYRSVSFGNGKNTYSLVDRNNHPSIDFHAPRLNKLVTEVIPSAVTSEGTKANAYKYTERYTAFYRVGSGTQYTKDKDGNLVKVAGGYAFKTGGTTGVPLISDATIVSNPGQTYNPVNGPLPDYGAPGDSGSPLFAYDKQQKKWVIVAVLRAYAGINGATNWWNVIPTDYLNQVMQDDFDAPVDFVSGLGPLNWTYDKTSGTGTLSQGSKNWTMHGQKDNDLNAGKNLVFSGQNGAIILKDSVTQGAGYLEFKDSYTVSAESGKTWTGAGIITDKGTNVTWKVNGVAGDNLHKLGEGTLTINGTGVNPGGLKTGDGIVVLNQQADTAGNIQAFSSVNLASGRPTVVLGDARQVNPDNISWGYRGGKLDLNGNAVTFTRLQAADYGAVITNNAQQKSQLLLDLKAQDTNVSEPTIGNISPFGGTGTPGNLYSMILNSQTRFYILKSASYGNTLWGNSLNDPAQWEFVGMDKNKAVQTVKDRILAGRAKQPVIFHGQLTGNMDVAIPQVPGGRKVIFDGSVNLPEGTLSQDSGTLIFQGHPVIHASISGSAPVSLNQKDWENRQFTMKTLSLKDADFHLSRNASLNSDIKSDNSHITLGSDRAFVDKNDGTGNYVIPEEGTSVPDTVNDRSQYEGNITLNHNSALDIGSRFTGGIDAYDSAVSITSPDVLLTAPGAFAGSSLTVHDGGHLTALNGLFSDGHIQAGKNGKITLSGTPVKDTANQYAPAVYLTDGYDLTGDNAALEITRGAHASGDIHASAASTVTIGSDTPAELASAETAASAFAGSLLEGYNAAFNGAITGGRADVSMHNALWTLGGDSAIHSLTVRNSRISSEGDRTFRTLTVNKLDATGSDFVLRTDLKNADKINVTEKATGSDNSLNVSFMNNPAQGQALNIPLVTAPAGTSAEMFKAGTRVTGFSRVTPTLHVDTSGGNTKWILDGFKAEADKAAAAKADSFMNAGYKNFMTEVNNLNKRMGDLRDTNGDAGAWARIMSGAGSADGGYSDNYTHVQVGFDKKHELDGVDLFTGVTMTYTDSSADSHAFSGKTKSVGGGLYASALFESGAYIDLIGKYIHHDNDYTGNFASLGTKHYNTHSWYAGAETGYRYHLTEDTFIEPQAELVYGAVSGKTFRWKDGDMDLSMKNRDFSPLVGRTGVELGKTFSGKDWSVTARAGTSWQFDLLNNGETVLRDASGEKRIKGEKDSRMLFNVGMNAQIKDNMRFGLEFEKSAFGKYNVDNAVNANFRYMF

SEQ ID NO: 2521 - protein, 1371 aa, Escherichia coli
MNKVYSLKYCPVTGGLIVVSELASRVIKKTCRRLTHILLAGIPAVYLYYPQISQAGIVRSDIAYQIYRDFAENKGLFVPGATDIPVYDKDGKLVGRLDKAPMADFSSVSSNGVATLVSPQYIVSVKHNGGYQSVSFGNGKNTYSLVDRNNHSSVDFHAPRLNKLVTEVIPSAITSEGTKANAYKDTERYTAFYRVGSGTQYTKDKDGNLVKVAGGYAFKTGGTTGVPLISDATIVSNPGQTYNPVNGPLPDYGAPGDSGSPLFAYDEQQKKWVIVAVLRAYAGINGATNWWNVIPTDYLNQVMQDDFDAPVDFVSGLPPLNWTYDKTSGTGTLSQGSKNWTMHGQKDNDLNAGKNLVFSGQNGAIVLKDSVTQGAGYLEFKDSYTVSAESGKTWTGAGIITDKGTNVTWKVNGVAGDNLHKLGEGTLTINGTGVNPGGLKTGDGTVVLNQQADTAGNVQAFSSVNLASGRPTVVLGDARQVNPDNISWGYRGGKLDLNGNAVTFTRLQAADYGAVITNNAQQKSRLLLDLKAQDTNVSVPIGSISPFGGTGTPGNLYSMILNGQTRFYILKSASYGNTLWGNSLNDPAQWEFVGTDKNKAVQTVKDRILAGRAKQPVIFHGQLTGNMDVTIPQLPGGRKVILDGSVNLPEGTLSEDSGTLIFQGHPVIHASVSGSAPVSLNQKDWENRQFIMKTLSLKDADFHLSRNASLNSDIKSDNSHITLGSDRVFVDKNDGTGNYVILEEGTSVPDTVNDRSQYEGNITLDHNSTLDIGSRFTGGIEAYDSAVSITSPDVLLTAPGAFAGSSLTVHDGGHLTALNGLFSDGHIQAGKNSKITLSGTPVKDTANQYAPAVYLTDGYDLTGDNATLEITRGAHASGDIHASAASTVTIGSDTPAELASAETTASAFAGSLLEGYNAAFNGAITGGRADVSMHNALWTLGGDSAIHTLTVRNSRISSEGDRTFRTLTVNKLDATGSDFVLRTDLKNADKINVTEKATGSDNSLNVSFMKDPAQGQSLNIPLVTAPAGTSAEMFKAGTRMIGFSRVTPTLHVDTSGGNTKWILDGFKAEADKAAAAKADSFMNAGYKNFMTEVNNLNKRMGDLRDTNGDAGAWARIMSGAGSADGGYSDNYTHVQVGFDKKHELDGVDLFTGVTMTYTDSSADSHAFSGKTKSVGGGLYASALFESGAYIDLIGKYIHHDNDYTGNFAGLGTKHYNTHSWYAGAETGYRYHLTEETFIEPQAELVYGAVSGKTFRWKDGDMDLSMKNRDFSPLIGRTGIELGKTFSGKDWSVTARAGTSWQFDLLNNGETVLRDASGEKRIKGEKDSRMLFNVGMNAQIKDNMRFGLEFEKSAFGKYNVDNAVNANFRYMF

SEQ ID NO: 2522 - protein, 121 aa, Escherichia coli
MNAVLSVQGASAPVKKKSFFSKFTRLNMLRLARAVIPAAVLMMFFPQLAMAAGSSGQDLMASGNTTVKATFGKDSSVVKWVVLAEVLVGAVMYMMTKNVKFLAGFAIISVFIAVGMAVVGL

SEQ ID NO: 2523 - protein, 121 aa, Escherichia coli
MDAVLSVQGVSAPVKKKSFFSKFTRLNMLRLARAVIPAAVLMMFFPQLAMAAGSSGQDLMASGNTTVKATFGKDSSVVKWVVLAEVLVGAVMYMMTKNVKFLAGFAIISVFIAVGMAVVGL

SEQ ID NO: 2524 - protein, 21 aa, Escherichia coli
MDAVLSVQGASAPVKKKSFFS

SEQ ID NO: 2525 - protein, 120 aa, Escherichia coli
MNTVLSVQGASAPVKKKSFFSKFTRLNMLRLARAVIPAAVLMMFFPQLAMAAQGQDLMASGNTTVKATFGKDSSVVKWVVLAEVLVGAVMYMMTKNVKFLAGFAIISVFIAVGMAVVGLK

SEQ ID NO: 2526 - protein, 119 aa, Escherichia coli
MNTVLSVQGASAPVEKKSFFSKFTRLNMLRLVRAVIPVAVLMMLFPELAMAAGKGDLMAKGNDTVKATFGKDSSIVKWVVLAEVLVGAVMYMMTKNVKFLVGFAIISVFIAVGMSVVGL

SEQ ID NO: 2527 - protein, 119 aa, Escherichia coli
MNAVLSVQGASAPVKKKSFFSKFTRLNMLRLARAVIPAAVLMMFFPQLAMAAQGQDLMASGNTTVKATFGKDSSVVKWVVLAEVLVGAVMYMMTKNVKFLAGFAIISVFIAVGMAVVGL

SEQ ID NO: 2528 - protein, 119 aa, Escherichia coli
MNAVLSVQGASAPVKKKSFFSKFTRLNMLRLARAVIPAAVLMMFFPQLAMAAQGQDLMASGNTTVKATFGKDSSVVKWVVLAEVLVGAVMYMMTKNVKFLAGFAIISVFIAVVMAVVGL

SEQ ID NO: 2529 - protein, 133 aa, Escherichia coli
MKIKSIRKAVLLLALLTSTSFAAGKNVNVEFRKGHSSAQYSGEIKGYDYDTYTFYAKKGQKVHVSISNEGADTYLFGPGIDDSVDLSRYSPELDSHGQYSLPASGKYELRVLQTRNDARKNKTKKYNVDIQIK

SEQ ID NO: 2530 - protein, 348 aa, Escherichia coli
MKKWSRHLLAAGALALGMSAAHADDNNTLYFYNWTEYVPPGLLEQFTKETGIKVIYSTYESNETMYAKLKTYKDGAYDLVVPSTYYVDKMRKEGMIQKIDKSKLTNFSNLDPDMLNKPFDPNNDYSIPYIWGATAIGVNGDAVDPKSVTSWADLWKPEYKGSLLLTDDAREVFQMALRKLGYSGNTTDPKEIEAAYNELKKLMPNVAAFNSDNPANPYMEGEVNLGMIWNGSAFVARQAGTPIDVVWPKEGGIFWMDSLAIPANAKNKEGALKLINFLLRPDVAKQVAETIGYPTPNLAARKLLSPEVANDKTLYPDAETIKNGEWQNDVGAASSIYEEYYQKLKAGR

SEQ ID NO: 2531 - protein, 370 aa, Escherichia coli
MTALNKKWLSGLVAGALMAVSVGTLAAEQKTLHIYNWSDYIAPDTVANFEKETGIKVVYDVFDSNEVLEGKLMAGSTGFDLVVPSASFLERQLTAGVFQPLDKSKLPEWKNLDPELLKLVAKHDPDNKFAMPYMWATTGIGYNVDKVKAVLGENAPVDSWDLILKPENLEKLKSCGVSFLDAPEEVFATVLNYLGKDPNSTKADDYTGPATDLLLKLRPNIRYFHSSQYINDLANGDICVAIGWAGDVWQASNRAKEAKNGVNVSFSIPKEGAMAFFDVFAMPADAKNKDEAYQFLNYLLRPDVVAHISDHVFYANANKAATPLVSAEVRENPGIYPPADVRAKLFTLKVQDPKIDRVRTRAWTKVKSGK

SEQ ID NO: 2532 - protein, 432 aa, Escherichia coli
MKAILIPFLSLLIPLTPQSAFAQSEPELKLESVVIVSRHGVRAPTKATQLMQDVTPDAWPTWPVKLGWLTPRGGELIAYLGHYQRQRLVADGLLAKKGCPQSGQVAIIADVDERTRKTGEAFAAGLAPDCAITVHTQADTSSPDPLFNPLKTGVCQLDNANVTDAILSRAGGSIADFTGHRQTAFRELERVLNFPQSNLCLKREKQDESCSLTQALPSELKVSADNVSLTGAVSLASMLTEIFLLQQAQGMPEPGWGRITDSHQWNTLLSLHNAQFYLLQRTPEVARSRATPLLDLIKTALTPHPPQKQAYGVTLPTSVLFIAGHDTNLANLGGALELNWTLPGQPDNTPPGGELVFERWRRLSDNSQWIQVSLVFQTLQQMRDKTPLSLNTPPGEVKLTLAGCEERNAQGMCSLAGFTQIVNEARIPACSL

SEQ ID NO: 2533 - protein, 471 aa, Escherichia coli
MKQSTIALALLPLLFTPVTKARTPEMPVLENRAAQGDITAPGGARRLTGDQTAALRDSLSDKPAKNIILLIGDGMGDSEITAARNYAEGAGGFFKGIDALPLTGQYTHYALNKKTGKPDYVTDSAASATAWSTGVKTYNGALGVDIHEKDHPTILEMAKAAGLATGNVSTAELQDATPAALVAHVTSRKCYGPSATSEKCPGNALEKGGKGSITEQLLNARADVTLGGGAKTFAETATAGEWQGKTLREQAQARGYQLVSDAASLNSVTEANQQKPLLGLFADGNMPVRWLGPKATYHGNIDKPAVTCTPNPQRNDSVPTLAQMTDKAIELLSKNEKGFFLQVEGASIDKQDHAANPCGQIGETVDLDEAVQRALEFAKKEGNTLVIVTADHAHASQIVAPDTKAPGLTQALNTKDGAVMVMSYGNSEEDSQEHTGSQLRIAAYGPHAANVVGLTDQTDLFYTMKAALGLK

SEQ ID NO: 2534 - protein, 190 aa, Escherichia coli
MFKSTLAAMAAVFALSALSPAAMAAKGDPHVLLTTSAGNIELELDKQKAPVSVQNFVDYVNSGFYNNTTFHRVIPGFMIQGGGFTEQMQQKKPNPPIKNEADNGLRNTRGTIAMARTADKDSATSQFFINVADNAFLDHGQRDFGYAVFGKVVKGMDVADKISQVPTHDVGPYQNVPSKPVVILSAKVLP

SEQ ID NO: 2535 - protein, 190 aa, Escherichia coli; identical to SEQ ID NO: 2534

SEQ ID NO: 2536 - protein, 190 aa, Escherichia coli; identical to SEQ ID NO: 2534

SEQ ID NO: 2537 - protein, 330 aa, Escherichia coli
MRHSVLFATAFATLISTQTFAADLPGKGITVNPVQSTITEETFQTLLVSRALEKLGYTVNKPSEVDYNVGYTSLASGDATFTAVNWTPLHDNMYEAAGGDKKFYREGVFVNGAAQGYLIDKKTADQYKITNIAQLKDPKIAKLFDTNGDGKADLTGCNPGWGCEGAINHQLAAYELTNTVTHNQGNYAAMMADTISRYKEGKPVFYYTWTPYWVSNELKPGKDVVWLQVPFSALPGDKNADTKLPNGANYGFPVSTMHIVANKAWAEKNPAAAKLFAIMQLPVADINAQNAIMHDGKASEGDIQGHVDGWIKAHQQQFDGWVNEALAAQK

SEQ ID NO: 2538 - protein, 330 aa, Escherichia coli; identical to SEQ ID NO: 2537

SEQ ID NO: 2539 - protein, 161 aa, Escherichia coli
GANAAPQGQGKVTFNGTVVDAPCGIDAQSADQSIEFGQVSKVLLNNGGSSTPKNFDIKLTDCDVTNYKKAGKAGTVSLTFSGVQAGTDMLQTVGTTGTAILVKDPHGKAVKFDGATATGVSSLVDGDNTIHFTALVKKDTSGNDVAEGAFSAVANFNLIYQ

SEQ ID NO: 2540 - protein, 115 aa, Escherichia coli
LQIALQTKIKLFYRPAAIKTRPNEVWQDQLILNKVSGGYRIENPTPYYVTVIGLGGSEKQAEEGEFETVMLSPRSEQTVNRNYNTPYLSYINDYGGRPVLSFICNGSRCSVKKEK

SEQ ID NO: 2541 - protein, 173 aa, Escherichia coli
MKKIRGLCLPVMLGAVLMSQHVHAADNLTFKGKLIIPACTVQNAEVNWGDIEIQNLVQSGGNQKDFTVDMNCPYSLGTMKVTITSNGQTGNSILVPNTSTASGDGLLIYLYNSNNSGIGNAVTLGSQVTPGKITGTAPARKITLYAKLGYKGNMQSLQAGTFSATATLVASYS

SEQ ID NO: 2542 - protein, 167 aa, Escherichia coli
MIRLSLFISLLLTSVAVLADVQINIRGNVYIPPCTINNGQNIVVDFGNINPEHVDNSRGEVTKNISISCPYKSGSLWIKVTGNTMGVGQNNVLATNITHFGIALYQGKGMSTPLTLGNGSGNGYRVTAGLDTARSTFTFTSVPFRNGSGILNGGDFRTTASMSMIYN

SEQ ID NO: 2543 - protein, 335 aa, Escherichia coli
MKKWLPAFLFLSLSGCNDALAANQSTMFYSFNDNIYRPQLSVKVTDIVQFIVDINSASSTATLSYVACNGFTWTHGLYWSEYFAWLVVPKHVSYNGYNIYLELQSRGSFSLDAEDNDNYYLTKGFAWDEANTSGQTCFNIGEKRSLAWSFGGVTLNARLPVDLPKGDYTFPVKFLRGIQRNNYDYIGGRYKIPSSLMKTFPFNGTLNFSIKNTGGCRPSAQSLEINHGDLSINSANNHYAAQTLSVSCDVPTNIRFFLLSNTNPAYSHGQQFSVGLGHGWDSIISINGVDTGETTMRWYRAGTQNLTTGSRLYGESSKIQPGVLSGSATLLMILP

SEQ ID NO: 2544 - protein, 195 aa, Escherichia coli
MRLRFSVPLFFFGCVFVHGVFAGPFPPPGMSLPEYWGEEHVWWDGRATFHGEVVRPACTLAMEDAWQIIDMGETPVRDLQNGFSGPERKFSLRLRNCEFNSQGGNLFSDSRIRVTFDGVRGETPDKFNLSGQAKGINLQIADARGNIARAGKVMPAIPLTGNEEALDYTLRIVRNGKKLEAGNYFAVLGFRVDYE

SEQ ID NO: 2545 - protein, 193 aa, Escherichia coli
MVVNKTTAVLYLIALSLSGFIHTFLRAEERGIYDDVFTADELHHYRINERGGRTGSLAVSGALLSSPCTLVSNEVPLSLRPENHSASRGAPLMLRLAGCGDGGALQPGKRGVAMTVSGSLVTGPGSGSALLPDRKLSGCDHLVIHDGDTFLLCRPDRRQEEMLAAWRKRATQEGEYSDARSNPAMLRLSIKYE

SEQ ID NO: 2546 - protein, 104 aa, Escherichia coli
MFKKGLLALALVFSLPVFAAEHWIDVRVPEQYQQEHVQGAINIPLKEVKERIATAVPDKNDTVKVYCNAGRQSGQAKEILSEMGYTHVENAGGLKDIAMPKVKG

SEQ ID NO: 2547 - protein, 346 aa, Escherichia coli
MKVMRTTVATVVAATLSMSAFSVFAEASLTGAGATFPAPVYAKWADTYQKETGNKVNYQGIGSSGGVKQIIANTVDFGASDAPLSDEKLAQEGLFQFPTVIGGVVLAVNIPGLKSGELVLDGKTLGDIYLGKIKKWDDEAIAKLNPGLKLPSQNIAVVRRADGSGTSFVFTSYLAKVNEEWKNNVGTGSTVKWPIGLGGKGNDGIAAFVQRLPGAIGYVEYAYAKQNNLAYTKLISADGKPVSPTEENFANAAKGADWSKTFAQDLTNQKGEDAWPITSTTFILIHKDQKKPEQGTEVLKFFDWAYKTGAKQANDLDYASLPDSVVEQVRAAWKTNIKDSSGKPLY

SEQ ID NO: 2548 - protein, 962 aa, Escherichia coli
MPRSTWFKALLLLVALWAPLSQAETGWQPIQETIRKSDKDNRQYQAIRLDNGMVVLLVSDPQAVKSLSALVVPVGSLEDPEAYQGLAHYLEHMSLMGSKKYPQADSLAEYLKMHGGSHNASTAPYRTAFYLEVENDALPGAVDRLADAIAEPLLDKKYAERERNAVNAELTMARTRDGMRMAQVSAETINPAHPGSKFSGGNLETLSDKPGNPVQQALKDFHEKYYSANLMKAVIYSNKPLPELAKMAADTFGRVPNKESKKPEITVPVVTDAQKGIIIHYVPALPRKVLRVEFRIDNNSAKFRSKTDELITYLIGNRSPGTLSDWLQKQGLVEGISANSDPIVNGNSGVLAISASLTDKGLANRDQVVAAIFSYLNLLREKGIDKQYFDELANVLDIDFRYPSITRDMDYVEWLADTMIRVPVEHTLDAVNIADRYDAKAVKERLAMMTPQNARIWYISPKEPHNKTAYFVDAPYQVDKISEQTFADWQQKAANIALSLPELNPYIPDDFSLIKSEKKYDHPELIVDESNLRVVYAPSRYFSSEPKADVSLILRNPKAMDSARNQVMFALNDYLAGLALDQLSNQASVGGISFSTNANNGLMVNANGYTQRLPQLFQALLEGYFSYTATEDQLEQAKSWYNQMMDSAEKGKAFEQAIMPAQMLSQVPYFSRDERRKILPSITLKEVLAYRDALKSGARPEFMVIGNMTEAQATTLARDVQKQLGADGSEWCRNKDVVVDKKQSVIFEKAGNSTDSALAAVFVPTGYDEYTSSAYSSLLGQIVQPWFYNQLRTEEQLGYAVFAFPMSVGRQWGMGFLLQSNDKQPSFLWERYKAFFPTAEAKLRAMKPDEFAQIQQAVITQMLQAPQTLGEEALKLSKDFDRGNMRFDSRDKIVAQIKLLTPQKLADFFHQAVVEPQGMAILSQISGSQNGKAEYVHPEGWKVWENVSALQQTMPLMSEKNE

SEQ ID NO: 2549 - protein, 962 aa, Escherichia coli
MPRSIWFKALLLFVALWAPLSQAETGWQPIQETIRKSDKDNRQYQAIRLDNGMVVLLVSDPQAVKSLSALVVPVGSLEDPEAYQGLAHYLEHMSLMGSKKYPQADSLAEYLKMHGGSHNASTAPYRTAFYLEVENDALPGAVDRLADAIAEPLLDKKYAERERNAVNAELTMARTRDGMRMAQVSAETINPAHPGSKFSGGNLETLSDKPGNPVQQALKDFHEKYYSANLMKAVIYSNKPLPELAKMAADTFGRVPNKESKKPEITVPVVTDAQKGIIIHYVPALPRKVLRVEFRIDNNSAKFRSKTDELITYLIGNRSPGTLSDWLQKQGLVEGISANSDPIVNGNSGVLAISASLTDKGLANRDQVVAAIFSYLNLLREKGIDKQYFDELANVLDIDFRYPSITRDMDYVEWLADTMIRVPVEHTLDAVNIADRYDAKAVKERLAMMTPQNARIWYISPKEPHNKTAYFVDAPYQVDKISEQTFADWQKKAANIALSLPELNPYIPDDFSLIKSEKKYDHPELIVDESNLRVVYAPSRYFASEPKADVSLILRNPKAMDSARNQVMFALNDYLAGLALDQLSNQASVGGISFSTNANNGLMVNANGYTQRLPQLFQALLEGYFSYTATEDQLEQAKSWYNQMMDSAEKGKAFEQAIMPAQMLSQVPYFSRDERRKILPSITLKEVLAYRDALKSGARPEFMVIGNMTEAQATTLARHVQKQLGADGSEWCRNKDVVVDKKQSVIFEKAGNSTDSALAAIFVPTGYDEYTSSAYSSLLGQIVQPWFYNQLRTEEQLGYAVFAFPMSVGRQWGMGFLLQSNDKQPSFLWERYKAFFPTAEAKLRTMKPEEFAQIQQAVITQMLQAPQTLGEEASKLSKDFDRGNMRFDSRDKIVAQIKLLTPQKLADFFHQAVVEPQGMAILSQISGSQNGKAEYVHPEGWKVWENVSALQQTMPLMSEKNE

SEQ ID NO: 2550 - protein, 962 aa, Escherichia coli
MPRSTWFKALLLLVALWAPLSQAETGWQPIQETIRKSDKDNRQYQAIRLDNGMVVLLVSDPQAVKSLSALVVPVGSLEDPEAYQGLAHYLEHMSLMGSKKYPQADSLAEYLKMHGGSHNASTAPYRTAFYLEVENDALPGAVDRLADAIAEPLLDKKYAERERNAVNAELTMARTRDGMRMAQVSAETINPAHPGSKFSGGNLETLSDKPGNPVQQALKDFHEKYYSANLMKAVIYSNKPLPELAKMAADTFGRVPNKESKKPEITVPVVTDAQKGIIIHYVPALPRKVLRVEFRIDNNSAKFRSKTDELITYLIGNRSPGTLSDWLQKQGLVEGISANSDPIVNGNSGVLAISASLTDKGLANRDQVVAAIFSYLNLLREKGIDKQYFDELANVLDIDFRYPSITRDMDYVEWLADTMIRVPVEHTLDAVNIADRYDAKAVKERLAMMTPQNARIWYISPKEPHNKTAYFVDAPYQVDKISAQTFADWQKKAADIALSLPELNPYIPDDFSLIKSEKKYDHPELIVDESNLRVVYAPSRYFASEPKADVSLILRNPKAMDSARNQVMFALNDYLAGLALDQLSNQASVGGISFSTNANNGLMVNANGYTQRLPQLFQALLEGYFSYTATEDQLEQAKSWYNQMMDSAEKGKAFEQAIMPAQMLSQVPYFSRDERRKILPSITLKEVLAYRDALKSGARPEFMVIGNMTEAQATTLARDVQKQLGADGSEWCRNKDVVVDKKQSVIFEKAGNSTDSALAAVFVPTGYDEYTSSAYSSLLGQIVQPWFYNQLRTEEQLGYAVFAFPMSVGRQWGMGFLLQSNDKQPSFLWERYKAFFPTAEAKLRAMKPDEFAQIQQAVITQMLQAPQTLGEEASKLSKDFDRGNMRFDSRDKIVAQIKLLTPQKLADFFHQAVVEPQGMAILSQISGSQNGKAEYVHPEGWKVWENVSALQQTMPLMSEKNE

SEQ ID NO: 2551 - protein, 237 aa, Escherichia coli
MRHIFQRLLPRRLWLAGLPCLALLGCVQNHNKPAIDTPAEEKIPVYQLADYLSTECSDIWALQGKSTETNPLYWLRAMDCADRLMPAQSRQQARQYDDGSWQNTFKQGILLADAKITPYERRQLVARIEALSTEIPAQVRPLYQLWRDGQALQLQLAEERQRYSKLQQSSDSELDTLRQQHHVLQQQLELTTRKLENLTDIERQLSTRKPAGNFSPDTPHESEKPAPSTHEVTPDEP

SEQ ID NO: 2552 - protein, 296 aa, Escherichia coli
MNMKKLATLVSAVALSATVSANAMAKDTIALVVSTLNNPFFVSLKDGAQKEADKLGYNLVVLDSQNNPAKELANVQDLTVRGTKILLINPTDSDAVGNAVKMANQANIPVITLDRQATKGEVVSHIASDNVLGGKIAGDYIAKKAGEGAKVIELQGIAGTSAARERGEGFQQAVAAHKFNVLASQPADFDRIKGLNVMQNLLTAHPDVQAVFAQNDEMALGALRALQTAGKSDVMVVGFDGTPDGEKAVNDGKLAATIAQLPDQIGAKGVETADKVLKGEKVQAKYPVDLKLVVKQ

SEQ ID NO: 2553 - protein, 112 aa, Escherichia coli
MTIKNKMLLGALLLVTSAAWAAPATAGSTNTSGISKYELSSFIADFKHFKPGDTVPEMYRTDEYNIKQWQLRNLPAPDAGTHWTYMGGAYVLISDTDGKIIKAYDGEIFYHR

SEQ ID NO: 2554 - protein, 112 aa, Escherichia coli; identical to SEQ ID NO: 2553

SEQ ID NO: 2555 - protein, 134 aa, Escherichia coli
MRALPICLVALMLSGCSMLSRSPVEPVQSTAPQPKAEPAKPKAPRATPVRIYTNAEELVGKPFRDLGEVSGDSCQASNQDSPPSIPTARKRMQINASKMKANAVLLHSCEVTSGTPGCYRQAVCIGSALNITAK

SEQ ID NO: 2556 - protein, 134 aa, Escherichia coli; identical to SEQ ID NO: 2555

SEQ ID NO: 2557 - protein, 268 aa, Escherichia coli
MKAFWRNAALLAVSLLPFSSANALALQAKQYGDFDRYVLALSWQTGFCQSQHDRNRNERDECRLQTETTNKADFLTVHGLWPGLPKSVAARGVDERRWMRFGCATRPIPNLPEARASRMCSSPETGLSLETAAKLSEVMPGAGGRSCLERYEYAKHGACFGFDPDAYFGTMVRLNQEIKESEAGKFLADNYGKTVSRRDFDAAFAKSWGKENVKAVKLTCQGNPAYLTEIQISIKADAINAPLSANSFLPQPHPGNCGKTFVIDKAGY

SEQ ID NO: 2558 - protein, 318 aa, Escherichia coli
MKQLWFAMSLVTGSLLFSANASATPASGALLQQMNLASQSLNYELSFISINKQGVESLRYRHARLDNRPLAQLLQMDGPRREVVQRGNEISYFEPGLEPFTLNGDYIVDSLPSLIYTDFKRLSPYYDFISVGRTRIADRLCEVIRVVARDGTRYSYIVWMDTESKLPMRVDLLDRDGETLEQFRVIAFNVNQDISSSMQTLAKANLPPLLSVPVGEKAKFSWTPTWLPQGFSEVSSSRRPLPTMDNMPIESRLYSDGLFSFSVNVNRATPSSTDQMLRTGRRTVSTSVRDNAEITIVGELPPQTAKRIAENIKFGAAQ

SEQ ID NO: 2559 - protein, 318 aa, Escherichia coli; identical to SEQ ID NO: 2558

SEQ ID NO: 2560 - protein, 60 aa, Escherichia coli
MRKLKMMLCVMMLPLVVVGCTSKQSVSQCVKPPRPPAWIMQPPPDWQTPLNGIISPSERG

SEQ ID NO: 2561 - protein, 61 aa, Escherichia coli
MRKLKMMLCVMMLPLVVVGCTSKQSVSQCVKPPPPPAWIMQPPPDWQTPLNGIISPSGNDW

SEQ ID NO: 2562 - protein, 547 aa, Escherichia coli
MRQVLSSLLVIAGLVSGQAIAAPESPPHADIRDSGFVYCVSGQVNTFNPSKASSGLIVDTLAAQFYDRLLDVDPYTYRLMPELAESWEVLDNGATYRFHLRRDVPFQKTDWFTPTRKMNADDVVFTFQRIFDRNNPWHNVNGSNFPYFDSLQFADNVKSVRKLDNHTVEFRLAQPDASFLWHLATHYASVMSAEYARKLEKEDRQEQLDRQPVGTGPYQLSEYRAGQFIRLQRHDDFWRGKPLMPQVVVDLGSGGTGRLSKLLTGECDVLAWPAASQLSILRDDPRLRLTLRPGMNVAYLAFNTAKPPLNNPAVRHALALAINNQRLMQSIYYGTAETAASILPRASWAYDNEAKITEYNPAKSREQLKSLGLENLTLKLWVPTRSQAWNPSPLKTAELIQADMAQVGVKVVIVPVEGRFQEARLMDMSHDLTLSGWATDSNDPDSFFRPLLSCAAIHSQTNLAHWCDPKFDSVLRKALSSQQLAARIEAYDEAQSILAQELPILPLASSLRLQAYRYDIKGLVLSPFGNASFAGVYREKQDEVKKP

SEQ ID NO: 2563 - protein, 1295 aa, Escherichia coli
MNKIYSLKYSAATGGLIAVSELAKRVSGKTNRKLVATMLSLAVAGTVNAANIDISNVWARDYLDLAQNKGIFQPGATDVTITLKNGDKFSFHNLSIPDFSGAAASGAATAIGGSYSVTVAHNKKNPQAAETQVYAQSSYRVVDRRNSNDFEIQRLNKFVVETVGATPAETNPTTYSDALERYGIVTSDGSKKIIGFRAGSGGTSFINGESKISTNSAYSHDLLSASLFEVTQWDSYGMMIYKNDKTFRNLEIFGDSGSGAYLYDNKLEKWVLVGTTHGIASVNGDQLTWITKYNDKLVSELKDTYSHKINLNGNNVTIKNTDITLHQNNADTTGTQEKITKDKDIVFTNGGDVLFKDNLDFGSGGIIFDEGHEYNINGQGFTFKGAGIDIGKESIVNWNALYSSDDVLHKIGPGTLNVQKKQGANIKIGEGNVILNEEGTFNNIYLASGNGKVILNKDNSLGNDQYAGIFFTKRGGTLDLNGHNQTFTRIAATDDGTTITNSDTTKEAVLAINNEDSYIYHGNINGNIKLTHNINSQDKKTNAKLILDGSVNTKNDVEVSNASLTMQGHATEHAIFRSSANHCSLVFLCGTDWVTVLKETESSYNKKFNSDYKSNNQQTSFDQPDWKTGVFKFDTLHLNNADFSISRNANVEGNISANKSAITIGDKNVYIDNLAGKNITNNGFDFKQTISTNLSIGETKFTGGITAHNSQIAIGDQAVVTLNGATFLDNTPISIDKGAKVIAQNSMFTTKGIDISGELTMMGIPEQNSKTVTPGLHYAADGFRLSGGNANFIARNMASVTGNIYADDAATITLGQPETETPTISSAYQAWAETLLYGFDTAYRGAITAPKATVSMNNAIWHLNSQSSINRLETKDSMVRFTGDNGKFTTLTVNNLTIDDSAFVLRANLAQADQLVVNKSLSGKNNLLLVDFIEKNGNSNGLNIDLVSAPKGTAVDVFKATTRSIGFSDVTPVIEQKNDTDKATWTLIGYKSVANADAAKKATLLMSGGYKAFLAEVNNLNKRMGDLRDINGESGAWARIISGTGSAGGGFSDNYTHVQVGADNKHELDGLDLFTGVTMTYTDSHAGSDAFSGETKSVGAGLYASAMFESGAYIDLIGKYVHHDNEYTATFAGLGTRDYSSHSWYAGAEVGYRYHVTDSAWIEPQAELVYGAVSGKQFSWKDQGMNLTMKDKDFNPLIGRTGVDVGKSFSGKDWKVTARAGLGYQFDLFANGETVLRDASGEKRIKGEKDGRMLMNVGLNAEIRDNLRFGLEFEKSAFGKYNVDNAINANFRYSF

SEQ ID NO: 2564 - protein, 170 aa, Escherichia coli
MSGILTRWRQFGKRYFWPHLLLGMVAASLGLPALSNAAEPNAPAKATTRNHEPSAKVNFGQLALLEANTRRPNSNYSVDYWHQHAIRTVIRHLSFAMAPQTLPVAEESLPLQAQHLALLDTLSALLTQEGTPSEKGYRIDYAHFTPQAKFSTPVWISHAQGIRAGPQRLS

SEQ ID NO: 2565 - protein, 170 aa, Escherichia coli
MSGILTRWRQFGKRYFWPHLLLGMVAASLGLPALSNAAEPNAPAKATTRNHEPSAKVNFGQLALLEANTRRPNSNYSVDYWHQHAIRTVIRHLSFAMAPQTLPVAEESLPLQAQHLALLDTLSALLTQEGTPSEKGYRIDYAHFTPQAKFSTPVWISQAQGIRAGPQRLS

SEQ ID NO: 2566 - protein, 170 aa, Escherichia coli [sequence omitted]

SEQ ID NO: 2567 - protein, 170 aa, Escherichia coli; identical to SEQ ID NO: 2565

SEQ ID NO: 2568 - protein, 170 aa, Escherichia coli
MSGILTRWRQFGKRYFWPHLLLGMVAASLGLPALSNAAEPNAPAKATTRNHEPSAKVNFGQLALLEANTRRPNSNYSVDYWHQHAIRTVIRHLSFAMAPQTLPVAEESLPLQAQHLALLDTLSALLTQEGTPSEKGYHIDYAHFTPQAKFSTPVWISQAQGIRAGPQRLS

SEQ ID NO: 2569 - protein, 170 aa, Escherichia coli; identical to SEQ ID NO: 2565

SEQ ID NO: 2570 - protein, 170 aa, Escherichia coli [sequence omitted]

SEQ ID NO: 2571 - protein, 170 aa, Escherichia coli [sequence omitted]

SEQ ID NO: 2572 - protein, 170 aa, Escherichia coli [sequence omitted]

SEQ ID NO: 2573 - protein, 170 aa, Escherichia coli; identical to SEQ ID NO: 2565

SEQ ID NO: 2574 - protein, 170 aa, Escherichia coli; identical to SEQ ID NO: 2565

SEQ ID NO: 2575 - protein, 170 aa, Escherichia coli; identical to SEQ ID NO: 2565

SEQ ID NO: 2576 - protein, 170 aa, Escherichia coli [sequence omitted]

SEQ ID NO: 2577 - protein, 170 aa, Escherichia coli [sequence omitted]

SEQ ID NO: 2578 - protein, 170 aa, Escherichia coli; identical to SEQ ID NO: 2565

SEQ ID NO: 2579 - protein, 170 aa, Escherichia coli; identical to SEQ ID NO: 2565

SEQ ID NO: 2580 - protein, 230 aa, Escherichia coli
MMTKIKLLMLIIFYLIISASAHAAGGIALGATRIIYPADAKQTAVWIRNSHTNERFLVNSWIENSSGVKEKSFIITPPLFVSEPKSENTLRIIYTGPPLAADRESLFWMNVKTIPSVDKNALNGRNVLQLAILSRMKLFLRPIQLQELPAEAPDTLKFSRSGNYINVHNPSPFYVTLVNLQVGSQKLGNAMAAPRVNSQIPLPSGVQGKLKFQTVNDYGSVTPVREVNLN

SEQ ID NO: 2581 - protein, 867 aa, Escherichia coli
MKIPTTTDIPQRYTWCLAGICYSSLAILPSFLSYAESYFNPAFLLENGTSVADLSRFERGNHQPAGVYRVDLWRNDEFIGSQDIVFESTTENTGDKSGGLMPCFNQVLLERIGLNSSAFPELAQQQNNKCINLLKAVPDATINFDFAAMRLNITIPQIALLSSAHGYIPPEEWDEGIPALLLNYNFTGNRGNGNDSYFFSELSGINIGPWRLRNNGSWNYFRGNGYHSEQWNNIGTWVQRAIIPLKSELVMGDGNTGSDIFDGVGFRGVRLYSSDNMYPDSQQGFAPTVRGIARTAAQLTIRQNGFIIYQSYVSPGAFEITDLHPTSSNGDLDVTIDERDGNQQNYTIPYSTVPILQREGRFKFDLTAGDFRSGNSQQSSPFFFQGTALGGLPQEFTAYGGTQLSANYTAFLLGLGRNLGNWGAVSLDVTHARSQLADASRHEGDSIRFLYAKSMNTFGTNFQLMGYRYSTQGFYTLDDVAYRRMEGYEYDYDGEHRDEPIIVNYHNLRFSRKDRLQLNVSQSLNDFGSLYISGTHQKYWNTSDSDTWYQVGYTSSWVGISYSLSFSWNESVGIPDNERIVGLNVSVPFNVLTKRRYTRENALDRAYASFNANRNSNGQNSWLAGVGGTLLEGHNLSYHVSQGDTSNNGYTGSATANWQAAYGTLGGGYNYDRDQHDVNWQLSGGVVGHENGITLSQPLGDTNVLIKAPGAGGVRIENQTGILTDWRGYAVMLYATVYRYNRIALDTNTMGNSIDVEKNISSVVPTQGALVRANFDTRIGVRALITVTQGGKPVPFGSLVRENSTGITSMVGDDGQVYLSGAPLSGELLVQWGDGANSRCIAHYVLPKQSLQQAVTVISAVCTHPGS

SEQ ID NO: 2582 - protein, 161 aa, Escherichia coli
MKKWLLAAGLGLALATSAQAADKIAIVNMGSLFQQVAQKTGVSNTLENEFKGRASELQRMETDLQAKMKKLQSMKAGSDRTKLEKDVMAQRQTFAQKAQAFEQDRARRSNEERGKLVTRIQTAVKSVANSQDIDLVVDANAVAYNSSDVKDITADVLKQVK

SEQ ID NO: 2583 - protein, 161 aa, Escherichia coli; identical to SEQ ID NO: 2582

SEQ ID NO: 2584 - protein, 161 aa, Escherichia coli; identical to SEQ ID NO: 2582

SEQ ID NO: 2585 - protein, 188 aa, Escherichia coli
MNMTKGALILSLSFLLAACSSIPQNIKGNNQPDIQKSFVAVHNQPGLYVGQQARFGGKVINVINGKTDTLLEISVLPLDSYAKPDIEANYQGRLLARQSGFLDPVNYRNHFVTILGTIQGEQPGFINKVPYNFLEVNMQGIQVWHLREVVNTTYNLWDYGYGAFWPEPGWGAPYYTNAVSQVTPELVK

SEQ ID NO: 2586 - protein, 645 aa, Escherichia coli
MEKAKQVTWRLLAAGVCLLTVSSVARADSLDEQRSRYAQIKQAWDNRQMDVVEQMMPGLKDYPLYPYLEYRQITDDLMNQPAVTVTNFVRANPTLPPARTLQSRFVNELARREDWRGLLAFSPEKPGTTEAQCNYYYAKWNTGQSEEAWQGAKELWLTGKSQPNACDKLFSVWRASGKQDPLAYLERIRLAMKAGNTGLVTVLAGQMPADYQTIASAIISLANNPNTVLTFARTTGATDFTRQMAAVAFASVARQDAENARLMIPSLAQAQQLNEDQIQELRDIVAWRLMGNDVTDEQAKWRDDAIMRSQSTSLIERRVRMALGTGDRRGLNTWLARLPMEAKEKDEWRYWQADLLLERGREAEAKEILHQLMQQRGFYPMVAAQRIGEEYELKIDKAPQNVDSALTQGPEMARVRELMYWNLDNTARSEWANLVKSKSKTEQAQLARYAFNNQWWDLSVQATIAGKLWDHLEERFPLAYNDLFKRYTSGKEIPQSYAMAIARQESAWNPKVKSPVGASGLMQIMPGTATHTVKMFSIPGYSSPGQLLDPETNINIGTSYLQYVYQQFGNNRIFSSAAYNAGPGRVRTWLGNSAGRIDAVAFVESIPFSETRGYVKNVLAYDAYYRYFMGDKPTLMSATEWGRRY

SEQ ID NO: 2587 - protein, 645 aa, Escherichia coli; identical to SEQ ID NO: 2586

SEQ ID NO: 2588 - protein, 155 aa, Escherichia coli
MIKRVLVVSMVGLSLVGCVNNDTLSGDVYTASEAKQVQNVSYGTIVNVRPVQIQGGDDSNVIGAIGGAVLGGFLGNTVGGGTGRSLATAAGAVAGGVAGQGVQSAMNKTQGVELEIRKDDGNTIMVVQKQGNTRFSPGQRVVLASNGSQVTVSPR

SEQ ID NO: 2589 - protein, 155 aa, Escherichia coli; identical to SEQ ID NO: 2588

SEQ ID NO: 2590 - protein, 173 aa, Escherichia coli
MKRFSLAILALVVATGAQAASEKVEMNLVTSQGVGQSIGSVTITETDKGLEFSPDLKALPPGEHGFHIHAKGSCQPATKDGKASAAESAGGHLDPQNTGKHEGPEGAGHLGDLPALVVNNDGKATDAVIAPRLKSLDEIKDKALMVHVGGDNMSDQPKPLGGGGERYACGVIK

SEQ ID NO: 2591 - protein, 173 aa, Escherichia coli; identical to SEQ ID NO: 2590

SEQ ID NO: 2592 - protein, 658 aa, Escherichia coli
MSDDMSMGLPSSAGEHGVLRSMQEVAMSSQEASKMLRTYNIAWWGNNYYDVNELGHISVCPDPDVPEARVDLAQLVKTREAQGQRLPALFCFPQILQHRLRSINAAFKRARESYGYNGDYFLVYPIKVNQHRRVIESLIHSGEPLGLEAGSKAELMAVLAHAGMTRSVIVCNGYKDREYIRLALIGEKMGHKVYLVIEKMSEIAIVLDEAERLNVVPRLGVRARLASQGSGKWQSSGGEKSKFGLAATQVLQLVETLREAGRLDSLQLLHFHLGSQMANIRDIATGVRESARFYVELHKLGVNIQCFDVGGGLGVDYEGTRSQSDCSVNYGLNEYANNIIWAIGDACEENGLPHPTVITESGRAVTAHHTVLVSNIIGVERNEYTVPTAPAEDAPRALQSMWETWQEMHEPGTRRSLREWLHDSQMDLHDIHIGYSSGTFSLQERAWAEQLYLSMCHEVQKQLDPQNRAHRPIIDELQERMADKMYVNFSLFQSMPDAWGIDQLFPVLPLEGLDQVPERRAVLLDITCDSDGAIDHYIDGDGIATTMPMPEYDPENPPMLGFFMVGAYQEILGNMHNLFGDTEAVDVFVFPDGSVEVELSDEGDTVADMLQYVQLDPKTLLTQFRDQVKKTDLDAELQQQFLEEFEAGLYGYTYLEDE

SEQ ID NO: 2593 - protein, 658 aa, Escherichia coli; identical to SEQ ID NO: 2592

SEQ ID NO: 2594 - protein, 658 aa, Escherichia coli
MSDDMSMGLPSSAGEHGVLRSMQEVAMSSQEASKMLRTYNIAWWGNNYYDVNELGHISVCPDPDVPEARVDLAQLVKTREAQGQRLPALFCFPQILQHRLRSINAAFKRARESYGYNGDYFLVYPIKVNQHRRVIESLIHSGEPLGLEAGSKAELMAVLAHAGMTRSVIVCNGYKDREYIRLALIGEKMGHKVYLVIEKMSEIAIVLDEAERLNVVPRLGVRARLASQGSGKWQSSGGEKSKFGLAATQVLQLVETLREAGRLDSLQLLHFHLGSQMANIRDIATGVRESARFYVELHKLGVNIQCFDVGGGLGVDYEGTRSQSDCSVNYGLNEYANNIIWAIGDACEENGLPHPTVITESGRAVTAHHTVLVSNIIGVERNEYTVPTAPAEDAPRALQSMWETWQEMHEPGTRRSLREWLHDSQMDLHDIHIGYSSGIFSLQERAWAEQLYLSMCHEVQKQLDPQNRAHRPIIDELQERMADKMYVNFSLFQSMPDAWGIDQLFPVLPLEGLDQVPERRAVLLDITCDSDGAIDHYIDGDGIATTMPMPEYDPENPPMLGFFMVGAYQEILGNMHNLFGDTEAVDVFVFPDGSVEVELSDEGDTVADMLQYVQLDPKTLLTQFRDQVKKTDLDAELQQQFLEEFEAGLYGYTYLEDE

SEQ ID NO: 2595 - protein, 161 aa, Escherichia coli
MRKLTALFVASTLALGAANLAHAADTTTAAPADAKPMMHHKGKFGPHQDMMFKDLNLTDAQKQQIREIMKGQRDQMKRPPLEERRAMHDIIASDTFDKVKAEAQIAKMEEQRKANMLAHMETQNKIYNILTPEQKKQFNANFEKRLTERPAAKGKMPATAE

SEQ ID NO: 2596 - protein, 319 aa, Escherichia coli
MRNIIKLALAGLLSVSTFAVAAESSPEALRIGYQKGSIGMVLAKSHQLLEKRYPESKISWVEFPAGPQMLEALNVGSIDLGSTGDIPPIFAQAAGADLVYVGVEPPKPKAEVILVAENSPIKTVADLKGHKVAFQKGSSSHNLLLRALRQAGLKFTDIQPTYLTPADARAAFQQGNVDAWAIWDPYYSAALLQGGVRVLKDGTDLNQTGSFYLAARPYAEKNGAFIQGVLATFSEADALTRSQREQSIALLAKTMGLPAPVIASYLDHRPPTTIKPVNAEVAALQQQTADLFYENRLVPKKVDIRQRIWQPTQLEGKQL

SEQ ID NO: 2597 - protein, 898 aa, Escherichia coli
MNTKMNERWRTPMKLKYLSCTILAPLAIGVFSATAADNNSAIYFNTSQPINDLQGSLAAEVKFAQSQILPAHPKEGDSQPHLTSLRKSLLLVRPVKADDKTPVQVEARDDNNKILGTLTLYPPSSLPDTIYHLDGVPEGGIDFTPHNGTKKIINTVAEVNKLSDASGSSIHSHLTNNALVEIHTANGRWVRDIYLPQGPDLEGKMVRFVSSAGYSSTVFYGDRKVTLSVGNTLLFKYVNGQWFRSGELENNRITYAQHIWSAELPAHWIVPGLNLVIKQGNLSGRLNDIKIGAPGELLLHTIDIGMLTTPRDRFDFAKDKEAHREYFQTIPVSRMIVNNYAPLHLKEVMLPTGELLTDMDPGNGGWHSGTMRQRIGKELVSHGIDNANYGLNSTAGLGENSHPYVVAQLAAHNSRGNYANGIQVHGGSGGGGIVTLDSTLGNEFSHEVGHNYGLGHYVDGFKGSVHRSAENNNSTWGWDGDKKRFIPNFYPSQTNEKSCLNNQCQEPFDGHKFGFDAMAGGSPFSAANRFTMYTPNSSAIIQRFFENKAVFDSRSSTGFSKWNADTQEMEPYEHTIDRAEQITASVNELSESKMAELMAEYAVVKVHMWNGNWTRNIYIPTASADNRGSILTINHEAGYNSYLFINGDEKVVSQGYKKSFVSDGQFWKERDVVDTREARKPEQFGVPVTTLVGYYDPEGTLSSYIYPAMYGAYGFTYSDDSQNLSDNDCQLQVDTKEGQLRFRLANHRANNTVMNKFHINVPTESQPTQATLVCNNKILDTKSLTPAPEGLTYTVNGQALPAKENEGCIVSVNSGKRYCLPVGQRSGYSLPDWIVGQEVYVDSGAKAKVLLSDWDNLSYNRIGEFVGNVNPADMKKVKAWNGQYLDFSKPRSMRVVYK

SEQ ID NO: 2598 - protein, 329 aa, Escherichia coli
MNKWGVGLTFLLAATSVMAKDIQLLNVSYDPTRELYEQYNKAFSAHWKQQTGDNVVIRQSHGGSGKQATSVINGIEADVVTLALAYDVDAIAERGRIDKEWIKRLPDNSAPYTSTIVFLVRKGNPKQIHDWNDLIKPGVSVITPNPKSSGGARWNYLAAWGYALHHNNNDQAKAQDFVRALYKNVEVLDSGARGSTNTFVERGIGDVLIAWENEALLAANELGKDKFEIVTPSESILAEPTVSVVDKVVEKKGTKEVAEAYLKYLYSPEGQEIAAKNYYRPRDAEVAKKYENAFPKLKLFTIDEEFGGWTKAQKEHFANGGTFDQISKR

SEQ ID NO: 2599 - protein, 428 aa, Escherichia coli
MKNWKTLLLGIAMIANTSFAAPQVVDKVAAVVNNGVVLESDVDGLMQSVKLNAAQARQQLPDDATLRHQIMERLIMDQIILQMGQKMGVKISDEQLDQAIANIAKQNNMTLDQMRSRLAYDGLNYNTYRNQIRKEMIISEVRNNEVRRRITILPQEVESLAQQVGNQNDASTELNLSHILIPLPENPTSDQVNEAESQARAIVDQARNGADFGKLAIAHSADQQALNGGQMGWGRIQELPGIFAQALSTAKKGDIVGPIRSGVGFHILKVNDLRGESKNISVTEVHARHILLKPSPIMTDEQARVKLEQIAADIKSGKTTFAAAAKEFSQDPGSANQGGDLGWATPDIFDPAFRDALTRLNKGQMSAPVHSSFGWHLIELLDTRNVDKTDAAQKDRAYRMLMNRKFSEEAASWMQEQRASAYVKILSN

SEQ ID NO: 2600 - protein, 428 aa, Escherichia coli; identical to SEQ ID NO: 2599

SEQ ID NO: 2601 - protein, 428 aa, Escherichia coli; identical to SEQ ID NO: 2599

SEQ ID NO: 2602 - protein, 428 aa, Escherichia coli; identical to SEQ ID NO: 2599

SEQ ID NO: 2603 - protein, 320 aa, Escherichia coli
MAISSRNTLLAALAFIAFQAQAVNVTVAYQTSAEPAKVAQADNTFAKESGATVDWRKFDSGASIVRALASGDVQIGNLGSSPLAVAASQQVPIEVFLLASKLGNSEALVVKKTISKPEDLIGKRIAVPFISTTHYSLLAALKHWGIKPGQVEIVNLQPPAIIAAWQRGDIDGAYVWAPAVNALEKDGKVLTDSEQVGQWGAPTLDVWVVRKDFAEKHPEVVKAFAKSAIDAQQPYIANPDVWLKQPENISKLARLSGVPEGDVPGLVKGNTYLTPQQQTAELTGPVNKAIIDTAQFLKEQGKVPAVANDYSQYVTSRFVQ

SEQ ID NO: 2604 - protein, 208 aa, Escherichia coli
MMNFNNVFRWHLPFLFLVLLTFRAAAADTLLILGDSLSAGYRMSASAAWPALLNDKWQSKTSVVNASISGDTSQQGLARLPALLKQHQPRWVLVELGGNDGLRGFQPQQTEQTLRQILQDVKAANAEPLLMQIRLPANYGRRYNEAFSAIYPKLAKEFDVPLLPFFMEEVYLKPQWMQDDGIHPNRDAQPFIADWMAKQLQPLVNHDS

SEQ ID NO: 2605 - protein, 208 aa, Escherichia coli; identical to SEQ ID NO: 2604

SEQ ID NO: 2606 - protein, 327 aa, Escherichia coli
MLKKCLPLLLLCTAPVFAKPVLTVYTYDSFAADWGPGPVVKKAFEADCNCELKLVALEDGVSLLNRLRMEGKNSKADVVLGLDNNLLDAASKTGLFAKSGVAADAVNVPGGWNNDTFVPFDYGYFAFVYDKNKLKNPPQSLKELVESDQNWRVIYQDPRTSTPGLGLLLWMQKVYGDDAPQAWQKLAKKTVTVTKGWSEAYGLFLKGESDLVLSYTTSPAYHILEEKKDNYAAANFSEGHYLQVEVAARTAASKQPELAQKFLQFMVSPAFQNAIPTGNWMYPVANVTLPAGFEKLTKPATTLEFTPAEVAAQRQAWISEWQRAVSR

SEQ ID NO: 2607 - protein, 989 aa, Escherichia coli
MNKVYNTVWNESTGTWVVTSELTRKGGLRPRQIKRTVLAGLIAGLLMPSMPALAAAYDNQTIGRGETSKSMHLSAGDTAKNTTINSGGKQYVSSGGSATSTTINIGGVQHVSSGGSATSSTINSGGHQHVSSGGSATNTTVNNGGRQTVFSGGSAMGTIINSGGDQYVISGGSATSASVTSGARQFVSSGGIVKATSVNSGGRQYVRDGGSATDTVLNNTGRQFVSSGGSAAKTTINSGGGMYLYGGSATGTSIYNGGRQYVSSGGSATNTTVYSGGRQHVYIDGNVTETTITSGGMLQVEAGGSASKVIQNSGGAVITNTSAAVSGTNDNGSFSIAGGSAVNMLLENGGYLTVFDGHQASDTMVGSDGTLDVRSGGVLYGTTTLTDKGALVGDVVTNEGNLYYLNNSTATFTGTLTGTGTLTQEGGNTRFSGLLSQDGGIFLQSGGAMTMDALQAKANVTTQSGTTLTLDNGTILTGNVAGDSTGAGDMAVKGASVWHLDGDSTVGALTLDNGTVDFRPSTTTRMTPAFQAVSLALGSLSGSGTFQMNTDIASHTGDMLNVAGNASGNFVLDIKNTGLEPVSAGAPLQVVQTGGGDAAFTLKGGKVDAGTWEYGLSKENTNWYLKADTPPPVTPPTNPDADNPDAGNPDAGNPDAGNPDAGNPDAGKPGTGKPDAGTSSSPVRRTTKSVDAVLGMATAPAYVFNSELDNLRFRHGDVMQNTRAPGGVWGRYTGSDNRISGGASSGYTLTQNGFETGADMVFDLSDSSLAVGTFFSYSDNSIKHARGGKSNVDSSGGGLYATWFDNDGYYVDGVLKYNRFNNELRTWMSDGTAVKGDYSQNGFGGSLEAGRTFSLNENAWAQPYVRTTAFRADKKEIRLNNGMKASIGATKSLQAEAGLKLGMTLDVAGKEVKPYLSAAVSHEFSDNNKVRINDTYDFRNDISGTTGKYGLGVNAQLTPNAGVWAEARYENGKQTESPITGGVGFRINF

SEQ ID NO: 2608 - protein, 538 aa, Escherichia coli
MPIGNLGHNPNVRALIPPAPPLPSQTDGAGGARNQLINSNGPMGSRLLFTPIRNSVADAADSRASDIPGLPTNPLRFAASEVSLHGALEVLHDKGGLDTLNSAIGSSLFRVETRDDGSHVAIGQKNGLETTVVLSEQEFSSLQSLDPEGKNKFVFTGGRGGAGHAMVTVASDIAEARQRIIDKLEPKDTKETKEPGDPNSGEGKIIEIHTSTSTSSLRADPKLWLSLGTIAAGLIGMAATGIAQAVALTPEPDDPITTDPDAAANTAEAAAKDQLTKEAFQNPDNQKVNIDENGNAIPSGELKDDVVAQIAEQAKAAGEQARQEAIESNSQAQQKYDEQHAKREQEMSLSSGVGYGISGALILGGGIGAGVTAALHRKNQPAEQTITTRTVVDNQPTNNASAQGNTDTSGPEESPASRRNSNASLASNGSDTSSTGTVENPYADVGMPRNDSLARISEEPIYDEVAADPNYSVIQHFSGNSPVTGRLVGTPGQGIQSTYALLASSGGLRLGMGGLTGGGESAVSTANAAPTPGPARFV

SEQ ID NO: 2609 - protein, 538 aa, Escherichia coli; identical to SEQ ID NO: 2608

SEQ ID NO: 2610 - protein, 558 aa, Escherichia coli
MPIGNLGHNPNVNNSIPPAPPLPSQTDGAGGRGQLINSTGPLGSRALFTPVRNSMADSGDNRASDVPGLPVNPMRLAASEITLNDGFEVLHDHGPLDTLNRQIGSSVFRVETQEDGKHIAVGQRNGVETSVVLSDQEYARLQSIDPEGKDKFVFTGGRGGAGHAMVTVASDITEARQRILELLEPKGTGESKGAGESKGVGELRESNSGAENTTETQTSTSTSSLRSDPKLWLALGTVATGLIGLAATGIVQALALTPEPDSPTTTDPDAAASATETATRDQLTKEAFQNPDNQKVNIDELGNAIPSGVLKDDVVANIEEQAKAAGEEAKQQAIENNAQAQKKYDEQQAKRQEELKVSSGAGYGLSGALILGGGIGVAVTAALHRKNQPVEQTTTTTTTTTTTSARTVENKPANNTPAQGNVDTPGSEDTMESRRSSMASTSSTFFDTSSIGTVQNPYADVKTSLHDSQVPTSNSNTSVQNMGNTDSVVYSTIQHPPRDTTDNGARLLGNPSAGIQSTYARLALSGGLRHDMGGLTGGSNSAVNTSNNPPAPGSHRFV

SEQ ID NO: 2611 - protein, 551 aa, Escherichia coli
MPIGNLGNNVNSNNLIPPAPPLPSQTDGASRGGAGQLINSTGALGSRLLFSPLRNSIADSVDSRDIPGLPVHPSRLATATSEICLLGGFEVLHDKGPLDTLNKQIGASAFRIEQQSDGSYAAIGEKNGVEVSVILNSQELQSLQAIDIEDKGRFVFTGGRGGGGHSMVTPASDIAEARAKILAKLDPNNHGGSQARNVDTRSVGVGSASGMDDSVVSETRTSSTASSVRSDPKFWVSIGAIAAGLAGLAATGITQALALTPEPDDPTTTDPEQAASAAESATRDQLTQEAFKNPENQKVSIDEIGNSIPSGELKDDVVAKIEEQAKEAGEAARQQAVESNAQAQQRYDTQYARRQEELELSSGIGYSLSSALIVGGGIGAGVTTALHRRNQPAEQTTTTTTHTVVQQQTGGNTPAQGGTDAIRAEDTSLNRRDSQRSTASTHWSDTSSAVVNPYAEVGEARNSSPARQAEEHIYDEVAADPNYSVIQNFSGNNQVTGRLMGTPGQGIQSTYAILTNNSAGLRLGMGGLTGSGGSAVNTANAAPTPGPGRFV

SEQ ID NO: 2612 - protein, 550 aa, Escherichia coli
MPIGNLGNNVNGNHLIPPAPPLPSQTDGAARGGTGHLISSTGALGSRSLFSPLRNSMADSVDSRDIPGLPTNPSRLAAATSETCLLGGFEVLHDKGPLDILNTQIGPSAFRVEVQADGTHAAIGEKNGLEVSVTLSPQEWSSLQSIDTEGKNRFVFTGGRGGSGHPMVTVASDIAEARTKILAKLDPDNHGGRQPKDVDTRSVGVGSASGIDDGVVSETHTSTTNSSVRSDPKFWVSVGAIAAGLAGLAATGIAQALALTPEPDDPTTTDPDQAANAAESATKDQLTQEAFKNPENQKVNIDANGNAIPSGELKDDIVEQIAQQAKEAGEVARQQAVESNAQAQQRYEDQHARRQEELQLSSGIGYGLSSALIVAGGIGAGVTTALHRRNQPAEQTTTTTTHTVVQQQTGGNTPAQGGTDATRAEDASLNRRDSQGSVASTHWSDSSSEVVNPYAEVGGARNSLSAHQPEEHIYDEVAADPGYSVIQNFSGSGPVTGRLIGTPGQGIQSTYALLANSGGLRLGMGGLTSGGESAVSSVNAAPTPGPVRFV

SEQ ID NO: 2613 - protein, 558 aa, Escherichia coli; identical to SEQ ID NO: 2610

SEQ ID NO: 2614 - protein, 558 aa, Escherichia coli; identical to SEQ ID NO: 2610

SEQ ID NO: 2615 - protein, 558 aa, Escherichia coli; identical to SEQ ID NO: 2610

SEQ ID NO: 2616 - protein, 556 aa, Escherichia coli
MPIGNLGHNPNVNNSIPPAPPLPSQTDGAGGRGQLINSTGPLGSRALFTPVRNSMADSGDNRASDVPGLPVNPMRLAASEITLNDGFEVLHDHGPLDTLNRQIGSSVFRVETQEDGKHIAVGQRNGVETSVVLSDQEYARLQSIDPEGKDKFVFTGGRGGAGHAMVTVASDITEARQRILELLEPKGTGESKGAGESKGVGELRESNSGAENTTETQTSTSTSSLRSDPKLWLALGTVATGLIGLAATGIVQALALTPEPDSPTTTDPDAAASATETATRDQLTKEAFQNPDNQKVNIDELGNAIPSGVLKDDVVANIEEQAKAAGEEAKQQAIENNAQAQKKYDEQQAKRQEELKVSSGAGYGLSGALILGGGIGVAVTAALHRKNQPVEQTTTTTTTTTSARTVENKPANNTPAQGNVDTPGSEDTMESRRSSMASTSSTFFDTSSIGTVQNPYADVKTSLHDSQVPTSNSNTSVQNMGNTDSVVYSTIQHPPRDTTDNGARLLGNPSAGIQSTYARLALSGGLRHDMGGLTGGSNSAVNTSNNPPAPGSHRFV

SEQ ID NO: 2617 - protein, 430 aa, Escherichia coli
MKQALRVAFGFLILWASVLHAEVRIVIDSGVDSGRPIGVVPFQWAGPGAAPEDIGGIVAADLRNSGKFNPLDRARLPQQPGSAQEVQPAAWSALGIDAVVVGQVTPNPDGSYNVAYQLVDTGGAPGTVLAQNSYKVNKQWLRYAGHTASDEVFEKLTGIKGAFRTRIAYVVQTNGGQFPYELRVSDYDGYNQFVVHRSPQPLMSPAWSPDGSKLAYVTFESGRSALVIQTLANGAVRQVASFPRHNGAPAFSPDGSKLAFALSKTGSLNLYVMDLASGQIRQVTDGRSNNTEPTWFPDSQNLAFTSDQAGRPQVYKVNINGGAPQRITWEGSQNQDADVSSDGKFMVMVSSNGGQQHIAKQDLATGGVQVLSSTFLDETPSLAPNGTMVIYSSSQGMGSVLNLVSTDGRFKARLPATDGQVKFPAWSPYL

SEQ ID NO: 2618 - protein, 430 aa, Escherichia coli; identical to SEQ ID NO: 2617

SEQ ID NO: 2619 - protein, 430 aa, Escherichia coli; identical to SEQ ID NO: 2617

SEQ ID NO: 2620 - protein, 430 aa, Escherichia coli; identical to SEQ ID NO: 2617

SEQ ID NO: 2621 - protein, 430 aa, Escherichia coli; identical to SEQ ID NO: 2617

SEQ ID NO: 2622 - protein, 430 aa, Escherichia coli; identical to SEQ ID NO: 2617

SEQ ID NO: 2623 - protein, 430 aa, Escherichia coli; identical to SEQ ID NO: 2617

SEQ ID NO: 2624 - protein, 430 aa, Escherichia coli; identical to SEQ ID NO: 2617

SEQ ID NO: 2625 - protein, 430 aa, Escherichia coli
MKQALRVAFGFLILWASVLHAEVRIVIDSGVDSGRPIGVVPFQWVGPGAAPEDIGGIVAADLRNSGKFNPLDRARLPQQPGSAQEVQPAAWSALGIDAVVVGQVTPNPDGSYNVAYQLVDTGGAPGTVLAQNSYKVNKQWLRYAGHTASDEVFEKLTGIKGAFRTRIAYVVQTNGGQFPYELRVSDYDGYNQFVVHRSPQPLMSPAWSPDGSKLAYVTFESGRSALVIQTLANGAVRQVASFPRHNGAPAFSPDGSKLAFALSKTGSLNLYVMDLASGQIRQVTDGRSNNTEPTWFPDSQNLAFTSDQAGRPQVYKVNINGGAPQRITWEGSQNQDADVSSDGKFMVMVSSNGGQQHIAKQDLATGGVQVLSSTFLDETPSLAPNGTMVIYSSSQGMGSVLNLVSTDGRFKARLPATDGQVKFPAWSPYL

SEQ ID NO: 2626 - protein, 430 aa, Escherichia coli; identical to SEQ ID NO: 2617

SEQ ID NO: 2627 - protein, 430 aa, Escherichia coli; identical to SEQ ID NO: 2617

SEQ ID NO: 2628 - protein, 430 aa, Escherichia coli; identical to SEQ ID NO: 2617

SEQ ID NO: 2629 - protein, 430 aa, Escherichia coli; identical to SEQ ID NO: 2617

SEQ ID NO: 2630 - protein, 430 aa, Escherichia coli; identical to SEQ ID NO: 2617

SEQ ID NO: 2631 - protein, 430 aa, Escherichia coli; identical to SEQ ID NO: 2617

SEQ ID NO: 2632 - protein, 430 aa, Escherichia coli; identical to SEQ ID NO: 2617

SEQ ID NO: 2633 - protein, 430 aa, Escherichia coli; identical to SEQ ID NO: 2617

SEQ ID NO: 2634 - protein, 493 aa, Escherichia coli
MKKLLPILIGLSLSGFSSLSQAENLMQVYQQARLSNPELRKSAADRDAAFEKINEARSPLLPQLGLGADYTYSNGYRDANGINSNATSASLQLTQSIFDMSKWRALTLQEKAAGIQDVTYQTDQQTLILNTATAYFNVLNAIDVLSYTQAQKEAIYRQLDQTTQRFNVGLVAITDVQNARAQYDTVLANEVTARNNLDNAVEQLRQITGNYYPELAALNVENFKTDKPQPVNALLKEAEKRNLSLLQARLSQDLAREQIRQAQDGHLPTLDLTASTGISDTSYSGSKTRGAAGTQYDDSNMGQNKVGLSFSLPIYQGGMVNSQVKQAQYNFVGASEQLESAHRSVVQTVRSSFNNINASISSINAYKQAVVSAQSSLDAMEAGYSVGTRTIVDVLDATTTLYNAKQELANARYNYLINQLNIKSALGTLNEQDLLALNNALSKPVSTNPENVAPQTPEQNAIADGYAPDSPAPVVQQTSARTTTSNGHNPFRN

SEQ ID NO: 2635 - protein, 848 aa, Escherichia coli
MNNNDLFQASRRRFLAQLGGLTVAGMLGPSLLTSRRATAAQAATEAVISKEGILTGSHWGAIRATVKDGRFVAAKPFELDKYPSKMIAGLPDHVHNAARIRYPMVRVDWLRKRHLSDTSQRGDNRFVRVSWDEALDMFYEELERVQKTHGPSALLTASGWQSTGMFHNASGMLAKAIALHGNSVGTGGDYSTGAAQVILPRVVGSMEVYEQQTSWPLVLQNSKTIVLWGSDLLKNQQANWWCPDHDVYEYYAQLKAKVAAGEIEVISIDPVVTSTHEYLGREHVKHIAVNPQTDVPLQLALAHTLYSENLYDKNFLANYCVGFEQFLPYLLGEKDGQPKDAAWAEKLTGIDAETIRGLARQMAANRTQIIAGWCVQRMQHGEQWAWMIVVLAAMLGQIGLPGGGFGFGWHYNGAGTPGRKGVILSGFSGSTSIPPVHDNSDYKGYSSTIPIARFIDAILEPGKVINWNGKSVKLPPLKMCIFAGTNPFHRHQQINRIIEGWRKLETVIAIDNQWTSTCRFADIVLPATTQFERNDLDQYGNHSNRGIIAMKQVVPPQFEARNDFDIFRELCRRFNREEAFTEGLDEMGWLKRIWQEGVQQGKGRGVHLPAFDDFWNNKEYVEFDHPQMFVRHQAFREDPDLEPLGTPSGLIEIYSKTIADMNYDDCQGHPMWFEKIERSHGGPGSQTYPLHLQSVHPDFRLHSQLCESETLRQQYTVAGKEPVFINPQDASARGIRNGDVVRVFNARGQVLAGAVVSDRYAPGVARIHEGAWHDPDKGGEPGALCKYGNPNVLTIDIGTSQLAQATSAHTTLVEIEKCNGTVEQVTAFNGPVEMVAQCEYVPASQVKL

SEQ ID NO: 2636 - protein, 848 aa, Escherichia coli
MNNNDLFQASRRRFLAQLGGLTVAGMLGTSLLTPRRATAAQAATEAVISKEGILTGSHWGAIRATVKDGRFVAAKPFELDKYPSKMIAGLPDHVHNAARIRYPMVRVDWLRKRHLSDTSQRGDNRFVRVSWDEALDMFYEELERVQKTHGPSALLTASGWQSTGMFHNASGMLAKAIALHGNSVGTGGDYSTGAAQVILPRVVGSMEVYEQQTSWPLVLQNSKTIVLWGSDLLKNQQANWWCPDHDVYEYYEQLKAKVAAGEIEVISIDPVVTSTHEYLGREHVKHIAVNPQTDVPLQLALAHTLYSENLYDKNFLANYCVGFEQFLPYLLGEKDGQPKDAAWAEKLTGIDAETIRGLARQMAANRTQIIAGWCVQRMQHGEQWAWMIVVLAAMLGQIGLPGGGFGFGWHYNGAGTPGRKGVILSGFSGSTSIPPVHDNSDYKGYSSTIPIARFIDAILEPGKVINWNGKSVKLPPLKMCIFAGTNPFHRHQQINRIIEGWRKLETVIAIDNQWTSTCRFADIVLPATTQFERNDLDQYGNHSNRGIIAMKQVVPPQFEARNDFDIFRELCRRFNREEAFTEGLDEMGWLKRIWQEGVQQGKGRGVHLPAFNDFWNNKEYVEFDHPQMFVRHQAFREDPDLEPLGTPSGLIEIYSKTIADMNYDDCQGHPMWFEKIERSHGGPGSQKYPLHLQSVHPDFRLHSQLCESETLRQQYTVAGKEPVFISPKDASARGIRHGDVVRVFNVRGQVLAGAVVSDRYAPGVARIHEGAWYDPDKGGEPGALCKYGNPNVLTIDIGTSQLAQATSAHTTLVEIEKYNGTVEQVTAFNGPVEMVAQCEYVPASQVKS

SEQ ID NO: 2637 - protein, 848 aa, Escherichia coli
MNNNDLFQASRRRFLAQLGGLTVAGMLGPSLLTPRRATAAQAATDAVISKEGILTGSHWGAIRATVKDGRFVAAKPFELDKYPSKMIAGLPDHVHNAARIRYPMVRVDWLRKRHLSDTSQRGDNRFVRVSWDEALDMFYEELERVQKTHGPSALLTASGWQSTGMFHNASGMLAKAIALHGNSVGTGGDYSTGAAQVILPRVVGSMEVYEQQTSWPLVLQNSKTIVLWGSDLLKNQQANWWCPDHDVYEYYAQLKAKVAAGEIEVISIDPVVTSTHEYLGREHVKHIAVNPQTDVPLQLALAHTLYSENLYDKNFLANYCVGFEQFLPYLLGEKDGQPKDAAWAEKLTGIDAETIRGLARQMAANRTQIIAGWCVQRMQHGEQWAWMIVVLAAMLGQIGLPGGGFGFGWHYNGAGTPGRKGVILSGFSGSTSIPPVHDNSDYKGYSSTIPIARFIDAILEPGKVINWNGKSVKLPPLKMCIFAGTNPFHRHQQINRIIEGLRKLETVIAIDNQWTSTCRFADIVLPATTQFERNDLDQYGNHSNRGIIAMKQVVPPQFEARNDFDIFRELCRRFNREEAFTEGLDEMGWLKRIWQEGVQQGKGRGVHLPAFDDFWNNKEYVEFDHPQMFVRHQAFREDPDLEPLGTPSGLIEIYSKTIADMNYDDCQGHPMWFEKIERSHGGPGSQKYPLHLQSVHPDFRLHSQLCESETLRQQYTVAGKEPVFINPQDASARGIRNGDVVRVFNARGQVLAGAVVSDRYAPGVARIHEGAWYDPDKGGEPGALCKYGNPNVLTIDIGTSQLAQATSAHTTLVEIEKYNGTVEQVTAFNGPVEMVAQCEYVPASQVKS

SEQ ID NO: 2638 - protein, 342 aa, Escherichia coli
MRVLLFLLLSLFMLPAFSADNLLRWHDAQHFTVQASMPLKAKRVWKLCALYPSLKDSYWLSLNYGMQEAARRYGVDLKVLEAGGYSQLATQQAQIDQCKQWGAEAILLGSSTTSFPDLQKQVANLPVIELVNAIDAPQVKSRVGVPWFQMGYQPGRYLVQWAHGKPLNVLLMPGPDNAGGSKEMVEGFRAAIAGSPVRIVDIALGDNDIEIQRNLLQEMLERHPEIDVVAGTAIAAEAAMGEGRNLKTPLTVVSFYLSHQVYRGLKRGRVIMAASDQMVWQGELAVEQAIRQLQGQSVSDNVSPPILVLTPKNADREHIRRSLSPGGFRPVYFYQHTSAAKK

SEQ ID NO: 2639 - protein, 342 aa, Escherichia coli
MRVLLFLLLSLFMLPAFSADNLLRWHDAQHFTVQASTPLKAKRAWKLCALYPSLKDSYWLSLNYGMQEAARRYGVDLKVLEAGGYSQLATQQAQIDQCKQWGAEAILLGSSTTSFPDLQKQVASLPVIELVNAIDAPQVKSRVGVPWFQMGYQPGRYLVQWAHGKPLNVLLMPGPDNAGGSKEMVEGFRAAIAGSPVRIVDIALGDNDIEIQRNLLQEMLERHPEIDVVAGTAIAAEAAMGEGRNLKTPLTVVSFYLSHQVYRGLKRGRVIMAASDQMVWQGELAVEQAIRQLQGQSVSDNVSPPILVLTPKNADREHIRRSLSPGGFRPVYFYQHTSAAKK

SEQ ID NO: 2640 - protein, 809 aa, Escherichia coli
MTLTRREFIKHSGIAAGALVVTSAAPLPAWAEEKGGKILTAGRWGAMNVEVKDGKIVSSTGALAKTIPNSLQSTAADQVHTTARIQHPMVRKSYLDNPLQPAKGRGEDTYVQVSWEQALKLIHEQHERIRKANGPSAIFAGSYGWRSSGVLHKAQTLLQRYMNLAGGYSGHSGDYSTGAAQVIMPHVVGSVEVYEQQTSWPLILENSQVVVLWGMNPLNTLKIAWSSTDEQGLEYFHQLKKSGKPVIAIDPIRSETIEFFGYNATWIAPNMGTDVALMLGIAHTLMTQGKHDKVFLEKYTTGYPQFEEYLTGKSDNTPKSAAWTAEITGVPEAQIVKLAELMAANRTMLMAGWGIQRQQYGEQKHWMLVTLAAMLGQIGTPGGGFGFSYHYSNGGNPTRVGGVLPEMSAAIAGQASEAADDGGMTAIPVARIVDALENPGGKYQHNGKEQTYPNIKMIWWAGGGNFTHHQDTNRLIKAWQKPEMIVVSECYWTAAAKHADIVLPITTSFERNDLTMTGDYSNQHIVPMKQAVAPQFEARNDFDVFAELAELLKPGGKEIYTEGKDEMAWLKFFYDAAQKGARAQRVTMPMFNAFWQQNKLIEMRRSEKNEQYVRYGDFRADPVKNALGTPSGKIEIYSKTLEKFGYKDCPAHPTWLAPDEWKGTADEKQLQLLTAHPAHRLHSQLNYAQLRKKYAVADREPITIHTEDAARFGIANGDLVRVWNKRGQILTGAVVTDGIKKGVVCVHEGAWPDLENGLCKNGSANVLTADIPSSQLANACAGNSALVYIEKYTGNAPKLTAFDQPAVQA

SEQ ID NO: 2641 - protein, 809 aa, Escherichia coli
MTLTRREFIKHSGIAAGTLVVTSAAPLPAWAEEKGGKILTAGRWGAMNVEVKDGKIVSSTGALAKTIPNSLQSTAADQVHTTARIQHPMVRKSYLDNPLQPVKGRGEDTYVQVSWEQALKLIHEQHDRIRKANGPSAIFAGSYGWRSSGVLHKAQTLLQRYMNLAGGYSGHSGDYSTGAAQVIMPHVVGSVEVYEQQTSWPLILENSQVVVLWGMNPLNTLKIAWSSTDEQGLEYFHQLKKSGKPVIAIDPIRSETIEFFGDNATWIAPNMGTDVALMLGIAHTLMTQGKHDKVFLEKYTTGYPQFEEYLTGKSDNTPKSAAWAAEITGVPEAQIVKLAELMAANRTMLMAGWGIQRQQYGEQKHWMLVTLAAMLGQIGTPGGGFGFSYHYSNGGNPTRVGGVLPEMSAAIAGQASEAADDGGMTAIPVARIVDALENPGGKYQHNGKEQTYPNIKMIWWAGGGNFTHHQDTNRLIKAWQKPEMIVVSECYWTAAAKHADIVLPITTSFERNDLTMTGDYSNQHIVLMKQAVAPQFEARNDFDVFADLAELLKPGGKEIYTEGKDEMAWLKFFYDAAQKGARAQRVTMPMFNAFWQQNKLIEMRRSEKNEQYIRYGDFRADPVKNALGTPSGKIEIYSRTLEKFGYKDCPAHPTWLAPDEWKGTADEKQLQLLTAHPAHRLHSQLNYAELRKKYAVADREPITIHTEDAARFGIANGDLVRVWNKRGQILTGAVVTDGIKKGVVCVHEGAWPDLENGLCKNGSANVLTADIPSSQLANACAGNSALVYIEKYTGNALKLTAFDQPAVQA

SEQ ID NO: 2642 - protein, 809 aa, Escherichia coli
MTLTRREFIKHSGIAAGALVVTSAAPLPAWAEEKGGKILTAGRWGAMNVEVKDGKIVSSTGALAKTIPNSLQSTAADQVHTTARIQHPMVRKSYLDNPLQPAKGRGEDTYVQVSWEQALKLIHEQHDRIRKANGPSAIFAGSYGWRSSGVLHKAQTLLQRYMNLAGGYSGHSGDYSTGAAQVIMPHVVGSVEVYEQQTSWPLILENSQVVVLWGMNPLNTLKIAWSSTDEQGLEYFHQLKKSGKPVIAIDPIRSETIEFFDDNATWIAPNMGTDVALMLGIAHTLMTQGKHDKVFLEKYTTGYPQFEEYLTGKSDNTPKSAVWAAEITGVPEAQIVKLAELMAANRTMLMAGWGIQRQQYGEQKHWMLVTLAAMLGQIGTPGGGFGFSYHYSNGGNPTRVGGVLPEMSAAIAGHASEAADDGGMTAIPVARIVDALENPGGKYQHNGKEQTYPNIKMIWWAGGGNFTHHQDTNRLIKAWQKPEMIVVSECYWTAAAKHADIVLPITTSFERNDLTMTGDYSNQHIVPMKQAVAPQFEARNDFDVFADLAELLKPGGKEIYTEGKDEMAWLKFFYDAAQKGARAQRVTMPMFNAFWQQNKLIEMRHSEKNEQYVRYGDFRADPVKNALGTPSGKIEIYSKTLEKFGYKDCPAHPTWLAPDEWKGTADEKQLQLLTAHPAHRLHSQLNYAELRKKYAIADREPITIHTEDAARFGIANGDLVRVWNKRGQILTGAVVTDGIKKGVVCVHEGAWPDLENGLCKNGSANVLTADIPSSQLANACAGNSALVYIEKYTGNAPKLTAFDQPAVQA

SEQ ID NO: 2643 - protein, 168 aa, Escherichia coli
MSQTVHFQGNPVTVANSIPQAGSKAQTFTLVAKDLSDVTLGQFAGKRKVLNIFPSIDTGVCAASVRKFNQLATEIDNTVVLCISADLPFAQSRFCGAEGLNNVITLSTFRNAEFLQAYGVAIADGPLKGLAARAVVVIDENDNVIFSQLVDEITTEPDYEAALAVLKA

SEQ ID NO: 2644 - protein, 168 aa, Escherichia coli; identical to SEQ ID NO: 2643

SEQ ID NO: 2645 - protein, 168 aa, Escherichia coli; identical to SEQ ID NO: 2643

SEQ ID NO: 2646 - protein, 177 aa, Escherichia coli
MSRFQRLTKYVAIGGGAALLLAGAAYLAGAKVNTTKSIPVGLYWKSNAPVEKGAYVMFCPPQVGVFSDAKERGYIAGGFCPGDYGYMMKRVLAAKGDEVAITDAGVRVNGGLLPHSALIKADPSGRPLPRYQSDSYTLGTAEVLLMSDVSDTSFDGRYFGPVNRSQIITVIRPVLTW

SEQ ID NO: 2647 - protein, 178 aa, Escherichia coli
MSRILKRIAAGVVIAGVAALLLAAGGYAAGARVNTTKSIPVGLYWTSSAPVEKGAYVLFCPPQLGVFDDAKERGYIGAGFCQGGYGYMMKRVLAAKDDAVAVADDGVRVNGELLPLSAPIKADKAGRPLPRYQSNSYTLGNSEVLLMSDVSATSFDGRYFGPINRSQIKTVIRPVITW

SEQ ID NO: 2648 - protein, 247 aa, Escherichia coli
MNKALLPLLLCCFIFPASGKDAGWQWYNEKINPKEKENKPVPAAPRQEPDIMQKLAALQTATKRALYEAILYPGVDNFVKYFRLQNYWAQQAGLFTMSARKAMLAHPELDYNLQYSHYNGTVRNQLAADQAQQRQAIAKLAEHYGIMFFYRGQDPIDGQLAQVINGFRDTYGLSVIPVSVDGVINPLLPDSRTDQGQAQRLGVKYFPAMMLVDPKQGSVRPLSYGFISQDDLAKQFLNVSEDFKPNF

SEQ ID NO: 2649 - protein, 458 aa, Escherichia coli
MMPRIKPLLVLCAALLTVTPAASADVNSDMNQFFNKLGFASNTTQPGVWQGQAAGYAYGGSLYARTQVKNVQLISMTLPDINAGCGGIDAYLGSFSFINGEQLQRFVKQIMSNAAGYFFDLALQTTVPEIKTAKDFLQKMASDINSMNLSSCQAAQGIIGGLFPRTQVSQQKVCQDIAGESNIFADWAASRQGCTVGGKSDSVRDKASDKDKERVTKNINIMWNALSKNRMFDGNKELKEFVMTLTGSLVFGPNGEITPLSARTTDRSIIRAMMEGGTAKISHCNDSDKCLKVVADTPVTISRDNALKSQITKLLASIQNKAVSDTPLDDKEKGFISSTTIPVFKYLVDPQMLGVSNSMIYQLTDYIGYDILLQYIQELIQQARAMVATGNYDEAVIGHINDNMNDATRQIAAFQSQVQVQQDALLVVDRQMSYMRQQLSARMLSRYQNNYHFGGSTL

SEQ ID NO: 2650 - protein, 242 aa, Escherichia coli
MRKNNTAIIFGSLFFSCSVMAANGTLAPTVVPMVNGGQASIAISNTSPNLFTVPGDRIIAVNSLDGALTNNEQTASGGVVVATVNKKPFTFILETERGLNLSIQAVPREGAGRTIQLVSDLRGTGEEAGAWETSTPYESLLVTISQAVRGGKLPAGWYQVPVTKETLQAPAGLSSVADAVWTGNHLKMVRFAVENKTLSALNIRESDFWQPGTRAVMFSQPASQLLAGARMDVYVIRDGEGN

SEQ ID NO: 2651 - protein, 91 aa, Escherichia coli
MSGDENKLKKYRFPETLTNQSRWFGLPLDELIPAAICIGWGITTSKYLFGIGAAVLVYFGIKKLKKGRGSSWLRDLIYWYMPTALLRGIFS

SEQ ID NO: 2652 - protein, 602 aa, Escherichia coli
MKRILPLILALVAGMAQADSNSDYRAGSDFAHQIKGQGSSSIQGFKPQESIPGYNANPDETKYYGGVTAGGDGGLKNDGTTEWATGETGKTITESFMNKPKDILSPDAPFIQTGRDVVNRADSIVGNTGQQCSAQEISRSEYTNYTCERDLQVEQYCTRTARMELQGSTTWETRTLEYEMSQLPAREVNGQYVVSITSPVTGEIVDAHYSWSRTYLQKSVPMTITVLGTPLSWNAKYSADASFTPVQKTLTAGVAFTSSHPVRVGNTKFKRHTAMKLRLVVRVKKASYTPYVVWSESCPFSKELGKLTKTECTEAGGNRTLVKDGQSYSMYQSCWAYRDTYVTQSADKGTCQTYTDNPACTLVSHQCAFYSEEGACLHEYATYSCESKTSGKVMVCGGDVFCLDGECDKAQSGKSNDFAEAVSQLAALAAAGKDVAALNGVDVRAFTGQAKFCKKAAAGYSNCCKDSGWGQDIGLAKCSSDEKALAKAKSNKLTVSVGEFCSKKVLGVCLEKKRSYCQFDSKLAQIVQQQGRNGQLRISFGSAKHPDCRGITVDELQKIQFNRLDFTNFYEDLMNNQKIPDSGVLTQKVKEQIADQLKQAGQ

SEQ ID NO: 2653 - protein, 244 aa, Escherichia coli
MMKTKKLMMVALVSSTLALSGCGAMSTAIKKRNLEVKTQMSETIWLEPASERTVFLQIKNTSDKDMSGLQGKIADAVKAKGYQVVTSPDKAYYWIQANVLKADKMDLRESQGWLNRGYEGAAVGAALGAGITGYNSNSAGATLGVGLAAGLVGMAADAMVEDVNYTMITDVQIAERTKATVTTDNVAALRQGTSGAKIQTSTETGNQHKYQTRVVSNANKVNLKFEEAKPVLEDQLAKSIANIL

SEQ ID NO: 2654 - protein, 243 aa, Escherichia coli
MKMKKLMMVALVSSTLALSGCGAMSTAIKKRNLEVKTQMSETIWLEPASERTVFLQIKNTSDKDMSGLQGKIADAVKAKGYQVVTSPDKAYYWIQANVLKADKMDLRESQGWLNRGYEGAAVGAALGAGITGYNSNSAGATLGVGLAAGLVGMAADAMVEDVNYTMITDVQIAERTKATVTTDNVAALRQGTSGAKIQTSTETGNQHKYQTRVVSNANKVNLKFEEAKPVLEDQLAKSIANIL

SEQ ID NO: 2655 - protein, 245 aa, Escherichia coli
MKHNVKLMAMTAVLSSVLVLSGCGAMSTAIKKRNLEVKTQMSETIWLEPSSQKTVYLQIKNTSDKDMSGLQAKVTKAVQDKGYTITSSPDSAHYWIQANVLKADKMDLRTAQGFLSQGYEGAIAGAALGAGITGYNSSSAGATLGVGLAAGLVGMAADAMVEDINYTMVTDIQISEKTTASVQTDNVAALKQGTSGYKVQTSTQTGNQHKYQTRIVSSANKVNLKFEEAKPVLEDQLAKSVANIL

SEQ ID NO: 2656 - protein, 243 aa, Escherichia coli
MKTKKLMMVALVSSTLALSGCGAMSTAIKKRNLEVKTQMSETIWLEPASERTVFLQIKNTSDKDMSGLQGKIADAVKAKGYQVVTSPDKAYYWIQANVLKADKMDLRESQGWLNRGYEGAAVGAALGAGITGYNSSSAGATLGVGLAAGLVGMAADAMVEDVNYTMITDVQIAERTKATVTTDNVAALRQGTSGAKIQTSTETGNQHKYQTRVVSNANKVNLKFEEAKPVLEDQLAKSIANIL

SEQ ID NO: 2657 - protein, 330 aa, Escherichia coli
MKRRLWLLMLFLFAGHVPAASADSACEGRFVNPITDICWSCIFPLSLGSIKVSQGKVPDTANPSMPIQICPAPPPLFRRIGLAIGYWEPMALTDVTRSPGCMVNLGFSLPAFGKTAQGTAKKDEKQVNGAFYHVHWYKYPLTYWLNIITSLGCLEGGDMDIAYLSEIDPTWTDSSLTTILNPEAVIFANPIAQGACAADAIASAFNMPLDVLFWCAGSQGSMYPFNGWVSNESSPLQSSLLVSERMAFKLHRQGMIMETIGKNNAVCNEYPSPILPKERWRYQMVNMYPDSGQCHPFGRSVTRWETGKNPPNTKKNFGYLMWRKRNCVFL

SEQ ID NO: 2658 - protein, 171 aa, Escherichia coli
MKQTSFFIPLLGTLLLYGCAGTSTEFECNATTSDTCMTMEQANEKAKKLERSSEAKPVAASLPRLAEGNFRTMPVQTVTATTPSGSRPAVTAHPEQKLLAPRPLFTAAREVKTVVPVSSVTPVTPPRPLRTGEQTAALWIAPYIDNQDVYHQPSSVFFVIKPSAWGKPRIN

SEQ ID NO: 2659 - protein, 210 aa, Escherichia coli
MRCRGLIALLIWGQSVAAADLGTWGDLWPVKEPDMLTVIMQRLTALEQSGEMGRKMDAFKERVIRNSLRPPAVPGIGRTEKYGSRLFDPSVRLAADIRDNEGRVFARQGEVMNPLQYVPFNQTLYFINGDDPAQVAWMKRQTPPTLESKIILVQGSIPEMQKSLDSRVYFDQNGVLCQRLGIDQVPARVSAVPGDRFLKVEFIPAEEGRK

SEQ ID NO: 2660 - protein, 181 aa, Escherichia coli
MSLTKSLLFTLLLSAAAVQASTRDEIERLWNPQGMATQPAQPAAGTSARTAKPAPRWFRLSNGRQVNLADWKVVLFMQGHCPYCHQFDPVLKQLAQQYGFSVFSYTLDGQGDTAFPEALPVPPDVMQTFFPNIPVATPTTFLVNVNTLEALPLLQGATDAAGFMARVDTVLQMYGGKKGAK

SEQ ID NO: 2661 - protein, 212 aa, Escherichia coli
MKLSMKSLAALLMMLNGAVMASENVNTPENRQFLKQQENLSRQLREKPDHQLKAWAEKQVLENPLQRSDNHFLDELVRKQQASQDGKPRQGALYFVSFSIPEEGLKRMLGETRHFGIPATLRGMVNNDLKTTAEAVLSLVKDGATDGVQIDPTLFSQYGIRTVPALVVFCSQGYDIIRGNLRVGQALEKVAATGDCRQVAHDLLAGKGDSGK

SEQ ID NO: 2662 - protein, 565 aa, Escherichia coli
MKSPAPSRPQKMALIPACIFLCFAALSVQAEETPVTPQPPDILLGPLFNDVQNAKLFPDQKTFADAVPNSDPLMILADYRMQQNQSGFDLRHFVNVNFTLPKEGEKYVPPEGQSLREHIDGLWPVLTRSTENTEKWDSLLPLPEPYVVPGGRFREVYYWDSYFTMLGLAESGHWDKVADMVANFAHEIDTYGHIPNGNRSYYLSRSQPPFFAMMVELLAQHEGDAALKQYLPQMQKEYAYWMDGVENLQAGQQEKRVVKLQDGTLLNRYWDDRDTPRPESWVEDIATAKSNPNRPATEIYRDLRSAAASGWDFSSRWMDNPQQLNTLRTTSIVPVDLNSLMFKMEKILARASKAAGDNAMANQYETLANARQKGIEKYLWNDQQGWYADYDLKSHKVRNQLTAAALFPLYVNAAAKDRANKMATATKTHLLQPGGLNTTSVKSGQQWDAPNGWAPLQWVATEGLQNYGQKEVAMDISWHFLTNVQHTYDREKKLVEKYDVSTTGTGGGGGEYPLQDGFGWTNGVTLKMLDLICPKEQPCDNVPATRPTVKSATTQPSTKEAQPTP

SEQ ID NO: 2663 - protein, 565 aa, Escherichia coli
MKSPAPSRPQKMALIPACIFLCFAALSVQAEETSVTPQPPDILLGPLFNDVQNAKLFPDPKTFADAVPNSYPLMILADYRMQQNQSGFDLRHFVNVNFTLPKEGEKYVPPEGQSLREHIDGLWPVLTRSTENTEKWDSLLPLPKPYVVPGGRFREVYYWDSYFTMLGLAESGHWDKVADMVANFAHEIDTYGHIPNGNRSYYLSRSQPPFFALMVELLAQHEGDAALKQYLPQMQKEYAYWMDGVENLQAGQQEKRVVKLQDGTLLNRYWDDRDTPRPESWVEDIATAKSNPNRPATEIYRDLRSAAASGWDFSSRWMDNPQQLNTLRTTSIVPVDLNSLMFKMEKILSRASKAAGDNAMANQYETLANARQKGIEKYLWNDQQGWYADYDLKSHKVRNQLTAAALFPLYVNAAAKDRASKMATATKTHLLQPGGLNTTSVKSGQQWDAPNGWAPLQWVATEGLQNYGQKEVAMDISWHFLTNVQHTYDREKKLMEKYDVSTTGTGGGGGEYPLQDGFGWTNGVTLKMLDLICPKEQPCDNVPATRPLSESTTQPLKQKEAEPTP

SEQ ID NO: 2664 - protein, 565 aa, Escherichia coli
MKSPAPSRPQKMALIPACIFLCFAALSVQAEETSVTPQPPDILLGPLFNDVQNAKLFPDQKTFADAVPNSDPLMILADYRMQQNQSGFDLRHFVNVNFTLPKEGEKYVPPEGQSLREHIDGLWPVLTRSTENTEKWDSLLPLPKPYVVPGGRFREVYYWDSYFTMLGLAESGHWDKVADMVANFAHEIDNYGHIPNGNRSYYLSRSQPPFFALMVELLAQHEGDAALKQYLPQMQKEYAYWMDGVENLQAGQQEKRVVKLQDGTLLNRYWDDRDTPRPESWVEDIATAKSNPNRPATEIYRDLRSAAASGWDFSSRWMDNPQQLNTLRTTSIVPVDLNSLMFKMEKILARASKAIGDNAMANQYETLANARQKGIEKYLWNDQQGWYADYDLKSHKVRNQLTAAALFPLYVNAAAKDRASKMATATKTHLLQPGGLNTTSVKSGQQWDAPNGWAPLQWVATEGLQNYGQKEVAMDISWHFLTNVQHTYDREKKLVEKYDVSTTGTGGGGGEYPLQDGFGWTNGVTLKMLDLICPKEQPCDNVPATRPLSESTTQPLKQKEAEPTP

SEQ ID NO: 2665 - protein, 565 aa, Escherichia coli
MKSPAPSRPQKMALIPACIFLCFAALSVQAEETPVTPQPPDILLGPLFNDVQNAKLFPDQKTFADAMPNSDPLMILADYRMQQNQSGFDLRHFVNVNFTLPKEGEKYVPPEGQSLREHIDGLWPVLTRSTENTEKWDSLLPLPEPYVVPGGRFREVYYWDSYFTMLGLAESGHWDKVADMVANFAHEIDTYGHIPNGNRSYYLSRSQPPFFALMVELLAQHEGDAALKQYLPQMQKEYAYWMDGVENLQAGQQEKRVVKLQDGTLLNRYWDDRDTPRPESWVEDIATAKSNPNRPATEIYRDLRSAAASGWDFSSRWMDNPQQLNTLRTTSIVPVDLNSLMFKMEKILARASKAAGDNAMANQYETLANARQKGIEKYLWNDQQGWYADYDLKSHKVRNQLTAAALFPLYVNAAAKDRANKMATATKTHLLQPGGLNTTSVKSGQQWDAPNGWAPLQWVATEGLQNYGQKEVAMDISWHFLTNVQHTYDREKKLVEKYDVSTTGTGGGGGEYPLQDGFGWTNGVTLKMLDLICPKEQPCDNVPATRPTVKSATTQPSTKEAQPTP

SEQ ID NO: 2666 - protein, 561 aa, Escherichia coli
MKSPAPSRPQKMALIPACIFLCFAALSVQAEETPVTPQPPDILLGPLFNDVQNAKLFPDQKTFADAVPNSDPLMIRMQQNQSGFDLRHFVNVNFTLPKEGEKYVPPEGQSLREHIDGLWPVLTRSTENTEKWDSLLPLPEPYVVPGGRFREVYYWDSYFTMLGLAESGHWDKVADMVANFAHEIDTYGHIPNGNRSYYLSRSQPPFFALMVELLAQHEGDAALKQYLPQMQKEYAYWMDGVENLQAGQQEKRVVKLQDGTLLNRYWDDRDTPRPESWVEDIATAKSNPNRPATEIYRDLRSAAASGWDFSSRWMDNPQQLNTLRTTSIVPVDLNSLMFKMEKILARASKAAGDNAMANQYETLANARQKGIEKYLWNDQQGWYADYDLKSHKVRNQLTAAALFPLYVNAAAKDRANKMATATKTHLLQPGGLNTTSVKSGQQWDAPNGWAPLQWVATEGLQNYGQKEVAMDISWHFLTNVQHTYDREKKLVEKYDVSTTGTGGGGGEYPLQDGFGWTNGVTLKMLDLICPKEQPCDNVPATRPLSESTTQPVKQKEAEPTP

SEQ ID NO: 2667 - protein, 565 aa, Escherichia coli
MKSPTPSRPQKMALIPACIFLCFAALSVQAEETSVTPQPPDILLGPLFNDVQNAKLFPDQKTFADAVPNSDPLMILADYRMQQNQSGFDLRHFVNVNFTLPKEGEKYVPPEGQSLREHIDGLWPVLTRSTENTEKWDSLLPLPEPYVVPGGRFREVYYWDSYFTMLGLAESGHWDKVADMVANFAHEIDTYGHIPNGNRSYYLSRSQPPFFALMVELLAQHEGDAALKQYLPQMQKEYAYWMDGVENLQAGQQEKRVVKLQDGTLLNRYWDDRDTPRPESWVEDIATAKSNPNRPATEIYRDLRSAAASGWDFSSRWMDNPQQLNTLRTTSIVPVDLNSLMFKMEKILARASKAAGDNAMANQYETLANARQKGIEKYLWNDQQGWYADYDLKSHKVRNQLTAAALFPLYVNAAAKDRASKMATATKTHLLQPGGLNTTSVKSGQQWDAPNGWAPLQWVATEGLQNYGQKEVAMDISWHFLTNVQHTYDREKKLVEKYDVSATGTGGGGGEYPLQDGFGWTNGVTLKMLDLICPKEQPCDNVPATRPLSESTTQPLKQKEAEPTP

SEQ ID NO: 2668 - protein, 565 aa, Escherichia coli
MKSPAPSRPQKMALIPACIFLCFAALSVQAEETPVTPQPPDILLGPLFNDVQNAKLFPDQKTFADAVPNSDPLMILADYRMQQNQSGFDLRHFVNVNFTLPKEGEKYVPPEGQSLREHIDGLWPVLTRSTENTEKWDSLLPLPEPYVVPGGRFREVYYWDSYFTMLGLAESGHWDKVADMVANFAHEIDTYGHIPNGNRSYYLSRSQPPFFALMVELLAQHEGDAALKQYLPQMQKEYAYWMDGVENLQAGQQEKRVVKLQDGTLLNRYWDDRDTPRPESWVEDIATAKSNPNRPATEIYRDLRSAAASGWDFSSRWMDNQHQLNTLRTTSIVPVDLNSLMFKMEKILARASKAAGDNAMANQYETLANARQKGIEKYMWNDQQGWYADYDLKSHKVRNQLTAAALFPLYVNAAAKDRANKMATATKTHLLQPGGLNTTSVKSGQQWDAPNGWAPLQWVATEGLQNYGQKEVAMDISWHFLTNVQHTYDREKKLVEKYDVSTTGTGGGGGEYPLQDGFGWTNGVTLKMLDLICPKEQPCDNVPATRPTVKSATTQPSTKEAQPTP

SEQ ID NO: 2669 - protein, 565 aa, Escherichia coli
MKSPAPSRPQKMALIPACIFLCFAALSVQAEETPVTPQPPDILLGPLFNDVQNAKLFPDQKTFADAVPNSDPLMILADYRMQQNQSGFDLRHFVNVNFTLPKEGEKYVPPEGQSLREHIDGLWPVLTRSTENTEKWDSLLPLPEPYVVPGGRFREVYYWDSYFTMLGLAESGHWDKVADMVANFAHEIDTYGHIPNGNRSYYLSRSQPPFFALMVELLAQHEGDAALKQYLPQMQKEYAYWMDGVENLQAGQQEKRVVKLQDGTLLNRYWDDRDTPRPESWVEDIATAKSNPNRPATEIYRDLRSAAASGWDFSSRWMDNPQQLNTLRTTSIVPVDLNSLMFKMEKILARASKAAGDNAMANQYETLANARQKGIEKYLWNDQQGWYADYDLKSHKVRNQLTAAALFPLYVNAAAKDRANKMATATKTHLLQPGGLNTTSVKSGQQWDAPNGWAPLQWVATEGLQNYGQKEVAMDISWHFLTNVQHTYDREKKLVEKYDVSTTGTGGGGGEYPLQDGFGWTNGVTLKMLDLICPKEQPCDNVPATRPTVKSATTQPSTKEAQPTP

SEQ ID NO: 2670 - protein, 565 aa, Escherichia coli; identical to SEQ ID NO: 2669

SEQ ID NO: 2671 - protein, 565 aa, Escherichia coli; identical to SEQ ID NO: 2669

SEQ ID NO: 2672 - protein, 565 aa, Escherichia coli
MKSPAPSRPQKMALIPACIFLCFAALSVQAEETSVTPQPPDILLGPLFNDVQNAKLFPDQKTFADAVPNSDPLMILADYRIQQNQSGFDLRHFVNVNFTLPKEGEKYVPPEGQSLREHIDGLWPVLTRSTENTEKWDSLLPLPKPYVVPGGRFREVYYWDSYFTMLGLAESGHWDKVADMVANFAHEIDNYGHIPNGNRSYYLSRSQPPFFALMVELLAQHEGDAALKQYLPQMQKEYAYWMDGVENLQAGQQEKRVVKLQDGTLLNRYWDDRDTPRPESWVEDIATAKSNPNRPATEIYRDLRSAAASGWDFSSRWMDNPQQLNTLRTTSIVPVDLNSLMFKMEKILARASKAIGDNAMANQYETLANARQKGIEKYLWNDQQGWYADYDLKSHKVRNQLTAAALFPLYVNAAAKDRASKMATATKTHLLQPGGLNTTSVKSGQQWDAPNGWAPLQWVATEGLQNYGQKEVAMDISWHFLTNVQHTYDREKKLVEKYDVSTTGTGGGGGEYPLQDGFGWTNGVTLKMLDLICPKEQPCDNVPATRPLSESTTQPLKQKEAEPTP

SEQ ID NO: 2673 - protein, 565 aa, Escherichia coli
MKSPAPSRPQKMALIPACIFLCFAALSVQAEETSVTPQPPDILLGPLFNDVQNAKLFPDQKTFADAVPNSDPLMILADYRMQQNQSGFDLRHFVNVNFTLPKEGEKYVPPEGQSLREHIDGLWPVLTRSTENTEKWDSLLPLPKPYVVPGGRFREVYYWDSYFTMLGLAESGHWDKVADMVANFAHEIDTYGHIPNGNRSYYLSRSQPPFFALMVELLAQHEGDAALKQYLPQMQKEYAYWMDGVENLQAGQQEKRVVKLQDGTLLNRYWDDRDTPRPESWVEDIATAKSNPNRPATEIYRDLRSAAASGWDFSSRWMDNPQQLNTLRTTSIVPVDLNSLMFKMEKILSRASKAAGDNAMANQYETLANARQKGIEKYLWNDQQGWYADYDLKSHKVRNQLTAAALFPLYVNAAAKDRASKMATATKTHLLQPGGLNTTSVKSGQQWDAPNGWAPLQWVATEGLQNYGQKEVAMDISWHFLTNVQHTYDREKKLVEKYDVSTTGTGGGGGEYPLQDGFGWTNGVTLKMLDLICPKEQPCDNVPATRPLSESTTQPLKQKEAEPTP

SEQ ID NO: 2674 - protein, 565 aa, Escherichia coli
MKSPAPSRPQKMALIPACIFLCFAALSVQAEETSVTPQPPDILLGPLFNDVQNAKLFPDQKTFADAVPNSDPLMILADYRMQQNQSGFDLRHFVNVNFTLPKEGEKYVPPEGQSLREHIDGLWPVLTRSTENTEKWDSLLPLPKPYVVPGGRFREVYYWDSYFTMLGLAESGHWDKVADMVANFAHEIDTYGHIPNGNRSYYLSRSQPPFFALMVELLAQHEGDAALKQYLPQMQKEYAYWMDGVENLQAGQQEKRVVKLQDGTLLNRYWDDRDTPRPESWVEDIATAKSNPNRPATEIYRDLRSAAASGWDFSSRWMDNPQQLNTLRTTSIVPVDLNSLMFKMEKILARASKAAGDNAMANQYETLANARQKGIEKYLWNDQQGWYADYDLKSHKVRNQLTAAALFPLYVNAAAKDRASKMATATKTHLLQPGGLNTTSVKSGQQWDAPNGWAPLQWVATEGLQNYGQKEVAMDISWHFLTNVQHTYDREKKLVEKYDVSATGTGGGGGEYPLQDGFGWTNGVTLKMLDLICPKEQPCDNVPATRPLSESTTQPVKQKEAEPTP

SEQ ID NO: 2675 - protein, 565 aa, Escherichia coli; identical to SEQ ID NO: 2669

SEQ ID NO: 2676 - protein, 565 aa, Escherichia coli; identical to SEQ ID NO: 2669

SEQ ID NO: 2677 - protein, 565 aa, Escherichia coli
MKSPAPSRPQKMALIPACIFLCFAALSVQAEETSVTPQPPDILLGPLFNDVQNAKLFPDQKTFADAVPNSDPLMILADYRMQQNQSGFDLRHFVNVNFTLPKEGEKYVPPEGQSLREHIDGLWPVLTRSTENTEKWDSLLPLPEPYVVPGGRFREVYYWDSYFTMLGLAESGHWDKVADMVANFAHEIDTYGHIPNGNRSYYLSRSQPPFFALMVELLAQHEGDAALKQYLPQMQKEYAYWMDGVENLQAGQQEKRVVKLQDGTLLNRYWDDRDTPRPESWVEDIATAKSNPNRPATEIYRDLRSAAASGWDFSSRWMDNPQQLNTLRTTSIVPVDLNSLMFKMEKILARASKAAGDNAMANQYETLANARQKGIEKYLWNDQQGWYADYDLKSHKVRNQLTAAALFPLYVNAAAKDRASKMATATKTHLLQPGGLNTTSVKSGQQWDAPNGWAPLQWVATEGLQNYGQNEVAMDISWHFLTNVQHTYDREKKLVEKYDVSTTGTGGGGGEYPLQDGFGWTNGVTLKMLDLICPKEQPCDNVPATRPLSESTTQPVKQKEAEPTP

SEQ ID NO: 2678 - protein, 565 aa, Escherichia coli
MKSPAPSRPQKMALIPACIFLCFAALSVQAEETPVTPQPPDILLGPLFNDVQNAKLFPDQKTFADAVPNSDPLMILADYRMQQNQSGFDLRHFVNVNFTLPKEGEKYVPPEGQSLREHIDGLWPVLTRSTENTEKWDSLLPLPEPYVVPGGRFREVYYWDSYFTMLGLAESGHWDKVADMVANFAHEIDTYGHIPNGNRSYYLSRSQPPFFALMVELLAQHEGDAALKQYLPQMQKEYAYWMDGVENLQAGQQEKRVVKLQDGTLLNRYWDDRDTPRPESWVEDIATAKSNPNRPATEIYRDLRSAAASGWDFSSRWMDNPHQLNTLRTTSIVPVDLNSLMFKMEKILARASKAAGDNAMANQYETLANARQKGIEKYMWNDQQGWYADYDLKSHKVRNQLTAAALFPLYVNAAAKDRANKMATATKTHLLQPGGLNTTSVKSGQQWDAPNGWAPLQWVATEGLQNYGQKEVAMDISWHFLTNVQHTYDREKKLVEKYDVSTTGTGGGGGEYPLQDGFGWTNGVTLKMLDLICPKEQPCDNVPATRPTVKSATTQPSTKEAQPTP

SEQ ID NO: 2679 - protein, 565 aa, Escherichia coli
MKSPTPSRPQKMALIPACIFLCFAALSVQAEETSVTPQPPDILLGPLFNDVQNAKLFPDQKTFADAVPNSDPLMILADYRMQQNQSGFDLRHFVNVNFTLPKEGEKYVPPEGQSLREHIDGLWPVLTRATENTEKWDSLLPLPEPYVVPGGRFREVYYWDSYFTMLGLAESGHWDKVADMVANFAHEIDTYGHIPNGNRSYYLSRSQPPFFALMVELLAQHEGDAALKQYLPQMQKEYAYWMDGVENLQAGQQEKRVVKLQDGTLLNRYWDDRDTPRPESWVEDIATAKSNPNRPATEIYRDLRSAAASGWDFSSRWMDNPQQLNTLRTTSIVPVDLNSLMFKMEKILARASKAAGDNAMANQYETLANARQKGIEKYLWNDQQGWYADYDLKSHKVRNQLTAAALFPLYVNAAAKDRASKMATATKTHLLQPGGLNTTSVKSGQQWDAPNGWAPLQWVATEGLQNYGQKEVAMDISWHFLTNVQNTYDREKKLVEKYDVSATGTGGGGGEYPLQDGFGWTNGVTLKMLDLICPKEQPCDNVPATRPLSESTTQPLKQKEAEPTP

SEQ ID NO: 2680 - protein, 565 aa, Escherichia coli; identical to SEQ ID NO: 2664

SEQ ID NO: 2681 - protein, 1377 aa, Escherichia coli
MNRIYSLRYSAVARGFIAVSEFARKCVHKSVRRLCFPVLLLIPVLFSAGSLAGTVNNELGYQLFRDFAENKGMFRPGATNIAIYNKQGEFVGTLDKAAMPDFSAVDSEIGVATLINPQYIASVKHNGGYTNVSFGDGENRYNIVDRNNAPSLDFHAPRLDKLVTEVAPTAVTAQGAVAGAYLDKERYPVFYRLGSGTQYIKDSNGQLTQMGGAYSWLTGGTVGSLSSYQNGEMISTSSGLVFDYKLNGAMPIYGEAGDSGSPLFAFDTVQNKWVLVGVLTAGNGAGGRGNNWAVIPLDFIGQKFNEDNDAPVTFRTSEGGALEWSFNSSTGAGALTQGTTTYAMHGQQGNDLNAGKNLIFQGQNGQINLKDSVSQGAGSLTFRDNYTVTTSNGSTWTGAGIVVDNGVSVNWQVNGVKGDNLHKIGEGTLTVQGTGINEGGLKVGDGKVVLNQQADNKGQVQAFSSVNIASGRPTVVLTDERQVNPDTVSWGYRGGTLDVNGNSLTFHQLKAADYGAVLANNVDKRATITLDYALRADKVALNGWSESGKGTAGNLYKYNNPYTNTTDYFILKQSTYGYFPTDQSSNATWEFVGHSQGDAQKLVADRFNTAGYLFHGQLKGNLNVDNRLPEGVTGALVMDGAADISGTFTQENGRLTLQGHPVIHAYNTQSVADKLAASGDHSVLTQPTSFSQEDWENRSFTFDRLSLKNTDFGLGRNATLNTTIQADNSSVTLGDSRVFIDKNDGQGTAFTLEEGTSVATKDADKSVFNGTVNLDNQSVLNINDIFNGGIQANNSTVNISSDSAVLGNSTLTSTALNLNKGANALASQSFVSDGPVNISDAALSLNSRPDEVSHTLLPVYDYAGSWNLKGDDARLNVGPYSMLSGNINVQDKGTVTLGGEGELSPDLTLQNQMLYSLFNGYRNIWSGSLNAPDATVSMTDTQWSMNGNSTAGNMKLNRTIVGFNGGTSPFTTLTTDNLDAVQSAFVMRTDLNKADKLVINKSATGHDNSIWVNFLKKPSNKDTLDIPLVSAPEATADNLFRASTRVVGFSDVTPILSVRKEDGKKEWVLDGYQVARNDGQGKAAATFMHISYNNFITEVNNLNKRMGDLRDINGEAGTWVRLLNGSGSADGGFTDHYTLLQMGADRKHELGSMDLFTGVMATYTDTDASADLYSGKTKSWGGGFYASGLFRSGAYFDVIAKYIHNENKYDLNFAGAGKQNFRSHSLYAGAEVGYRYHLTDTTFVEPQAELVWGRLQGQTFNWNDSGMDVSMRRNSVNPLVGRTGVVSGKTFSGKDWSLTARAGLHYEFDLTDSADVHLKDAAGEHQINGRKDSRMLYGVGLNARFGDNTRLGLEVERSAFGKYNTDDAINANIRYSF

SEQ ID NO: 2682 - protein, 294 aa, Escherichia coli
MKKTLLAAGAVLALSSSFTVNAAENDKPQYLSDWWHQSVNVVGSYHTRFGPQIRNDTYLEYEAFAKKDWFDFYGYADAPVFFGGNSDAKGIWNHGSPLFMEIEPRFSIDKLTNTDLSFGPFKEWYFANNYIYDMGRNKDGRQSTWYMGLGTDIDTGLPMSLSMNVYAKYQWQNYGAANENEWDGYRFKIKYFVPITDLWGGQLSYIGFTNFDWGSDLGDDSGNAINGIKTRTNNSIASSHILALNYDHWHYSVVARYWHDGGQWNDDAELNFGNGNFNVRSTGWGGYLVVGYNF

SEQ ID NO: 2683 - protein, 294 aa, Escherichia coli; identical to SEQ ID NO: 2682

SEQ ID NO: 2684 - protein, 438 aa, Escherichia coli
MKPLHYTASALALGLALMGNAQAVTTIPFWHSMEGELGKEVDSLAQRFNAENPDYKIVPTYKGNYEQNLSAGIAAFRTGNAPAILQVYEVGTATMMASKAIKPVYDVFKEAGIQFDESQFVPTVSGYYSDSKTGHLLSQPFNSSTPVLYYNKDAFKKAGLDPEQPPKTWQDLADYAAKLKASGMKCGYASGWQGWIQLENFSAWNGLPFASKNNGFDGTDAVLEFNKPEQVKHIAMLEEMNKKGDFSYVGRKDESTEKFYNGDCAMTTASSGSLANIREYAKFNYGVGMMPYDADAKDAPQNAIIGGASLWVMQGKDKETYTGVAKFLDFLAKPENAAEWHQKTGYLPITKAAYDLTREQGFYEKNPGADTATRQMLNKPPLPFTKGLRLGNMPQIRVIVDEELESVWTGKKTPQQALDTAVERGNQLLRRFEKSTKS

SEQ ID NO: 2685 - protein, 438 aa, Escherichia coli
MKPLRYTASALALGLALMANAQAVTTIPFWHSMEGELGKEVDSLAQRFNAENPDYKIVPTYKGNYEQNLSAGIAAFRTGNAPAILQVYEVGTATMMASKAIKPVYDVFKEAGIQFDESQFVPTVSGYYSDSKTGHLLSQPFNSSTPVLYYNKDAFKKAGLDPKQPPKTWQDLADYAAKLKASGMKCGYASGWQGWIQLENFSAWNGLPFASKNNGFDGTDAVLEFNKPEQVKHIAMLEEMNKKGDFSYVGRKDESTEKFYNGDCAMTTASSGSLANIREYAKFNYGVGMMPYDADAKDAPQNAIIGGASLWVMQGKDKETYTGVAKFLDFLAKPENAAEWHQKTGYLPITKAAYDLTREQGFYEKNPGADIATRQMLNKPPLPFTKGLRLGNMPQIRVIVDEELESVWTGKKTPQQALDTAVERGNQLLRRFEKSTKS

SEQ ID NO: 2686 - protein, 438 aa, Escherichia coli
MKPLRYTASALALGLALMANAQAVTTIPFWHSMEGELGKEVDSLAQRFNAENPDYKIVPTYKGNYEQNLSAGIAAFRTGNAPAILQVYEVGTATMMASKAIKPVYDVFKEAGIQFDESQFVPTVSGYYSDSKTGHLLSQPFNSSTPVLYYNKDAFKKAGLDPEQPPKTWQDLADYAAKLKASGMKCGYASGWQGWIQLENFSAWNGLPFASKNNGFDGTDAVLEFNKPEQVKHIAMLEEMNKKGDFSYVGRKDESTEKFYNGDCAMTTASSGSLANIREYAKFNYGVGMMPYDADAKDAPQNAIIGGASLWVMQGKDKETYTGVAKFLDFLAKPENAAEWHQKTGYLPITKAAYDLTREQGFYEKNPGADIATRQMLNKPPLPFTKGLRLGNMPQIRVIVDEELESVWTGKKTPQQALDTAVERGNQLLRRFEKSTKS

SEQ ID NO: 2687 - protein, 438 aa, Escherichia coli; identical to SEQ ID NO: 2686

SEQ ID NO: 2688 - protein, 438 aa, Escherichia coli; identical to SEQ ID NO: 2684

SEQ ID NO: 2689 - protein, 438 aa, Escherichia coli; identical to SEQ ID NO: 2686

SEQ ID NO: 2690 - protein, 421 aa, Escherichia coli
MRKIVAMAVICLTAASGLTSAYAAQLADDEAGLRIRLKNELRRADKPSAGAGRDIYAWVQGGLLDFNSGYYSNIIGVEGGAYYVYKLGARADMSTRWYLDGDKSFGFALGAVKIKPSENSLLKLGRFGTDYSYGSLPYRIPLMAGSSQRTLPTVSEGALGYWALTPNIDLWGMWRSRVFLWTDSTTGIRDEGVYNSQTGKYDKHRARSFLAASWHDDTSRYSLGASVQKDVSNQIQSILEKSIPLDPNYTLKGELLGFYAQLEGLSRNTSQPNETALVSGQLTWNAPWGSVFGSGGYLRHAMNGAVVDTDIGYPFSLSLDRNREGMQSWQLGVNYRLTPQFTLTFAPIVTRGYESSKRDVRIEGTGILGGMNYRVSEGPLQGMNFFLAADKGREKRDGSTLGDRLNYWDVKMSIQYDFMLK

SEQ ID NO: 2691 - protein, 550 aa, Escherichia coli
MKLLQRGVALALLTTFTLASETALAYEQDKTYKITVLHTNDHHGHFWRNEYGEYGLAAQKTLVDGIRKEVAAEGGSVLLLSGGDINTGVPESDLQDAEPDFRGMNLVGYDAMAIGNHEFDNPLTVLRQQEKWAKFPLLSANIYQKSTGERLFKPWALFKRQDLKIAVIGLTTDDTAKIGNPEYFTDIEFRKPADEAKLVIQELQQTEKPDIIIAATHMGHYDNGEHGSNAPGDVEMARALPAGSLAMIVGGHSQDPVCMAAENKKQVDYVPGTPCKPDQQNGIWIVQAHEWGKYVGRADFEFRNGEMKMVNYQLIPVNLKKKVTWEDGKSERVLYTPEIAENQQMISLLSPFQNKGKAQLEVKIGETNGRLEGDRDKVRFVQTNMGRLILAAQMDRTGADFAVMSGGGIRDSIEAGDISYKNVLKVQPFGNVVVYADMTGKEVIDYLTAVAQMKPDSGAYPQFANVSFVAKDGKLNDLKIKGEPVDPAKTYRMATLNFNATGGDGYPRLDNKPGYVNTGFIDAEVLKAYIQKSSPLDVSVYEPKGEVSWQ

SEQ ID NO: 2692 - protein, 379 aa, Escherichia coli
MMKSKMKLMPLLVSVTLISGCTVLPGSNMSTMGKDVIKQQDADFDLDKMVNVYPLTPRLIDQLRPRPNVARPNMTLESEIANYQYRVGPGDVLNVTVWDHPELTTPAGQYRSSSDTGNWVQPDGTMFYPYIGKVHVVGKTLAEIRSDITGRLATYIADPQVDVNIAAFRSQKAYISGQVNKSGQQAITNVPLTILDAINAAGGLTDTADWRNVVLTHNGREERISLQALMQNGDLNQNRLLYPGDILYVPRNDDLKVFVMGEVKKQSTLKMDFSGMTLTEALGNAEGIDMTTSNASGIFVIRPLKGEGGRNGKIANIYQLDMSDATSLVMATEFRLQPYDVVYVTTAPVSRWNRLINQLLPTISGVRYMTDTASDIHNW

SEQ ID NO: 2693 - protein, 379 aa, Escherichia coli; identical to SEQ ID NO: 2692

SEQ ID NO: 2694 - protein, 330 aa, Escherichia coli
MKIKNILLTLCTSLLLTNVAAHAKEVKIGMAIDDLRLERWQKDRDIFVKKAESLGAKVFVQSANGNEETQMSQIENMINRGVDVLVIIPYNGQVLSNVVKEAKQEGIKVLAYDRMINDADIDFYISFDNEKVGELQAKALVDIVPQGNYFLMGGSPVDNNAKLFRAGQMKVLKPYVDSGKIKVVGDQWVDGWLPENALKIMENALTANNNKIDAVVASNDATAGGAIQALSAQGLSGKVAISGQDADLAGIKRIAAGTQTMTVYKPITLLANTAAEIAVELGNGQEPKADTTLNNGLKDVPSRLLTPIDVNKNNIKDTVIKDGFHKESEL

SEQ ID NO: 2695 - protein, 91 aa, Escherichia coli
MKIISKMLVGALALAVTNVYAAELMTKAEFEKVESQYEKIGDISTSNEMSTADAKEDLIKKADEKGADVLVLTSGQTDNKIHGTANIYKKK

SEQ ID NO: 2696 - protein, 183 aa, Escherichia coli
MKTLIVSTVLAFITFSAQAAAFQVTSNEIKTGEQLTTSHVFSGFGCEGGNTSPSLTWSGVPEGTKSFAVTVYDPDAPTGSGWWHWTVVNIPATVTYLPVDAGRRDGTKLPTGAVQGRNDFGYAGFGGACPPKGDKPHHYQFKVWALKTEKIPVDSNSSGALVGYMLNANKIATAEITPVYEIK

SEQ ID NO: 2697 - protein, 242 aa, Escherichia coli
MTFIKGLPLMLLTISLGCNAAVQPDRTRIVFNANDKATSLRIENQSDKLPYLAYSWIENEKGEKSDALLVALPPIQRLEPKATSQVRVVKQASTTQLPGDRETLFFYNMREIPPAPDKSSDHAILQVAIQSRIKLFWRPAALRKKAGEKVELQLQVSQQGNQLTLKNPTAYYLTIAYLGRNEKGVLPGFKTVMVAPFSTVNTNTGSYSGSQFYLGYMDDYGALRMTTLNCSGQCRLQAVEAK

SEQ ID NO: 2698 - protein, 815 aa, Escherichia coli
MNIYRLSFVSCLVMAMPCAMAVEFNLNVLDKSMRDRIDISLLKEKGVIAPGEYFVSVAVNNNKISNGQKINWQKKGDKTIPCINDSLVDKFGLKPDIRQSLPQIDRCIDFSSRPEMLFNFDQANQQLNISIPQAWLAWHSENWAPPSTWKEGVAGVLMDYNLFASSYRPQDGSSSTNLNAYGTAGINAGAWRLRSDYQLNKTDSEDNHDQSGGISRTYLFRPLPQLGSKLTLGETDFSSNIFDGFSYTGAALASDDRMLPWELRGYAPQISGIAQTNATVTISQSGRVIYQKKVPPGPFIIDDLNQSVQGTLDVKVTEEDGRVNNFQVSAASTPFLTRQGQVRYKLAAGQPRPSMSHQTENETFFSNEVSWGMLSNTSLYGGLLISDDDYHSAAMGIGQNMLWLGALSFDVTWASSHFDTQQDERGLSYRFNYSKQVDATNSTISLAAYRFSDRHFHSYANYLDHKYNDSDAQDEKQTISLSVGQPITPLNLNLYANLLHQTWWNADASTTANITAGFNVDIGDWRDISISTSFNTTHYEDKDRDNQIYLSISLPFGNGGRVGYDMQNSSHSTIHRMSWNDTLDERNSWGMSAGLQSDRPDNGAQVSGNYQHLSSAGEWDISGTYAASDYSSVSSSWSGSFTATQYGAAFHRRSSTNEPRLMVSTDGVADIPVQGNLDYTNHFGIAVVPLISSYQPSTVAVNMNDLPDGVTVAENVIKETWIEGAIGYKSLASRSGKDVNVIIRNASGQFPPLGADIRQDDSGISVGMVGEEGHAWLSGVAENQLFTVVWGEQSCIIHLPERLEDTTKRLILPCH

SEQ ID NO: 2699 - protein, 427 aa, Escherichia coli
MNTFSVSRLALALAFGVTLTACSSTPPDQRPSDQTAPGTSSRPILSAKEAQNFDAQHYFASLTPGAAAWNPSPITLPAQPDFVVGPAGTQGVTHTTIQAAVDAAIIKRTNKRQYIAVMPGEYQGTVYVPAAPGGITLYGTGEKPIDVKIGLSLDGGMSPADWRHDVNPRGKYMPGKPAWYMYDSCQSKRSDSIGVLCSAVFWSQNNGLQLQNLTIENTLGDSVDAGNHPAVALRTDGDQVQINNVNILGRQNTFFVTNSGVQNRLETNRQPRTLVTNSYIEGDVDIVSGRGAVVFDNTEFRVVNSRTQQEAYVFAPATLSNIYYGFLAVNSRFNAFGDGVAQLGRSLDVDANTNGQVVIRDSAINEGFNTAKPWADAVISNRPFAGNTGSVDDNDEIQRNLNDTNYNRMWEYNNRGVGSKVVAEAKK

SEQ ID NO: 2700 - protein, 331 aa, Escherichia coli
MKKPVVIGLAVVVLAAVVAGGYWWYQSRQDNGLTLYGNVDIRTVNLSFRVGGRVESLAVDEGDAIKAGQVLGELDHKPYEIALMQAKAGVSVAQAQYDLMLAGYRDEEIAQAAAAVKQAQAAYDYAQNFYNRQQGLWKSRTISANDLENARSSRDQAQATLKSAQDKLRQYRSGNREQDIAQAKASLEQAQAQLAQAELNLQDSTLIAPSDGTLLTRAVEPGTVLNEGGTVFTVSLTRPVWVRAYVDERNLDQAQPGRKVLLYTDGRPDKPYHGQIGFVSPTAEFTPKTVETPDLRTDLVYRLRIVVTDADDALRQGMPVTVQFGNEAGHE

SEQ ID NO: 2701 - protein, 332 aa, Escherichia coli
MMKKPVVIGLAVVVLAAVVAGGYWWYQSRQDNGLTLYGNVDIRTVNLSFRVGGRVESLAVDEGDAIKAGQVLGELDHKPYEIALMQAKAGVSVAQAQYDLMLAGYRDEEIAQAAAAVKQAQAAYDYAQNFYNRQQGLWKSRTISANDLENARSSRDQAQATLKSAQDKLRQYRSGNREQDIAQAKASLEQAQAQLAQAELNLQDSTLIAPSDGTLLTRAVEPGTVLNEGGTVFTVSLTRPVWVRAYVDERNLDQAQPGRKVLLYTDGRPDKPYHGQIGFVSPTAEFTPKTVETPDLRTDLVYRLRIVVTDADDALRQGMPVTVQFGDEAGHE

SEQ ID NO: 2702 - protein, 332 aa, Escherichia coli
MMKKPVVIGLAVVVLAAVVAGGYWWYQSRQDNGLTLYGNVDIRTVNLSFRVGGRVESLAVDEGDAIKAGQVLGELDHKPYEIALMQAKAGVSVAQAQYDLMLAGYRDEEIAQAAAAVKQAQAAYDYAQNFYNRQQGLWKSRTISANDLENARSSRDQAQATLKSAQDKLRQYRSGNREQDIAQAKASLEQAQAQLAQAELNLQDSTLIAPSDGTLLTRAVEPGTVLNEGGTVFTVSLTRPVWVRAYVDERNLDQAQPGRKVLLYTDGRPNKPYHGQIGFVSPTAEFTPKTVETPDLRTDLVYRLRIVVTDADDALRQGMPVTVQFGDEAGHE

SEQ ID NO: 2703 - protein, 332 aa, Escherichia coli
MMKKPVVIGLAVVVLAAVVAGGYWWYQSRQDNGLTLYGNVDIRTVNLSFRVGGRVESLAVDEGDAIKAGQVLGELDHKPYEIALMQAKAGVSVAQAQYDLMLAGYRDEEIAQAAAAVKQAQAAYDYAQNFYNRQQGLWKSRTISANDLENARSSRDQAQATLKSAQDKLRQYRSGNREQDIAQAKASLEQAQAQLAQAELNLQDSTLIAPSDGTLLTRAVEPGTVLNEGGTVFTVSLTRPVWVRAYVDERNLDQAQPGRKVLLYTDGRPDKPYHGQIGFVSPTAEFTPKTVETPDLRTDLVYRLRIVVTDADDALRQGMPVTVQFGNEAGHE

SEQ ID NO: 2704 - protein, 332 aa, Escherichia coli; identical to SEQ ID NO: 2701

SEQ ID NO: 2705 - protein, 331 aa, Escherichia coli
MKKPVVIGLAVVVLAAVVAGGYWWYQSRQDNGLTLYGNVDIRTVNLSFRVGGRVESLAVDEGDAIKAGQVLGELDHKPYEIALMQAKAGVSVAQAQYDLMLAGYRDEEIAQAAAAVKQAQAAYDYAQNFYNRQQGLWKSRTISANDLENARSSRDQAQATLKSAQDKLRQYRSGNREQDIAQAKASLEQAQAQLAQAELNLQDSTLIAPSDGTLLTRAVEPGTVLNEGGTVFTVSLTRPVWVRAYVDERNLDQAQPGRKVLLYTDGRPDKPYHGQIGFVSPTAEFTPKTVETPDLRTDLVYRLRIVVTDADDALRQGMPVTVQFGDEAGHE

SEQ ID NO: 2706 - protein, 332 aa, Escherichia coli; identical to SEQ ID NO: 2701

SEQ ID NO: 2707 - protein, 332 aa, Escherichia coli; identical to SEQ ID NO: 2702

SEQ ID NO: 2708 - protein, 332 aa, Escherichia coli; identical to SEQ ID NO: 2703

SEQ ID NO: 2709 - protein, 332 aa, Escherichia coli
MMKKPVVIGLAVVVLAAVVAGGYWWYQSRQDNGLTLYGNVDIRTVNLSFRVGGRVESLAVDEGDAIKAGQVLGELDHKPYEIALMQAKAGVSVAQAQYDLMLAGYRNEEIAQAAAAVKQAQAAYDYAQNFYNRQQGLWKSRTISANDLENARSSRDQAQATLKSAQDKLRQYRSGNREQDIAQAKASLEQAQAQLAQAELNLQDSTLIAPSDGTLLTRAVEPGTVLNEGGTVFTVSLTRPVWVRAYVDERNLDQAQPGRKVLLYTDGRPDKPYHGQIGFVSPTAEFTPKTVETPDLRTDLVYRLRIVVTDADDALRQGMPVTVQFGDEAGHE

SEQ ID NO: 2710 - protein, 332 aa, Escherichia coli; identical to SEQ ID NO: 2709

SEQ ID NO: 2711 - protein, 331 aa, Escherichia coli; identical to SEQ ID NO: 2705

SEQ ID NO: 2712 - protein, 332 aa, Escherichia coli; identical to SEQ ID NO: 2702

SEQ ID NO: 2713 - protein, 331 aa, Escherichia coli
MKKPVVIGLAVVVLAAVVAGGYWWYQSRQDNGLTLYGNVDIRTVNLSFRVGGRVESLAVDEGDAIKAGQVLGELDHKPYEIALMQAKAGVSVAQAQYDLMLAGYRDEEIAQAAAAVKQAQAAYDYAQNFYNRQQGLWKSRTISANDLENARSSRDQAQATLKSAQDKLRQYRSGNREQDIAQAKASLEQAQAQLAQAELNLQDSTLVAPSDGTLLTRAVEPGTVLNEGGTVFTVSLTRPVWVRAYVDERNLDQAQPGRKVLLYTDGRPNKPYHGQIGFVSPTAEFTPKTVETPDLRTDLVYRLRIVVTDADDALRQGMPVTVQFGDEAGHE

SEQ ID NO: 2714 - protein, 332 aa, Escherichia coli
MMKKPVVIGLAVVVLAAVVAGGYWWYQSRQDNGLTLYGNVDIRTVNLSFRVGGRVESLAVDEGDAIKAGQVLGELDHKPYEIALMQAKAGVSVAQAQYDLMLAGYRDEEIAQAAAAVKQAQAAYDYAQNFYNRQQGLWKSRTISANDLENARSSRDQAQATLKSAQDKLRQYRSGNREQDIAQAKASLEQAQAQLAQAELNLQDSTLVAPSDGTLLTRAVEPGTVLNEGGTVFTVSLTRPVWVRAYVDERNLDQAQPGRKVLLYTDGRPNKPYHGQIGFVSPTAEFTPKTVETPDLRTDLVYRLRIVVTDADDALRQGMPVTVQFGDEAGHE

SEQ ID NO: 2715 - protein, 331 aa, Escherichia coli; identical to SEQ ID NO: 2705

SEQ ID NO: 2716 - protein, 332 aa, Escherichia coli; identical to SEQ ID NO: 2709

SEQ ID NO: 2717 - protein, 332 aa, Escherichia coli; identical to SEQ ID NO: 2701

SEQ ID NO: 2718 - protein, 332 aa, Escherichia coli; identical to SEQ ID NO: 2703

SEQ ID NO: 2719 - protein, 331 aa, Escherichia coli; identical to SEQ ID NO: 2705

SEQ ID NO: 2720 - protein, 332 aa, Escherichia coli
MMKKPVVIGLAVVVLAAVVAGGYWWYQSRQDNGLTLYGNVDIRTVNLSFRVGGRVESLAVDEGDAIKAGQVLGELDHNPYEIALMQAKAGVSVAQAQYDLMLAGYRDEEIAQAAAAVKQAQAAYDYAQNFYNRQQGLWKSRTISANDLENARSSRDQAQATLKSAQDKLRQYRSGNREQDIAQAKASLEQAQAQLAQAELNLQDSTLIAPSDGTLLTRAVEPGTVLNEGGTVFTVSLTRPVWVRAYVDERNLDQAQPGRKVLLYTDGRPNKPYHGQIGFVSPTAEFTPKTVETPDLRTDLVYRLRIVVTDADDALRQGMPVTVQFGDEAGHE

SEQ ID NO: 2721 - protein, 86 aa, Escherichia coli
MKTINTVVAAMALSTLSFGVFAAEPVTASQAQNMNKIGVVSADGASTLDALEAKLAEKAAAAGASGYSITSATNNNKLSGTAVIYK

SEQ ID NO: 2722 - protein, 86 aa, Escherichia coli; identical to SEQ ID NO: 2721

SEQ ID NO: 2723 - protein, 306 aa, Escherichia coli
MNMKLKTLFAAAFAVVGFCSTASAVTYPLPTDGSRLVGQNQVITIPEGNTQPLEYFAAEYQMGLSNMMEANPGVDTFLPKGGTVLNIPQQLILPDTVHEGIVINSAEMRLYYYPKGTNTVIVLPIGIGQLGKDTPINWTTKVERKKAGPTWTPTAKMHAEYRAAGEPLPAVVPAGPDNPMGLYALYIGRLYAIHGTNANFGIGLRVSHGCVRLRNEDIKFLFEKVPVGTRVQFIDEPVKATTEPDGSRYIEVHNPLSTTEAQFEGQEIVPITLTKSVQTVTGQPDVDQVVLDEAIKNRSGMPVRLN

SEQ ID NO: 2724 - protein, 306 aa, Escherichia coli; identical to SEQ ID NO: 2723

SEQ ID NO: 2725 - protein, 306 aa, Escherichia coli; identical to SEQ ID NO: 2723

SEQ ID NO: 2726 - protein, 236 aa, Escherichia coli
MTNTWNRLALLIFAVLSLLVAGELQAGVVVGGTRFIFPADRESISILLTNTSQESWLINSKINRPTRWAGGEASTVPAPLLAAPPLILLKPGTTGTLRLLRTESDILPVDRETLFELSIASVPSGKVENQSVKVAMRSVFKLFWRPEGLPGDPLEAYQQLRWTRNSQGVQLTNPTPYYINLIQVSVNGKALSNVGVVPPKSQRQTSWCQAIAPCHVAWRAINDYGGLSAKKEQNLP

SEQ ID NO: 2727 - protein, 191 aa, Escherichia coli
MKKSLLGLTFASLMFSAGSAVAADYKIDKEGQHAFVNFRIQHLGYSWLYGTFKDFDGTFTFDEKNPAADKVNVTINTTSVDTNHAERDKHLRSADFLNTAKYPQATFTSTSVKKDGDELDITGDLTLNGVTKPVTLEAKLIGQGDDPWGGKRAGFEAEGKIKLKDFNIKTDLGPASQEVDLIISVEGVQQK

SEQ ID NO: 2728 - protein, 191 aa, Escherichia coli
MKKSLLGLTFASLMFSAGSAVAADYKIDKEGQHAFVNFRIQHLGYSWLYGTFKDFDGTFTFDEKNPAADKVNVTINTTSVDTNHTERDKHLRSADFLNTAKYPQATFTSTSVKKDGDELDITGDLTLNGVTKPVTLEAKLIGQGDDPWGGKRAGFEAEGKIKLKDFNIKTDLGPASQEVDLIISVEGVQQK

SEQ ID NO: 2729 - protein, 191 aa, Escherichia coli; identical to SEQ ID NO: 2727

SEQ ID NO: 2730 - protein, 191 aa, Escherichia coli
MKKSLLGLTFASLMFSAGSAVAADYKIDKEGQHAFVNFRIQHLGYSWLYGTFKDFDGTFTFDEKNPAADKVNVTINTTSVDTNHAERDKHLRSADFLNTAKYPQATFTSTSVKKDGDDLDITGDLTLNGVTKPVTLEAKLIGQGDDPWGGKRAGFEAEGKIKLKDFNIKTDLGPASQEVDLIISVEGVQQK

SEQ ID NO: 2731 - protein, 320 aa, Escherichia coli
MMIKTRFSRWLTFFTFAAAVALALPAKANTWPLPPAGSRLVGENKFHVVENDGGSLEAIAKKYNVGFLALLQANPGVDPYVPRAGSVLTIPLQTLLPDAPREGIVINIAELRLYYYPPGKNSVTVYPIGIGQLGGDTLTPTMVTTVSDKRANPTWTPTANIRARYKAQGIELPAVVPAGLDNPMGHHAIRLAAYGGVYLLHGTNADFGIGMRVSSGCIRLRDDDIKTLFSQVTPGTKVNIINTPIKVSAEPNGARLVEVHQPLSEKIDDDPQLLPITLNSAMQSFKDAAQTDAEVMQHVMDVRSGMPVDVRRHQVSPQTL

SEQ ID NO: 2732 - protein, 464 aa, Escherichia coli
MSRFVPRIIPFYLLLLVAGGTANAQSTFEQKAANPFDNNNDGLPDLGMAPENHDGEKHFAEIVKDFGETSMNDNGLDTGEQAKAFALGKVRDALSQQVNQHVESWLSPWGNASVDVKVDNEGHFTGSRGSWFVPLQDNDRYLTWSQLGLTQQDNGLVSNVGVGQRWARGNWLVGYNTFYDNLLDENLQRAGFGAEAWGEYLRLSANFYQPFAAWHEQTATQEQRMARGYDLTARMRMPFYQHLNTSVSLEQYFGDRVDLFNSGTGYHNPVALSLGLNYTPVPLVTVTAQHKQGESGENQNNLGLNLNYRFGVPLKKQLSAGEVAESQSLRGSRYDNPQRNNLPTLEYRQRKTLTVFLATPPWDLKPGETVPLKLQIRSRYGIRQLIWQGDTQILSLTPGAQANSAEGWTLIMPDWQNGEGASNHWRLSVVVEDNQGQRVSSNEITLTLVEPFDALSNDELRWEP

SEQ ID NO: 2733 - protein, 430 aa, Escherichia coli
MIKSKIVLLSALVSCALISGCKEENKTNVSIEFMHSSVEQERQAVISKLIARFEKENPGITVKQVPVEEDAYNTKVITLSRSGSLPEVIETSHDYAKVMDKEQLIDRKAVATVISNVGEGAFYDGVLRIVRTEDGSAWTGVPVSAWIGGIWYRKDVLAKAGLEEPKNWQQLLDVAQKLNDPANKKYGIALPTAESVLTEQSFSQFALSNQANVFNAEGKITLDTPEMMQALTYYRDLTANTMPGSNDIMEVKDAFMNGTAPMAIYSTYILPAVIKEGDPKNVGFVVPTEKNSAVYGMLTSLTITAGQKTEETEAAEKFVTFMEQADNIADWVMMSPGAALPVNKAVVTTATWKDNDVIKALGELPNQLIGELPNIQVFGAVGDKNFTRMGDVTGSGVVSSMVHNVTVGKADLSTTLQASQKKLDELIEQH

SEQ ID NO: 2734 - protein, 381 aa, Escherichia coli [sequence omitted]

SEQ ID NO: 2735 - protein, 118 aa, Escherichia coli [sequence omitted]

SEQ ID NO: 2736 - protein, 118 aa, Escherichia coli [sequence omitted]

SEQ ID NO: 2737 - protein, 118 aa, Escherichia coli
MKKRGAFLGLLLVSACASVFAANNETSKSVTFPKCEDLDAAGIAASVKRDYQQNRVARWADDQKIVGQADPVAWVSLQDIQGKDDKWSVPLTVRGKSADIHYQVSVDCKAGMAEYQRR

SEQ ID NO: 2738 - protein, 397 aa, Escherichia coli
  MOD_RES (222)..(222): Any amino acid
MKRKVLAMLVPALLVAGAANAAEVYNKDGNKLDLYGKVVGLHYFSDDSGSDGDMSYARIGFKGETQIADQFTGYGQWEFNIGANGPESDKGNTATRLAFAGLGFGQNGTFDYGRNYGVVYDVEAWTDMLPEFGGDTYAGADNFMNGRANGVATYRNNGFFGLVDGLNFALQYQGNNESGGPFGQEGSGSGDGRSLSKENGDGFGMSTSYDFDFGLSLGAAYXNSDRSDRQVGVGLNDRNHSNRNAGGETAEAWTVGAKYDANNVYLAAMYAETRNMTPYGGGEFDNGESRSAIANKTQNFEVVAQYQFDFGLRPSIAYLQSKGKDLGGWAHDGNGDPRYTNKDLVKYVDIGATYYFNKNMSTYVDYKINLLDNDDDFYEANGIATDDIVAVGLVYQF

SEQ ID NO: 2739 - protein, 334 aa, Escherichia coli
MKKKQFLKESDVTAESVFFMKRRQVLKALGISAAALSLPHAAHADLLSWFKGNDRPPAPAGKPLEFSKPAAWQNNLPLTPVDKVSGYNNFYEFGLDKADPAANAGSLKTDPWTLKISGEVAKPLTLDHDDLTRRFPLEERIYRMRCVEAWSMVVPWIGFPLHKLLALAEPTSNAKYVAFETIYAPEQMPGQQDRFIGGGLKYPYVEGLRLDEAMHPLTLMTVGVYGKALPPQNGAPVRLIVPWKYGFKGIKSIVSIKLTRERPPTTWNLAAPDEYGFYANVNPHVDHPRWSQATERFIGSGGILDVQRQPTLLFNGYADQVASLYRGLDLRENF

SEQ ID NO: 2740 - protein, 334 aa, Escherichia coli
MKKNQFLKESDVTAESVFFMKRRQVLKALGISAAALSLPHAAHADLLSWFKGNDRPPAPAGKPLEFSKPAAWQNNLPLTPADKVSGYNNFYEFGLDKADPAANAGSLKTDPWTLKISGEVAKPLTLDHDDLTRRFPLEERIYRMRCVEAWSMVVPWIGFPLHKLLALAEPTSNAKYVAFETIYAPEQMPGQQDRFIGGGLKYPYVEGLRLDEAMHPLTLMTVGVYGKALPPQNGAPVRLIVPWKYGFKGIKSIVSIKLTSERPPTTWNLAAPDEYGFYANVNPHVDHPRWSQATERFIGSGGILDVQRQPTLLFNGYADQVASLYRGLDLRENF

SEQ ID NO: 2741 - protein, 334 aa, Escherichia coli
MKKNQFLKESDVTAESVFFMKRRQVLKALGISAAALSLPHAAHADLLSWFKGNDRPPAPAGKALEFSKPAAWQNNLPLTPADKVSGYNNFYEFGLDKADPAANAGSLKTDPWTLKISGEVAKPLTLDHDDLTRRFPLEERIYRMRCVEAWSMVVPWIGFPLHKLLALAEPTSNAKYVAFETIYAPEQMPGQQDRFIGGGLKYPYVEGLRLDEAMHPLTLMTVGVYGKALPPQNGAPVRLIVPWKYGFKGIKSIVSIKLTRERPPTTWNLAAPDEYGFYANVNPHVDHPRWSQATERFIGSGGILNVQRQPTLLFNGYAEQVASLYRGLDLRENF

SEQ ID NO: 2742 - protein, 334 aa, Escherichia coli
MKKNQFLKESDVTAESVFFMTRRQVLKALGISAAALSLPHAAHADLLSWFKGNDRPPAPAGKPLEFSKPAAWQNDLPLTPADKVSGYNNFYEFGLDKADPAANAGSLKTDPWTLKISGEVAKPLTLDHDDLTRRFPLEERIYRMRCVEAWSMVVPWIGFPLHKLLALAEPTSNAKYVAFETIYAPEQMPGQQDRFIGGGLKYPYVEGLRLDEAMHPLTLMTVGVYGKALPPQNGAPVRLIVPWKYGFKGIKSIVSIKLTRERPPTTWNLAAPDEYGFYANVNPHVDHPRWSQATERFIGSGGILDVQRQPTLLFNGYAEQVASLYRGLDLRENF

SEQ ID NO: 2743 - protein, 334 aa, Escherichia coli
MKKNQFLKESDVTAESVFFMKRRQVLKALGISAAALSLPHAAHADLLSWFKGNDRPPAPAGKALEFSKPAAWQNNLPLTPADKVSGYNNFYEFGLDKADPAANAGSLKTDPWTLKISGEVAKPLTLDHDDLTRRFPLEERIYRMRCVEAWSMVVPWIGFPLHKLLALAEPTSNAKYVAFETIYAPEQMPGQQDRFIGGGLKYPYVEGLRLDEAMHPLTLMTVGVYGKALPPQNGAPVRLIVPWKYGFKGIKSIVSIKLTRERPPTTWNLAAPDEYGFYANVNPHVDHPRWSQATERFIGSGGILDVQRQPTLLFNGYADQVASLYRGLDLRENF

SEQ ID NO: 2744 - protein, 334 aa, Escherichia coli; identical to SEQ ID NO: 2743

SEQ ID NO: 2745 - protein, 334 aa, Escherichia coli
MKKNQFLKESDVTAESVFFMKRRQVLKALGISAAAFSLPHAAHADLLSWFKGNDRPPAPAGKPLEFSKPAAWQNNLPLTPADKVSGYNNFYEFGLDKADPAANAGSLKTDPWTLKISGEVAKPLTLDHDDLTRRFPLEERIYRMRCVEAWSMVVPWIGFPLHKLLALAEPTSNAKYVAFETIYAPEQMPGQQDRFIGGGLKYPYVEGLRLDEAMHPLTLMTVGVYGKALPPQNGAPVRLIVPWKYGFKGIKSIVSIKLTRERPPTTWNLAAPDEYGFYANVNPHVDHPRWSQATERFIGSGGILDVQRQPTLLFNGYADQVASLYRGLDLRENF

SEQ ID NO: 2746 - protein, 334 aa, Escherichia coli
MKKNQFLKESDVTAESVFFMKRRQVLKALGISAAALSLPHAAHADLLSWFKGNDRPPAPAGKPLEFSKPAAWQNNLPLTPADKVSGYNNFYEFGLDKADPAANAGSLKTDPWTLKISGEVAKPLTLDHDDLTRRFPLEERIYRMRCVEAWSMVVPWIGFPLHKLLALAEPTSNAKYVAFETIYAPEQMPGQQDRFIGGGLKYPYVEGLRLDEAMHPLTLMTVGVYGKALPPQNGAPVRLIVPWKYGFKGIKSIVSIKLTRERPPTTWNLAAPDEYGFYANVNPHVDHPRWSQATERFIGSGGILDVQRQPTLLFNGYADQVASLYRGLDLRENF

SEQ ID NO: 2747 - protein, 334 aa, Escherichia coli; identical to SEQ ID NO: 2739

SEQ ID NO: 2748 - protein, 334 aa, Escherichia coli
MKKNQFLKESDVTAESVFFMKRRQVLKALGISATALSLPHAAHADLLSWFKGNDRPPAPAGKALEFSKPAAWQNNLPLTPADKVSGYNNFYEFGLDKADPAANAGSLKTDPWTLKISGEVAKPLTLDHDDLTRRFPLEERIYRMRCVEAWSMVVPWIGFPLHKLLALAEPTSNAKYVAFETIYAPEQMPGQQDRFIGGGLKYPYVEGLRLDEAMHPLTLMTVGVYGKALPPQNGAPVRLIVPWKYGFKGIKSIVSIKLTRERPPTTWNLAAPDEYGFYANVNPYVDHPRWSQATERFIGSGGILDVQRQPTLLFNGYADQVASLYRGLDLRENF

SEQ ID NO: 2749 - protein, 334 aa, Escherichia coli
MKKNQFLKESDVTAESVFFMKRRQVLKALGISAAALSLPHAAHADLLSWFKGNDRPLAPAGKPLEFSKPAAWQNNLPLTPVDKVSGYNNFYEFGLDKADPAANAGSLKTDPWTLKISGEVAKPLTLDHDDLTRRFPLEERIYRMRCVEAWSMVVPWIGFPLHKLLALAEPTSNAKYVAFETIYAPEQMPGQQDRFIGGGLKYPYVEGLRLDEAMHPLTLMTVGVYGKALPPQNGAPVRLIVPWKYGFKGIKSIVSIKLTRERPPTTWNLAAPDEYGFYANVNPHVDHPRWSQATERFIGSGGILDVQRQPTLLFNGYADQVASLYRGLDLRENF

SEQ ID NO: 2750 - protein, 334 aa, Escherichia coli; identical to SEQ ID NO: 2741

SEQ ID NO: 2751 - protein, 334 aa, Escherichia coli
MKKNQFLKESDVTAESVFFMKRRQVLKALGISAAAFSLPHAAHADLLSWFKGNDRPPAPAGKPLEFSKPAAWQNNLPLTPADKVSGYNNFYEFGLDKADPAANAGSLKTDPWTLKISGEVAKPLTLDHDDLTRRFPLEERIYRMRCVEAWSMVVPWIGFPLHKLLALAEPTSNAKYVAFETIYAPEQMPGQQDRFIGGGLKYPYVEGLRLDEAMHPLTLMTVGVYGKALPPQNGAPVRLIVPWKYGFKGIKSIVSIKLTRERPPTTWNLVAPDEYGFYANVNPHVDHPRWSQATERFIGSGGILDVQRQPTLLFNGYADQVASLYRGLDLRENF

SEQ ID NO: 2752 - protein, 334 aa, Escherichia coli; identical to SEQ ID NO: 2746

SEQ ID NO: 2753 - protein, 334 aa, Escherichia coli
MKKNQFLKESDVTAESVFFMKRRQVLKALGISATALSLPHAAHADLLSWFKGNDRPPAPAGKALEFSKPAAWQNNLPLTPADKVSGYNNFYEFGLDKADPAANAGSLKTDPWTLKISGEVAKPLTLDHDDLTRRFPLEERIYRMRCVEAWSMVVPWIGFPLHKLLALAEPTSNAKYVAFETIYAPEQMPGQQDRFIGGGLKYPYVEGLRLDEAMHPLTLMTVGVYGKALPPQNGAPVRLIVPWKYGFKGIKSIVSIKLTRERPPTTWNLAAPDEYGFYANVNPYVDHPRWSQATERFIGSGGILDVQRQPTLLFNGYAAQVASLYRGLDLRENF

SEQ ID NO: 2754 - protein, 334 aa, Escherichia coli
MKKNQFLKESDVTAESVFFMKRRQVLKALGISAAALSLPHAAHADLLSWFKGNDRPPAPAGKPLEFSKPAAWQNDLPLTPADKVSGYNNFYEFGLDKADPAANAGSLKTDPWTLKISGEVAKPLTLDHDDLTRRFPLEERIYRMRCVEAWSMVVPWIGFPLHKLLALAEPTSNAKYVAFETIYAPEQMPGQQDRFIGGGLKYPYVEGLRLDEAMHPLTLMTVGVYGKALPPQNGAPVRLIVPWKYGFKGIKSIVSIKLTRECPPTTWNLAAPDEYGFYANVNPHVDHPRWSQATERFIGSGGILDVQRQPTLLFNGYADQVASLYRGLDLRENF

SEQ ID NO: 2755 - protein, 334 aa, Escherichia coli; identical to SEQ ID NO: 2739

SEQ ID NO: 2756 - protein, 334 aa, Escherichia coli
MKKNQFLKESDVTAESVFFMKRRQVLKALGISAAALSLPHAAHADLLSWFKGNDRPPAPAGKPLEFSKPAAWQNNLPLTPVDKVSGYNNFYEFGLDKADPAANAGSLKTDPWTLKISGEVAKPLTLDHDDLTRRFPLEERIYRMRCVEAWSMVVPWIGFPLHKLLALAEPTSNAKYVAFETIYAPEQMPGQQDRFIGGGLKYPYVEGLRLDEAMHPLTLMTVGVYGKALPPQNGAPVRLIVPWKYGFKGIKSIVSIKLTRERPPTTWNLAAPDEYGFYANVNPHVDHPRWSQATERFIGSGGILDVQRQPTLLFNGYADQVASLYRGLDLRENF

SEQ ID NO: 2757 - protein, 334 aa, Escherichia coli; identical to SEQ ID NO: 2741

SEQ ID NO: 2758 - protein, 826 aa, Escherichia coli
MLRMTPLASAIVALLLGIEAYAAEETFDTHFMIGGMKDQQVANIRLDDNQPLPGQYDIDIYVNKQWRGKYEIIVKDNPQETCLSREVIKRLGINSDNFASGKQCLTFEQLVQGGSYTWDIGVFRLDFSVPQAWVEELESGYVPPENWERGINAFYTSYYLSQYYSDYKASGNNKSTYVRFNSGLNLLGWQLHSDASFSKTNNNPGVWKSNTLYLERGFAQLLGTLRVGDMYTSSDIFDSVRFRGVRLFRDMQMLPNSKQNFTPRVQGIAQSNALVTIEQNGFVVYQKEVPPGPFAITDLQLAGGGADLDVSVKEADGSVTTYLVPYAAVPNMLQPGVSKYDLAAGRSHIEGASKQSDFVQAGYQYGFNNLLTLYGGSMVANNYYAFTLGAGWNTRIGAISVDATKSHSKQDNGDVFDGQSYQIAYNKFVSQTSTRFGLAAWRYSSRDYRTFNDHVWANNKDNYRRDENDVYDIADYYQNDFGRKNSFSANMSQSLPEGWGSVSLSTLWRDYWGRSGSSKDYQLSYSNNLRRISYTLAASQAYDENHHEEKRFNIFISIPFDWGDDVSTPRRQIYMSNSTTFDDQGFASNNTGLSGTVGSRDQFNYGVNLSHQHQGNETTAGANLTWNAPVATVNGSYSQSSTYRQAGASVSGGIVAWSGGVNLANRLSETFAVMNAPGIKDAYVNGQKYRTTNRNGVVIYDGMTPYRENHLMLDVSQSDSEAELRGNRKIAAPYRGAVVLVNFDTDQRKPWFIKALRADGQSLTFGYEVNDIHGHNIGVVGQGSQLFIRTNEVPPSVNVAIDKQQGLSCTITFGKEIDESRNYICQ

SEQ ID NO: 2759 - protein, 239 aa, Escherichia coli
MAAIPWRPFNLRGIKMKGLLSLLIFSMVLPAHAGIVIYGTRIIYPAENKEVMVQLMNQGNRSSLLQAWIDDGDTSLPPEKIQVPFMLTPPVAKIGANSGQQVKIKIMPNKLPTNKESIFYLNVLDIPPNSPEQEGKNALKFAMQNRIKLFYRPAGIAPVNKATFKKLLVNRSGNGLVIKNDSANWVTISDVKANNVKVNYETIMIAPLESQSVNVKSNNANNWHLTIIDDHGNYISDKI

SEQ ID NO: 2760 - protein, 863 aa, Escherichia coli
MHQSGSVSLCRSAISVLVATALYSPIALASTVEYGETVDGVVLEKDIQLVYGTANNTKINPGGEQHIKEFGVSNNTEINGGYQYIEMNGAAEYSVLNDGYQIVQMGGAANQTTLNNGVLQVYGAANDTTIKGGRLIVEKDGGAVFVAIEKGGLLEVKEGGFAFAVDQKAGGAIKTTTRAMEVFGTNRLGQFDIKNGIANNMLLENGGSLRVEENDFAYNTTVDSGGLLEVMDGGTVTGVDKKAGGKLIVSTNALEVSGPNSKGQFSIKDGVSKNYELDDGSGLIVMEDTQAIDTILDKHATMQSLGKDTGTKVQANAVYDLGRSYQNGSITYSSKAISENMVINNGRANVWAGTMVNVSVRGNDGILEVMKPQINYAPAMLVGKVVVSEGASFRTHGAVDTSKADVSLENSVWTIIADITTTNQNTLLNLANLAMSDANVIMMDEPVTRSSVTASAENFITLTTNTLSGNGNFYMRTDMANHQSDQLNVTGQATGDFKIFVTDTGASPAAGDSLTLVTTGGGDAAFTLGNAGGVVDIGTYEYTLLDNGNHSWSLAENRAQITPSTTDVLNMAAAQPLVFDAELDTVRERLGSVKGVSYDTAMWSSAINTRNNVTTDAGAGFEQTLTGLTLGIDSRFSREESSTIRGLIFGYSHSDIGFDRGGKGNIDSYTLGAYAGWEHQNGAYVDGVVKVDRFANTIHGKMSNGATAFGDYNSNGAGAHVESGFRWVDGLWSVRPYLAFTGFTTDGQDYTLSNGMRADVGNTRILRAEAGTAVSYHMDLQNGTTLEPWLKAAVRQEYADSNQVKVNDDGKFNNDVAGTSGVYQAGIRSSFTPTLSGHLSVSYGNGAGVESPWNTQAGVVWTF

SEQ ID NO: 2761 - protein, 250 aa, Escherichia coli
MSDLLCSAKLGAMTLALLLSATSLSALASVTPDRTRLIFNESDKSISVTLRNNDPKLPYLAQSWIEDEKGNKITSPLTVLPPVQRIDSMMNGQVKVQGMPDINKLPADRESMFYFNVREIPPKSNKPNTLQIALQTRIKLFWRPKALEKVSMKSPWQHKVTLTRSGQAFTVNNPTPYYVIISNASAQKNGNPAAGFSPLVIEPKTTVPLNVKMDSVPVLTYVNDFGARMPLFFQCNGNSCQVDEEQSRKG

SEQ ID NO: 2762 - protein, 881 aa, Escherichia coli
MPDHSLFRLRILPWCIALAMSGSYSSVWAEDDIQFDSRFLELKGDTKIDLKRFSSQGYVEPGKYNLQVQLNKQPLAEEYDIYWYAGEDDVSKSYACLTPELVAQFGLKEDVAKNLQWSHDGKCLKPGQLEGVEIKADLSQSALVISLPQAYLEYTWPDWDPPSRWDDGISGIIADYSITAQTRHEENGGDDSNEISGNGTVGVNLGPWRMRADWQTNYQHTRSNDDDDEFGGDDTQKKWEWSRYYAWRALPSLKAKLALGEDYLNSDIFDGFNYVGGSVSTDDQMLPPNLRGYAPDISGVAHTTAKVTVSQMGRVIYETQVPAGPFRIQDLGDSVSGTLHIRIEEQNGQVQEYDISTASMPYLTRPGQVRYKIMMGRPQEWGHHVEGGFFSGAEASWGIANGWSLYGGALGDENYQSAALGVGRDLSTFGAVAFDVTHSHTKLDKDTAYGKGSLDGNSFRVSYSKDFDQLNSRVTFAGYRFSEENFMTMSEYLDASDSEMVRTGNDKEMYTATYNQNFRDAGVSVYLNYTRHTYWDREEQTNYNIMLSHYFNMGSIRNMSVSLTGYRYEYDNRADKGMYISLSMPWGDNSTVSYNGNYGSGTDSSQVGYFSRVDDATHYQLNIGTSDKHTSVDGYYSHDGSLAQVDLSANYHEGQYTSAGLSLQGGATLTTHGGALHRTQNMGGTRLLIDADGVADVPVEGNGAAVYTNMFGKAVVSDVNNYYRNQAYIDLNKLPENAEATQSVVQATLTEGAIGYRKFAVISGQKAMAVLRLQDGSHPPFGAEVKNDNEQTVGLVDDDGSVYLAGVKPGEHMSVFWSGVAHCDINLPDPLPADLFNGLLLPCQHKGNVAPVVPDDIKPVIQEQTQQVTPTDPPVSVSANQ

SEQ ID NO: 2763 - protein, 288 aa, Escherichia coli
MFWLMLLIISAKMAHSLWRYISFSAEYTAVSQPVNKPSRVDAKTFDKNDVQLISQQNWFGKYQPVAAQVKQPEPVPVAETRLNVVLRGIAFGARPGAVIEEGGKQQVYLQGETLGSHNAVIEEINRDHVMLRYQGKIERLSLAEEERSTVAVTNKKAVSDEAKQAVAEPAVSVPVEIPAAVRQALAKDPQKIFNYIQLTPVRKEGIVGYAAKPGADRSLFDASGFKEGDIAIALNQQDFTDPRAMIALMRQLPSMDSIQLTVLRKGARHDISIALRYRLFCPPYWKKS

SEQ ID NO: 2764 - protein, 535 aa, Escherichia coli
MYTRNLLWLVSLVSAAPLYAADVPANTPLAPQQVFRYNNHSDPGTLDPQKVEENTAAQIVLDLFEGLVWMDGEGQVQPAQAERWEILDGGKRYIFHLRSGLQWSDGQPLTAEDFVLGWQRAVDPKTASPFAGYLAQAHINNAAAIVAGKADVTSLGVKATDDRTLEVTLEQPVPWFTTMLAWPTLFPVPHHVIAKHGDSWSKPENMVYNGAFVLDQWVVNEKITARKNPKYRDAQHTVLQQVEYLALDNSVTGYNRYRAGEVDLTWVPAQQIPAIEKSLPGELRIIPRLNSEYYNFNLEKPPFNDVRVRRALYLTVDRQLIAQKVLGLRTPATTLTPPEVKGFSATTFDELQKPMSERVAMAKALLKQAGYDASHPLRFELFYNKYDLHEKTAIALSSEWKKWLGAQVTLRTMEWKTYLDARRAGDFMLSRQSWDATYNDASSFLNTLKSDSEENVGHWKNAQYDALLNQATQITDATKRNALYQQAEVIINQQAPLIPIYYQPLIKLLKPYVGGFPLHNPQDYVYSKELYIKAH

SEQ ID NO: 2765 - protein, 130 aa, Escherichia coli
MKKFAAVIAVMALCSAPVMAAEQGGFSGPSATQSQAGGFQGPNGSVTTVESAKSLRDDTWVTLRGNIVERISDDLYVFKDASGTINVDIDHKRWNGVTVTPKDTVEIQGEVDKDWNSVEIDVKQIRKVNP

SEQ ID NO: 2766 - protein, 130 aa, Escherichia coli; identical to SEQ ID NO: 2765

SEQ ID NO: 2767 - protein, 224 aa, Escherichia coli
MLRHITFTVFITTSMNTLATGMVPETSVLLVDEKRGEASINIKNTDDHPSLLYTTIVDLPESNKSIRLIPTQPVIRVEAGQVQQVRFLLQATVPLQSEELKRVTFEGIPPKDDKSSRVTVSIRQDLPVLIHPASLPEERETWKFLEWRKNGDQIEISNPSNYVVRMTLQFKTLPSGKTGAINKTYFLPHTSTTTALTNATDTKVEFYPASRYGYRGNKYVTDLK

SEQ ID NO: 2768 - protein, 793 aa, Escherichia coli
MLKKTLLAYTIGFAFSPPANADGIEIAAVDFDRETLKSLGVDPNISHYFSRSARFLPGEYSLIVSVNGEKKGNIATRFDENGDICLDQAFLQQAGLKIPSEEKNGCYDYILSYPGTTITPLPNQEALDIIVSPQAIIPIGLDLTNAATGGTAALLNYSLMSSRAEFSNGSSDYSQAALEGGININDWMLRSHQFLTQTNGTFSNQNSSTYLQRTFTDLKTLMRAGEVNLNNSVLEGASIYGIEIAPDNALQTSGSGVQVTGIANTSQARVEIRQQGVLIHSILVPAGAFTIPDVPVRNGNSDLNVTVVETDGSSHNYIVPSTLFNQHVESFQGYRFAIGRVDDDYDESPWVISASSGWNLTRWSAMNGGVIVAENYQAASIRSSLVPLPDLTVSSQISTSQDTKDSLQGQKYRLDANYNLPFSLGLTTSLTRSDRHYRELSEAIDDDYTDPTKSTYALGLNWSNSILGGFNISGYKTYSYDGDNDSSNLNINWNKAFKHATVSVNWQHQLSASENNEDDGDLFYVNISIPFGRSNTATLYTRHDDHKTHYGTGVMGVVSDEMSYYVNAERDHDERETSLNGSISSNLHYTQVSLAAGASGSDSRTYNGTMSGGIAVHDQGVTFSPWTINDTFAIAKMDNNIAGVRITSQAGPVWTDFRGNAVIPSIQPWRTSGVEIDTASLPKNVDIGNGTKMIKQGRGAVGKVGFSAITQRRALLNITLSDGKKLPRGVAIEDSEGNYLTTSVDDGVVFLNNIKPDMVLDIKDEQQSCRIHLTFPEDAPKDVFYETATGECQ

SEQ ID NO: 2769 - protein, 87 aa, Escherichia coli
MKIKTTVAALSVLSVLSFGAFAADSIDAAQAQNREAIGTVSVSGVASSPMDMREMLNKKAEEKGATAYQITEARSGDTWHATAELYK

SEQ ID NO: 2770 - protein, 87 aa, Escherichia coli; identical to SEQ ID NO: 2769

SEQ ID NO: 2771 - protein, 341 aa, Escherichia coli
MKKMMIATLAAASVLLAVANQAHAGATLDAVQKKGFVQCGISDGLPGFSYADADGKFSGIDVDVCRGVAAAVFGDDTKVKYTPLTAKERFTALQSGEVDLLSRNTTWTSSRDAGMGMAFTGVTYYDGIGFLTHDKAGLKSAKELDGATVCIQAGTDTELNVADYFKANNMKYTPVTFDRSDESAKALESGRCDTLASDQSQLYALRIKLSNPAEWIVLPEVISKEPLGPVVRRGDDEWFSIVRWTLFAMLNAEEMGINSQNVDEKAANPATPDMAHLLGKEGDYGKDLKLDNKWAYNIIKQVGNYSEIFERNVGSESPLKIKRGQNNLWNNGGIQYAPPVR

SEQ ID NO: 2772 - protein, 341 aa, Escherichia coli
  MOD_RES (23)..(23): Any amino acid
MKKMMIATLAAASVLLAVANQAXAGATLDAVQKKGFVQCGISDGLPGFSYADADGKFSGIDVDICRGVAAAVFGDDTKVKYTPLTAKERFTALQSGEVDLLSRNTTWTSSRDAGMGMAFTGVTYYDGIGFLTHDKAGLKSAKELDGATVCIQAGTDTELNVADYFKANNMKYTPVTFDRSDESAKALESGRCDTLASDQSQLYALRIKLSNPAEWIVLPEVISKEPLGPVVRRGDDEWFSIVRWTLFAMLNAEEMGINSQNVDEKAANPATPDMAHLLGKEGDYGKDLKLDNKWAYNIIKQVGNYSEIFERNVGSESPLKIKRGQNNLWNNGGIQYAPPVR

SEQ ID NO: 2773 - protein, 498 aa, Escherichia coli
MQGTKIRLLAGGLLMMATAGYVQADALQPDPAWQQGTLSNGLQWQVLTTPQRPSDRVEIRLLVNTGSLAESTQQSGYSHAIPRIALTQSGGLDAAQARSLWQQGIDPKRPMPPVIVSYDTTLFNLSLPNNRNDLLKEALSYLANATGKLTITPETINHALQSQDMVATWPADTKEGWWRYRLKGSTLLGHDPADPLKQPVEAEKIKDFYQKWYTPDAMTLLVVGNVDARSVVDQINKTFGELKGKRETPAPVPTLSPLRAEAVSIMTDAVRQDRLSIMWDTPWQPIRESAALLRYWRADLAREALFWHVQQALSASNSKDIGLGFDCRVLYLRAQCAINIESPNDKLNSNLNLVARELAKVRDKGLPEEEFNALVAQKKLELQKLFAAYARADTDILMGQRMRSLQNQVVDIAPEQYQKLRQDFLNSLTVEMLNQDLRQQLSNDMALILLQPKGEPEFNMKALQAVWDQIMAPSTAAATTSVATDDVHPEVTDIPPAQ

SEQ ID NO: 2774 - protein, 328 aa, Escherichia coli
MKLRSVTYALFIAGLAAFSTSSLAAQSLRFGYETSQTDSQHIAAKKFNDLLQERTKGELKLKLFPDSTLGNAQAMISGVRGGTIDMEMSGSNNFAGLSPVMNLLDVPFLFRDTAHAHKTLDGKVGDDLKASLEGKGLKVLAYWENGWRDVTNSRAPVKTPADLKGLKIRTNNSPMNIAAFKVFGANPIPMPFAEVYTGLETRTIDAQEHPINVVWSAKFFEVQKFLSLTHHAYSPLLVVINKAKFDGLSPEFQQALVSSAQEAGNYQRKLVAEDQQKIIDGMKEAGVEVITDLDRKAFSDALGNQVRDMFVKDVPQGADLLKAVDEVQ

SEQ ID NO: 2775 - protein, 246 aa, Escherichia coli
MLINRNIVALFALPFMASATASELSIGAGAAYNESPYRGYNENTKAIPLISYEGDSFYVRQTTLGFILSQSEKNELSLTASWMPLEFDPADNDDYAMQQLDKRDSTAMAGVAWYHHERWGTVKASAAADVLDNSNGWVGELSVFHKMQIGRLSLTPALGVLYYDENFSDYYYGISESESRRSGLASYSAQDAWVPYVSLTAKYPIGEHVVLMASAGYSELPEEITDSPMIDRNESFTFVTGVSWRF

SEQ ID NO: 2776 - protein, 246 aa, Escherichia coli
MLINRNIVALFALPFMASATASELSIGAGAAYNESPYRGYNENTKAIPLISYEGDTFYVRQTTLGFILSQSEKNELSLTASWMPLEFDPTDNDDYAMQQLDKRDSTAMAGVAWYHHERWGTVKASAAADVLDNSNGWVGELSVFHKMQIGRLSLTPALGVLYYDENFSDYYYGISESESRRSGLASYSAQDAWVPYVSLTAKYPIGEHVVLMASAGYSELPEEITDSPMIDRNESFTFVTGVSWRF

SEQ ID NO: 2777 - protein, 91 aa, Escherichia coli
MKQLLASPSLQLVTYPASATAQSAEFASADCVTGLNEIGQISVSNISGDPQDVERIVALKADEQGASWYRIITMYEDQQPDNWRVQAILYA

SEQ ID NO: 2778 - protein, 91 aa, Escherichia coli; identical to SEQ ID NO: 2777

SEQ ID NO: 2779 - protein, 91 aa, Escherichia coli; identical to SEQ ID NO: 2777

SEQ ID NO: 2780 - protein, 91 aa, Escherichia coli
MFSRVLALLAVLLLSANTWAAIEINNHQARNMDDVQSLGVIYINHNFATESEARQALNEETDAQGATYYHVILMREPGSNGNMHASADIYR

SEQ ID NO: 2781 - protein, 91 aa, Escherichia coli; identical to SEQ ID NO: 2780

SEQ ID NO: 2782 - protein, 91 aa, Escherichia coli; identical to SEQ ID NO: 2780

SEQ ID NO: 2783 - protein, 78 aa, Escherichia coli
MFKKSVLFATLLSGVMAFSTNADDKIILKHISVSSVSASPTVLEDTIADIARKYNASSWKVTSMRIDNNSTATAVLYK

SEQ ID NO: 2784 - protein, 700 aa, Escherichia coli
MKIFSVRQTVLPALLVLSPVVFAADEQTMIVSAAPQVVSELDTPAAVSVVDGEEMRLATPRINLSESLTGVPGLQVQNRQNYAQDLQLSIRGFGSRSTYGIRGIRLYVDGIPATMPDGQGQTSNIDLSSVQNVEVLRGPFSALYGNASGGVMNVTTQTGQQPPTIEASSYYGSFGSWRYGLKATGATGDGTQPGDVDYTVSTTRFTTHGYRDHSGAQKNLANAKLGVRIDEASKLSLIFNSVDIKADDPGGLTKAEWKANPQQAPRAEQYDTRKTIKQTQAGLRYERSLSSRDDMSVMMYAGERETTQYQSIPMAPQLNPSHAGGVITLQRHYQGIDSRWTHRGELGVPVTFTTGLNYENMSENRKGYNNFRLNSGMPEYGQKGELRRDERNLMWNIDPYLQTQWQLSEKLSLDAGVRYSSVWFDSNDHYVTPGNGDDSGDASYHKWLPAGSLKYAMTDAWNIYLAAGRGFETPTINELSYRADGQSGMNLGLKPSTNDTIEIGSKTRIGDGLLSLALFQTDTDDEIVVDSSSGGRTTYKNAGKTRRQGAELAWDQRFAGDFRVNASWTWLDATYRSNVCNEQDCNGNRMPGIARNMGFASIGYVPEDGWYAGTEARYMGDIMADDENTAKAPSYTLVGLFTGYKYNYHNLTVDLFGRVDNLFDKEYVGSVIVNESNGRYYEPSPGRNYGVGMNIAWRFE

SEQ ID NO: 2785 - protein, 334 aa, Escherichia coli
MKRASLLTLTLIGAFSAIQAAWAVDYPLPPTGSRLVGQNQTYTVQEGDKNLQAIARRFDTAAMLILEANNTIAPVPKPGTTITIPSQLLLPDAPRQGIIVNLAELRLYYYPPGENIVQVYPIGIGLQGLETPVMETRVGQKIPNPTWTPTAGIRQRSLERGIKLPPVVPAGPNNPLGRYALRLAHGNGEYLIHGTSAPDSVGLRVSSGCIRMNAPDIKALFSSVRTGTPVKVINEPVKYSVEPNGMRYVEVHRPLSAEEQQNVQTMPYTLPAGFTQFKDNKAVDQKLVDKALYRRAGYPVSVSSGATPAASNAPSVESAQNGEPEQGNMLRVTQ

SEQ ID NO: 2786 - protein, 435 aa, Escherichia coli
MKRVSQMTALAMALGLACASSWAAELAKPLTLDQLQQQNGKAIDTRPSAFYNGWPQTLNGPSGHELAALNLSASWLDKMSTEQLNAWIKQHNLKTDAPVALYGNDKDVDAVKTRLQKAGLTHISILSDALSEPSRLQKLPHFEQLVYPQWLHDLQQGKEVTAKPAGDWKVIEAAWGAPKLYLISHIPGADYIDTNEVESEPLWNKVSDEQLKAMLAKHGIRHDTTVILYGRDVYAAARVAQIMLYAGVKDVRLLDGGWQTWSDAGLPVERGTPPKVKAEPDFGVKIPAQPQLMLDMEQARGLLHRQDASLVSIRSWPEFIGTTSGYSYIKPKGEIAGARWGHAGSDSTHMEDFHNPDGTMRSADDITAMWKAWNIKPEQQVSFYCGTGWRASETFMYARAMGWKNVSVYDGGWYEWSSDPKNPVATGERGPDSSK

SEQ ID NO: 2787 - protein, 124 aa, Escherichia coli
MASTARSLRYALAILTTSLVTPSVWAHAHLTHQYPAANAQVTAAPQAITLNFSEGVETGFSGAKITGPKNENIKTLPAKRNEQDQKQLIVPLADSLKPGTYTVDWHVVSVDGHKTKGHYTFSVK

SEQ ID NO: 2788 - protein, 124 aa, Escherichia coli; identical to SEQ ID NO: 2787

SEQ ID NO: 2789 - protein, 327 aa, Escherichia coli
MPTKMRTTRNLLLMATLLGSALFARAAEKEMTIGAIYLDTQGYYAGVRQGVQDAAKDSSVQVQLIETNAQGDISKESTFVDTLVARNVDAIILSAVSENGSSRTVRRASEAGIPVICYNTCINQKGVDKYVSAYLVGDPLEFGKKLGNAAADYFIANKIDQPKIAVINCEAFEVCVQRRKGFEEVLKSRVPGAQIVANQEGTVLDKAISVGEKLIISTPDLNAIMGESGGATLGAVKAVRNQNQAGKIAVFGSDMTTEIAQELENNQVLKAVVDISGKKMGNAVFAQTLKVINKQADGEKVIQVPIDLYTKTEDGKQWLATHVDGLP

SEQ ID NO: 2790 - protein, 1526 aa, Escherichia coli
MNRTSPYYCRRSVLSLLISALIYAPPGMAAFTTNVIGVVNDETVDGNQKVDERGTTNNTHIINHGQQNVHGGVSNGSLIESGGYQDIGSHNNFVGQANNTTINGGRQSIHDGGISTGTTIESGNQDVYKGGISNGTTIKGGASRVEGGSANGILIDGGSQIVKVQGHADGTTINKSGSQDVVQGSLATNTTINGGRQYVEQSTVETTTIKNGGEQRVYESRALDTTIEGGTQSLNSKSTAKNTHIYSGGTQIVDNTSTSDVIEVYSGGVLDVRGGTATNVTQHDGAILKTNTNGTTVSGTNSEGAFSIHNHVADNVLLENGGHLDINAYGSANKTIIKDKGTMSVLTNAKADATRIDNGGVMDVAGNATNTIINGGTQNINNYGIATGTNINSGTQNIKSGGKADTTIISSGSRQVVEKDGTAIGSNISAGGSLIVYTGGIAHGVNQETGSALVANTGAGTDIEGYNKLSHFTITGGEANYVVLENTGELTVVAKTSAKNTTIDTGGKLIVQKEAKTDSTRLNNGGVLEVQDGGEAKHVEQQSGGALIASTTSGTLIEGTNSYGDAFYIRNSEAKNVVLENAGSLTVVTGSRAVDTIINANGKMDVYGKDVGTVLNSAGTQTIYASATSDKANIKGGKQTVYGLATEANIESGEQIVDGGSTEKTHINGGTQTVQNYGKAINTDIVSGLQQIMANGTAEGSIINGGSQVVNEGGLAENSVLNDGGTLDVREKGSATGIQQSSQGALVATTRATRVTGTRADGVAFSIEQGAANNILLANGGVLTVESDTSSDKTQVNMGGREIVKTKATATGTTLTGGEQIVEGVANETTINDGGIQTVSANGEAIKTKINEGGTLTVNDNGKATDIVQNSGAALQTSTANGIEISGTHQYGTFSISGNLATNMLLENGGNLLVLAGTEARDSTVGKGGAMQNLGQDSATKVNSGGQYTLGRSKDEFQALARAEDLQVAGGTAIVYAGTLADASVSGATGSLSLMTPRDNVTPVKLEGAVRITDSATLTLGNGVDTTLADLTAASRGSVWLNSNNSCAGTSNCEYRVNSLLLNDGDVYLSAQTAAPATTNGIYNTLTTNELSGSGNFYLHTNVAGSRGDQLVVNNNATGNFKIFVQDTGVSPQSDDAMTLVKTGGGDASFTLGNTGGFVDLGTYEYVLKSDGNSNWNLTNDVKPNPDPIPNPKPDPKPDPKPDPNPKPDPTPDPTPTPVPEKRITPSTAAVLNMAATLPLVFDAELNSIRERLNIMKASPHNNNVWGATYNTRNNVTTDAGAGFEQTLTGMTVGIDSRNDIPEGITTLGAFMGYSHSHIGFDRGGHGSVGSYSLGGYASWEHESGFYLDGVVKLNRFKSNVAGKMSSGGAANGSYHSNGLGGHIETGMRFTDGNWNLTPYASLTGFTADNPEYHLSNGMKSKSVDTRSIYRELGATLSYNMRLGNGMEVEPWLKAAVRKEFVDDNRVKVNSDGNFVNYLSGRRGIYQAGIKASFSSTLSGHLGVGYSHSAGVESPWNAVAGVNWSF

SEQ ID NO: 2791 - protein, 85 aa, Escherichia coli
MKTIFTVGAVVLATCLLSGCVNEQKVNQLASNVQTLNAKIARLEQDMKALRPQIYAAKSEANRANTRLDAQDYFDCLRCLRMYAE

SEQ ID NO: 2792 - protein, 821 aa, Escherichia coli
MSGNIGANPVIIIGCASAYAVEFNKDLIEAEDRENVNLSQFETDGQLPVGKYSLSTLINNKRTPIHLDLQWVLIDNQTAVCVTPEQLTLLGFTDEFIEKTQQNLIDGCYPIEKEKQITTYLDKGKMQLSISAPQAWLKYKDANWTPPELWNHGIAGAFLDYNLYASHYAPHQGDNSQNISSYGQAGVNLGAWRLRTDYQYDQSFNNGKSQATNLDFPRIYLFRPIPAMNAKLTIGQYDTESSIFDSFHFSGISLKSDENMLPPDLRGYAPQITGVAQTNAKVTVSQNNRIIYQENVPPGPFAITNLFNTLQGQLDVKVEEEDGRVTQWQVASNSIPYLTRKGQIRYTTAMGKPTSVGGDSLQQPFFWTGEFSWGWLNNVSLYGGSVLTNRDYQSLAAGVGFNLNSLGSLSFDVTRSDAQLHNQDKETGYSYRANYSKRFESTGSQLTFAGYRFSDKNFVTMNEYINDTNHYTNYQNEKESYIVTFNQYLESLRLNTYVSLARNTYWDASSNVNYSLSLSRDFDIGPLKNVSTSLTFSRINWEEDNQDQLYLNISIPWGTSRTLSYGMQRNQDNEISHTASWYDSSDRNNSWSVSASGDNDEFKDMKASLRASYQHNTENGRLYLSGTSQRDSYYSLNASWNGSFTATRHGAAFHDYSGSADSRFMIDADGTEDIPLNNKRAVTNRYGIGVIPSVSSYITTSLSVDTRNLPENVDIENSVITTTLTEGAIGYAKLDTRKGYQIIGVIRLADGSHPPLGISVKDETSHKELGLVADGGFVYLNGIQDDNKLALRWGDKSCFIQPPNSSNLTTGTAILPCISQN

SEQ ID NO: 2793 - protein, 249 aa, Escherichia coli
MRYLNTKNIIAAGVLLSCMSSIAWGAIIPDRTRIIMNESDKGEALKLTNQSKNLPYLAQTWIEDTKGNKSRDFIVTVPPMVRLNPSEQIQIRMITQEKIAQLPKDRETLFYFNVREIPPKTDKKNVMQVTMQHALKLFWRPKAIELEDDGVMTYEKVEIIRRNDGSIRFNNKMPYHVTLGYIGTNGVTMLPQTQSLMVTPFSYANTQFKNVPSTFQVGYINDFGGLSFYEINCPVVNNICNISVANRDQ

SEQ ID NO: 2794 - protein, 231 aa, Escherichia coli
MSKRTFAVILTLLCSFCIGQALAGGIVLQRTRVIYDASRKEAALPVANKGAETPYLLQSWVDNIDGKSRAPFIITPPLFRLEAGDDSSLRIIKTADNLPENKESLFYINVRAIPAKKKSDDVNANELTLVFKTRIKMFYRPAHLKGRVNDAWKSLEFKRSDHSLNIYNPTEYYVVFAGLAVDKTDLTSKIEYIAPGEHKQLPLPASGGKNVKWAAINDYGGSSGTETRPLQ

SEQ ID NO: 2795 - protein, 838 aa, Escherichia coli
MPQRHHQGHKRTPKQLALIIKRCLPMVLTGSGMLCTTANAEEYYFDPIMLETTKSGMQTTDLSRFSKKYAQLPGTYQVDIWLNKKKVSQKKITFTANAEQLLQPQFTVEQLRELGIKVDEIPALAEKDDDSVINSLEQIIPGTAAEFDFNHQQLNLSIPQIALYRDARGYVSPSRWDDGIPTLFTNYSFTGSDNRYRQGNRSQRQYLNMQNGANFGPWRLRNYSTWTRNDQTSSWNTISSYLQRDIKALKSQLLLGESATSGSIFSSYTFTGVQLASDDNMLPNSQRGFAPTVRGIANSSAIVTIRQNGYVIYQSNVSAGAFEINDLYPSSNSGDLEVTIEESDGTQRRFIQPYSSLPMMQRPGHLKYSATAGRYRADANSDSKEPEFAEATAIYGLNNTFTLYGGLLGSEDYYALGIGIGGTLGALGALSMDINRADTQFDNQHSFHGYQWRTQYIKDIPETNTNIAVSYYRYTNDGYFSFNEANTRNWDYNSRQKSEIQFNISQTIFDGVSLYASGSQQDYWGNNDKNRNISVGVSGQQWGVGYSLNYQYSRYTDQNNDRALSLNLSIPLERWLPRSRVSYQMTSQKDRPTQHEMRLDGSLLDDGRLSYSLEQSLDDDNNHNSSLNASYRSPYGTFSAGYSYGNDSSQYNYGVTGGVVIHPHGVTLSQYLGNAFALIDANGASGVRIQNYPGIATDPFGYAVVPYLTTYQENRLSVDTTQLPDNVDLEQTTQFVVPNRGAMVAARFNANIGYRVLVTVSDRNGKPLPFGALASNDDTGQQSIVDEGGILYLSGISSKSQSWTVRWGNQADQQCQFAFSTPDSEPTTSVLQGTAQCH

SEQ ID NO: 2796 - protein, 191 aa, Escherichia coli
MKALSPIAVLISALLLQGCVAAAVVGTAAVGTKAATDPRSVGTQVDDGTLEVRVNSALSKDEQIKKEARINVTAYQGKVLLVGQSPNAELSARAKQIAMGVDGANEVYNEIRQGQPIGLGEASNDTWITTKVRSQLLTSDLVKSSNVKVTTENGEVFLMGLVTEREAKAAADIASRVSGVKRVTTAFTFIK

SEQ ID NO: 2797 - protein, 191 aa, Escherichia coli; identical to SEQ ID NO: 2796

SEQ ID NO: 2798 - protein, 191 aa, Escherichia coli; identical to SEQ ID NO: 2796

SEQ ID NO: 2799 - protein, 184 aa, Escherichia coli
MTLRKILALTCLLLPMMASAHQFETGQRVPPIGITDRGELVLDKDQFSYKTWNSAQLVGKVRVLQHIAGRTSAKEKNATLIEAIKSAKLPHDRYQTTTIVNTDDAIPGSGMFVRSSLESNKKLYPWSQFIVDSNGVALGAWQLDEESSAVVVLDKDGRVQWAKDGALTPEEVQQVMDLLQKLLK

SEQ ID NO: 2800 - protein, 318 aa, Escherichia coli
MWKRLLIVSAVSAAMSSMALAAPLTVGFSQVGSESGWRAAETNVAKSEAEKRGITLKIADGQQKQENQIKAVRSFVAQGVDAIFIAPVVATGWEPVLKEAKDAEIPVFLLDRSIDVKDKSLYMTTVTADNILEGKLIGDWLVKEVNGKPCNVVELQGTVGASVAIDRKKGFAEAIKNAPNIKIIRSQSGDFTRSKGKEVMESFIKAENNGKNICMVYAHNDDMVIGAIQAIKEAGLKPGKDILTGSIDGVPDIYKAMMDGEANASVELTPNMAGPAFDALEKYKKDGTMPEKLTLTKSTLYLPDTAKEELEKKKNMGY

SEQ ID NO: 2801 - protein, 1758 aa, Escherichia coli
MCFFLGSRLAYAENIDGSSTISNRDISGSLNIGINKDANIDINGTVNIKDYFSVATCNGQSSTCPEGGLNASAKIDKSASVGASVTIVGDSSKGELNIDGGSTLYTQQLWVSGNDNDKTSNVSDDSNGSLSINNGSNVFVVSSQDDTPFKTNSVKWNQNIISQGNNITDGTVSSGDLVLGKTGNGIIDIDNNSKLDVKNDVVVSTGVDGIPNEKPSEINIKNESNFSVHGDMKGGISAAGKLNLNMDNSSNLHVDKNIAVGIGRESNITVSASRESSIFSDGNFTVATGNNSNANLKLDASNLSVNGVSTIGSGDGSITKFDIKNGSVVTSSSDMTLAKGKGTQANINISSSELNTGSLSVGEGDNADVKMTGSGASVSSKKTFTVAKGNNASATLNYTGSKIDIGSGYIGEGESAKTQLELNNSALTASGKVFIGQGNTTQTNLTLNDKSSVNVSGEMSVAQGSSASVDVTATNAVLSADSLSLGGGEAAKVTMTGSGATVSSKNTFTVAKGNNASATLDYTDSKIDIGSGYIGEGEAAKTQLELNNSALTASGKVFIGQGNTTQTNLTLNDKSSVNVSDEMSVAQGSSASVDVTITNAVLSADSLSLGGGEAAKVTMTGNRATISSGNTFTVAKGNNASATLDYSDSKINIGNGYIGGGEKAQTVLTLKDSALAATGDVIMGQGQETQTDLTLSPQSSIKVSGNMSIAQGNAASAKVIVDNADLSANSMSIGEGDTAAVTMTGNGATISSGNTFTVARGNNASATLDYSDSKINIGNGYIGGGEKAQTVLTLKDSALAATGDVIMGQGQETQTDLTLSPQSSIKVSGNMSIAQGNAASAKVIVDNADLSANSMSIGEGDTAAVTMTGNGATISSGNTFTVARGNNASATLDYSDSKINIGNGYIGVGEKSHTLLKLDNSTFHAAGNIDIGKGSSTIANVSVGAGSNMSIKGNASIGVGDQAKAKFSVKDSVLNIGSSLVLGQGNSTEAEMSVEHSQLYSGGLLLGTANNAVVSMSANNSEISVVGDYTVAKGDGSEATLIYKNSDINLGNGILGAGSGVKTDLSLDNSKFVASDGIIIGKGDNAITNLSISDHSVFKGERINIGNGSYSKNSISITGNSIFDFGSSQESTIGEGDYSQSLVTINDASVYGDGSLTLAKGNNSFAVLNLQDNAVTNANNISLATGLGSKAIVNVSNMNSGQFNPVSMGAGDGYAEVNFDGVNGYTLSTNFICMDSGSCADTVINVNRGTVSLSGTNDWKGQINVYDGTRLDARGNDAVDGILNVSKEAQVDFNGYSQHMTGIDNKGMIYLSDGSASSDVYLDKDYVAHDGSGVQFGIFGQKEADVMHVKGDTSGSSGIVVTTNSKNKIKKGGDILLVEVNGDSSGSFYLNSLIKNGKEYKVTGDYIDVGAWEYALNKKRKNWYLSVDMRPEPGAFINNSKSMLDMFALQRYDIPGQHRYPTLFENLYNNGMWIQFNNNSGSNSEVYDNLKTSYSLNTMMIGGDIYNWTDGYNYSHIGIMGGMGSAANKTTSTNNKRATGNVDGYTLGLYHVFQQNISDGLNESERQGLWTYSSIQYMDYDNSVSSTNNFKANYGVNGFRLTGEVGYLKNIGGIQPSDFYVEPKLYLSHTELSGGVVEDLQGGKITYPNSLTIIEPGVFFSYRKTHESTSNDEAMFKDYIKQSVVDAWFGGGYSFKTGNYSRTNFDSDMVEYNTSDNFALKSGVEFEFLKDARLLLTSSYSINNDRNLSFILGGNYYF

SEQ ID NO: 2802 - protein, 1371 aa, Escherichia coli
MNCQRYFCFVNGIVEIRTAPEEYQNKPVLVGSQSDGLLIIDNHADIEDGIFSTLHIGNGYNGAVDVINGAALHMDNRSGSAPLIVGAFGNDIAGKLNISGRNSIVSYRDTPSSSGHNESIYVGFGPGATGWINIFNGGVFEVLNSTNIYVGSDTPGGGDGSIVIDGSNSKMTADFSEAYVGLYGNGDISLKNGGQLSASNLYIGGNGRAIVNISGTDSRLIANMITISGSSGAPGIYIADQGILNVDNYINITTANDTKGKLFINSDMPGTIESKGILFGVGKAELIFKHNSDNYAFSSPLISKNTGNGIINAESGETHLTGDNTDYSGLLNILPTASIDISSQKNIGKSVIVNNGVLQITSQDDWTFNNNMTGNGYLNVHTGGHNFAFQNSTNTQEFTGTLALSDTLFDLSDDNTTALTSALVLAGVGSVITAGTGTQVINGFSFDGGAVNFGAVTQGAQQTESQIQVTDNLYINGNGAVRVSTPTDVNGIPQVINSSLSLLEQDDSNATIKLVDASSAVVKGNGGNLQLQDASGQVISSGKQRNIVQQGKNVAKGVYDYRLTSGPHNDGLYIGYALTQLDLLASGVDALVLDAAGTTGNAADMSARITGAGDLAFNSQKGETVSLSNQDNDYTGVTAIRGGNVLMNSNSVLGQTSEIRLATDTRLDMNGHSQTVGKLNGAAGSVLNINGGNLTLTDDGVSAGTLTGGGFLNISGGVLDITGGNHTFAVSTIIAKDATVRMNDVSGLGTGNISNAGTLSLTHASGLLSNNLSGSGTVSLINSDTQISGNNSNYSGLFVVDTSSQLTATGAQNLGIASVSNRGILQLNNTTDWQLINNVTGTGNVRKTGSGSLTVRSNAAWSGQTDIDDGSLILGQSDAPVMLASSLVNIAKNGKLTGFGGVVGNVTNSGSLDLRSAAPGNILTIGGNYTGNNGTLLINTVLDDSSSATDKLVIKGDASGKTRVAVTNVGGSGANTLNSIEVIHVDGNAANAEFIQAGRIAAGAYDYTLGRGPGSNYGNWYLSSSKNTPEPRPDPEPTPEGHDNNLRPEASSYTANIAAANTMFVTRLHERLGQTQYVDAITGEPKATSMWMRHEGGHNRWRDGSGQLKTQSNRYVIQLGGDIAQWDWGGTNRWHLGVMAGYGNNHSSTGAVRTGYHSKGSVNGYSTGLYATWYADDETHNGAYLDTWAQYGWFDNHVKGDGLPGESWKSKGLTASLETGYAWKIGEFSSNYGNLNEWYVQPQAQLVWMGVKADELYESNGTLIESTGDGNVHTRLGVKTWIKRLNKMDDGKSREFSPFVEVNWLHNTRDFGVRMNGEPVYQDGTRNIGEVKTGVEGQINPHLNLWGNVRVQVGDKGYNDTSAMLGVKYTF

SEQ ID NO: 2803 - protein, 216 aa, Escherichia coli
MAIRLYKLAVALGVFIVSAPAFSHGHHSHGKPLTEVEQKAANGVFDDANVQNRTLSDWDGVWQSVYPLLQSGKLDPVFQKKADADKTKTFAEIKDYYHKGYATDIEMIGIEDGIVEFHRNNETTSCKYDYDGYKILTYKSGKKGVRYLFECKDPESKAPKYIQFSDHIIAPRKSSHFHIFMGNDSQQSLLNEMENWPTYYPYQLSSEEVVEEMMSH

SEQ ID NO: 2804 - protein, 310 aa, Escherichia coli
MLHKKTLLFAALSAALWGGATQAADAAVVASLKPVGFIASAIADGVTETEVLLPDGASEHDYSLRPSDVKRLQNADLVVWVGPEMEAFMQKPVSKLPGAKQVTIAQLEDVKPLLMKSIHGDDDDHDHAEKSDEDHHHGDFNMHLWLSPEIARATAVAIHGKLVELMPQSRAKLDANLKDFEAQLASTETQVGNELAPLKGKGYFVFHDAYGYFEKQFGLTPLGHFTVNPEIQPGAQRLHEIRTQLVEQKATCVFAEPQFRPAVVESVARGTSVRMGTLDPLGTNIKLGKTSYSEFLSQLANQYASCLKGD

SEQ ID NO: 2805 - protein, 141 aa, Escherichia coli
MKRNTKIALVMMALSAMAMGSTSAFAHGGHGMWQQNAAPLTSEQQTAWQKIHNDFYAQSSALQQQLVTKRYEYNALLAANPPDSSKINAVAKEMENLRQSLDELRVKRDIAMAEAGIPRGAGMGMGYGGCGGGGHMGMGHW

SEQ ID NO: 2806 - protein, 139 aa, Escherichia coli
MKRNTKIALVMMALSAMAMGSTSAFAHGGHGMWQQNAAPLTSEQQTAWQKIHNDFYAQSSALQQQLVTKRYEYNALLAANPPDSSKINAVAKEMENLRQSLDELRVKRDIAMAEAGIPRGTGMGYGGCGGGGHMGMGHW

SEQ ID NO: 2807 - protein, 141 aa, Escherichia coli; identical to SEQ ID NO: 2805

SEQ ID NO: 2808 - protein, 250 aa, Escherichia coli
MSYKLSCPMLVSTALMALLTTASLTAHASVTPDRTRLVFNESDKSISVTLRNNNEKLPYLAQSWLEDEKGNKITSPLAVLPPVQRIDAMMNGQVKIQALPDIHTLPSDRESLFYYNVREIPPKSGKANTLQIALQTRIKLFWRPKALEKIDMRKPWQFKVTLTRSGQDYTVNNPTPYHVIISDASTQKKGLTAAGFKPLVMPPKTSQPLKAKMASAPVLTYINDYGARMPLIFRCEGNTCKVDEDQSSKG

SEQ ID NO: 2809 - protein, 421 aa, Escherichia coli
MRSVIVAFLFACSFCVSAETVNLNNSSVRSFVQWYSSKTGKPVIVNPDIKGNVTVFNADVNPTNIDDFFKSVLNANGFVMLSGNPAVVSLPSKLPSQMVSDSDDSDNQSYDTFPSEPSYQPVPVALTVRNFKLTKVRSSDVQQLIKIYLDSNGGGNVVDYPGNNSLIVSAPDELLPVLSDFINSVDVARDQVLIQSLMFETSLSDGVDLSFAAGSASGHKVAGGFNTSALGSALSTAGGSFGIFDGNVLALSLRAVQSNSRSKVISTPRILTQSGQTGYISVGKNVPFITGKVTGESAGVNNPFQTIERHDVGVSLKVTPVVMGNGQLVLTIDTRADSISNDDQASDIITNQRQIQTTVQIKDGQTLLLGGLIDSSFSNAERSVPVISKIPLIGWIFSSKADSNEQRIMYILLTAHIIRPL

SEQ ID NO: 2810 - protein, 89 aa, Escherichia coli
MKKMFMAVLFALASVNAMAADCAKGKIEFSKYNEDDTFTVKVDGKEYWTSRWNLQPLLQSAQLTGMTVTIKSSTCESGSGFAEVQFNND

SEQ ID NO: 2811 - protein, 89 aa, Escherichia coli
MKKMFMAVLFALVSVNAMAADCAKGKIEFSKYNEDDTFTVKVDGKEYWTSRWNLQPLLQSAQLTGMTVTIKSSTCESGSGFAEVQFNND

SEQ ID NO: 2812 - protein, 89 aa, Escherichia coli
MKKMFMAVLFALVSVNAMAADCAKGKIEFSKYNENDTFTVKVAGKEYWTSRWNLQPLLQSAQLTGMTVTIKSSTCESGSGFAEVQFNND

SEQ ID NO: 2813 - protein, 512 aa, Escherichia coli
MKKISFFIFTALFCCSAQAAPSSLEKRLGKSEYFIITKSSPVRAILNDFAANYSIPVFISSSVNDDFSGEIKNEKPVKVLEKLSKLYHLTWYYDENILYIYKTNEISRSIITPTYLDIDSLLKYLSDTISVNKNSCNVRKITTFNSIEVRGVPECIKYITSLSESLDKEAQSKAKNKDVVKVFKLNYASATDITYKYRDQNVVVPGVVSILKTMASNGSLPSTGKGAVERSGNLFDNSVTISADPRLNAVVVKDREITMDIYQQLISELDIEQRQIEISVSIIDVDANDLQQLGVNWSGTLNAGQGTIAFNSSTAQANISSSVISNASNFMIRVNALQQNSKAKILSQPSIITLNNMQAILDKNVTFYTKVSGEKVASLESITSGTLLRVTPRILDDSSNSLTGKRRERVRLLLDIQDGNQSTNQSNAQDASSTLPEVQNSEMTTEATLSAGESLLLGGFIQDKESSSKDGIPLLSDIPVIGSLFSSTVKQKHSVVRLFLIKATPIKSASSE

SEQ ID NO: 2814 - protein, 876 aa, Escherichia coli
MFFGDGGQLLSDKSLTGSAGGGNNRMKFNILPLAFFIGIIVSPARAELYFNPRFLSDDPDAVADLSAFTQGQELPPGVYRVDIYLNDTYISTRDVQFQMSQDGKQLAPCLSPEHMSAMGVNRYAVPGMERLPADTCTSLNSMIQGATFRFDVGQQRLYLTVPQLYMSNQARGYIAPEYWDNGITAALLNYDFSGNRVRDSYGGTSDYAYLNLKTGLNIGSWRLRDNTSWSYSAGKGYSQNNWQHINTWLERDIVSLRSRLTMGDSYTRGDIFDGVNFRGIQLASDDNMVPDSQRGYAPTIHGISRGTSRISIRQNGYEIYQSTLPPGPFEINDIYPAGSGGDLQVTLQEADGSVQRFNVPWSSVPVLQREGHLKYALSAGEFRSGGHQQDNPRFAEGTLKYGLPAGWTVYGGAWIAERYRAFNLGVGKNMGWLGAVSLDATRANARLPDESRHDGLSYRFLYNKSLTETGTNIQLIGYRYSTRGYFSFADTAWKKMSGYSVLTQDGVIQIQPKYTDYYNLAYNKRGRVQVSISQQTGESSTLYLSGSHQSYWGTDRTDRQLNAGFNSSVNDISWSLNYSLSRNAWQHETDRILSFDVSIPFSHWMRSDSTSAWRNASARYSQTLEAHGQAASTAGLYGTLLGDNNLGYSIQSGYTRGGYEGSSKTGYASLNYRGGYGNASAGYSHSGGYRQLYYGLSGGILAHANGLTLSQPLGDTLILVRAPGASDTRIENQTGVSTDWRGYAVLPYATDYRENRVALDTNTLADNVDIENTVVSVVPTHGAVVRADYKTRVGVKVLMTLMRNGKAVPFGSVVTARNGGSSIAGENGQVYLSGMPLSGQVSVKWGSQTTDQCTADYKLPKESAGQILSHVTVSCR

SEQ ID NO: 2815 - protein, 229 aa, Escherichia coli
MALLIFAVLSLLVAGELQAGVVVGGTRFIFPADRESISILLTNTSQESWLINSKINRPTRWAGGEASTVPAPLLAAPPLILLKPGTTGTLRLLRTESDILPVDRETLFELSIASVPSGKVENQSVKVAIRSVFKLFWRPEGLPGDPLEAYQQLRWTWNSQGVQLTNPTPYYINLIQVSVNGKALSNAGVVPPKSQRQTSWCQAIAPCHVAWRAINDYGGLSAKKEQNLP

SEQ ID NO: 2816 - protein, 237 aa, Escherichia coli
MRKITQAISAVCLLFALNSSAVALASSPSPLNPGTNVARLAEQAPIHWVSVAQIENSLAGRPPMAVGFDIDDTVLFSSPGFWRGKKNFSPESEDYLKNPVFWEKMNNGWDEFSIPKEVARQLIDMHVRRGDAIFFVTGRSPTKTETVSKTLADNFHIPATSMNPVIFAGDKPGQNTKSQWLQDKNIRIFYGDSDNDITAARDVGARGIRILRASNSTYKPLPQAGAFGEEVIVNSEY

SEQ ID NO: 2817 - protein, 816 aa, Escherichia coli
MNIYRLSFVSCLVVAMPCALAVEFNLNVLDKSMRDRIDISLLKEKGVIAPGEYFVSVAVNNNQISNGQKINWHKNDDKTIPCINDLLVDKFGLKPEVRQSLPLINQCVDFSSRPEMLFNFDQANQQLNITIPQAWLAWHSENWTPPSTWKEGVAGVLMDYNLFASSYRPQDGSSSTNLNAYGTAGINTGAWRLRSDYQLNQTDSDDNHEQSGEISRTYLFRPLPQLGSKLTLGETDFSSNIFDGFSYTGAALASDDRMLPWELRGYAPQISGIAQTNATVTISQSGRVIYQKKVPPGPFIIDDLNQSVQGTLDVKVTEEDGRVNNFQVSAASTPFLTRQGQVRYKLAAGQPRPSMSHQTENETFFSNEVSWGMLSNTSLYGGLLLSGDDYHSAAIGIGQNMLWLGALSFDVTWASSHFDTQQDERGLSYRFNYSKQVDATNSTISLAAYRFSDRHFHSYANYLDHKYNDSDAQDEKQTISLSVGQPITPLNLNLYANLLHQTWWNADASTTANITAGFNVDIGDWRDISISTSFNTTHYEDKDRDNQIYLSISLPFGNGGRVGYDMQNSSHSTTHRMSWNDTLDERNSWGMSAGLQSDRPDNGAQVSGNYQHLSSAGEWDISGTYAANDYSSVSSSWSGSFTATQYGAAFHRRSSTNEPRLMVSTDGVADIPVQGNLDYTNHFGIAVVPLISSYQPSTVAVNMNDLPDGVTVAENVIKETWIEGAIGYKSLASRSGKDVNVIIRNASGQFPPLGADIRQDDSGISVGMVGEEGHAWLSGVAENQKFTVVWGDSQHCSLHLPEHMEDTANRLILPCH

SEQ ID NO: 2818 - protein, 834 aa, Escherichia coli
MYKKLKLTTISELIKNIYCSLSVLIIGCASAYAVEFNKDLIEAEDRENVNLSQFETDGQLPVGKYSLNALINNKRTPIHLDLQWVLIDNQTAVCLTPEQLTLLGFTDEIIEEAQQNLIDGCYPIEKEKQITTYLDKGKMQLSISAPQAWLKYKDANWTPPELWDHGIAGAFLDYNLYASHYAPHQGDNSQNISSYGQAGVNLGAWRLRTDYQYDQSFNNGKSQANNLDFPRIYLFRPIPAINAKLTIGQYDTESSIFDSFHFSGVSLKSDENMLPPDLRGYAPQITGVAQTNAKVTVSQNNRIIYQENVPPGPFAITNLFNTLQGQLDVKVEEEDGQVTQWQVASNSIPYLTRKGQIRYTTAMGKPTSVGGDSLQQPFFWTGEFSWGWLNNVSLYGGSVLTNRDYQSLAAGVGFNLNSLGSLSFDVTRSDAQLHNQDKETGYSYRANYSKRFESTGSQLTFAGYRFSDKNFVTMNEYINDTNHYTNYQNEKESYIVTFNQYLESLRLNTYVSLARNTYWDASSNVNYSLSLSRDFDIGPLKNVSTSLTFSRINWEEDNQDQLYLNISIPWGTSRTLSYGMQRNQDNKISHTASWYDSSGRNNSWSVSASGDNDEFKDMKASLRASYQHNTENGRLYLSGTSQRDSYYSLNASWNGSFTATRHGAAFHDYSGSADSRFMIDADGAEDIPLNNKRAVTNRYGIGVIPSVSSYITTSLSVDTRNLPENVDIENSVITTTLTEGAIGYAKLDTRKGYQIMGVIRLADGSHPPLGISVKDKTSHKELGLVADGGFVYLNGIQDDSKLTLRWGDKSCFIQPPNSSNLTTGTVILPCISQN

SEQ ID NO: 2819 - protein, 207 aa, Escherichia coli; identical to SEQ ID NO: 2211

SEQ ID NO: 2820 - protein, 266 aa, Escherichia coli; identical to SEQ ID NO: 1894

SEQ ID NO: 2821 - protein, 232 aa, Escherichia coli; identical to SEQ ID NO: 2087

SEQ ID NO: 2822 - protein, 883 aa, Escherichia coli
MTAFRAAFKAYRMHQVLLLPRFARLTIALSLATAVFPVDAEYYFNPRFLSNDLAESVDLSAFTKGREAPPGTYRVDIYLNDEFMTSRDITFITDDNNADLIPCLSTDLLVSLGIKKSALLDNKEHSAEKHVPDNSACTPLQDRLVDASTEFDVGQQHLSLSVPQIYVGRMARGYVSPDLWEEGINAGLLNYSFNGNSINNRSNHNAGKSNYAYLNLQSGINIGSWRLRDNSTWSYNSGSSNSSDSNKWQHINTSAERDIIPLRSRLTVGDSYTDGDIFDSVNFRGLKINSTEAMLPDSQHGFAPVIHGIARGTAQVSVKQNGYDVYQTTVPPGPFTIDDINSAANGGDLQVTIKEADGSIQTLYVPYSSVPVLQRAGYTRYALAMGEYRSGNNLQSSPRFIQGSLMHGLEGNWTPYGGMQIAEDYQAFNLGIGKDLGLFGAFSFDITQANTTLADGTRHSGQSVKSVYSKSFYQTGTNIQVAGYRYSTQGFYNLSDSAYSRMSGYTVKPPTGDSNEQTQFIDYFNLFYSKRGQEQISISQQLGNYGATFFSASRQSYWNTSRSDQQISFGLNVPFGDITTSLNYSYSNNIWQNDRDHLLAFTLNVPFSHWMRTDSQSAFRNSNASYSMSNDLKGGMTNLSGVYGTLLPDNNLNYSVQVGNTHGGNTSSGTSGYSTLNYRGAYGNTNVGYSRSGDSSQIYYGMSGGIIAHADGITFGQPLGDTMVLVKAPGADNVKIENQTGIHTDWRGYAILPFATEYRENRVALNANSLADNVELDETVVTVIPTHGAIARATFNAQIGGKVLMTLKYGNKSVPFGAIVTHGENKNGSIVAENGQVYLTGLPQSGKLQVSWGNDKNSNCIVDYKLPEVSPGTLLNQQTAICR

SEQ ID NO: 2823 - protein, 835 aa, Escherichia coli
MKNNTSFAINGITYALLFSLAGAPTYAVDFNTDVLDAADRQNIDFSRFSQAGYIMPGQYQMEIMVNDQGISPSAFPVTFLEQPASVADGKKMLPQPCLTAEMVSRMGLTEASQKKVTYWNNGQCADLSQLPGVEIRPNLAEGMLYINMPQAWLEYSDASWLPPSRWDNGIPGLLFDYNLNGTVNKPHKGKQSQSLSYNGTAGANFGAWRLRADYQGNLNHTTGSGQGTDSQFTWSRFYMYRAIPRWRANLTLGENYINSEVFSSWRYTGASLESDDRMLPPKLRGYAPQVSGIADTNARVVISQQGRILYDSTVPAGPFTIQDLDSSVRGRLDVEVIEQDGRKKTFQVDTAYVPYLTRPGQIRYKLVSGRSRNYEHTTEGPVFAAGEASWGISNKWSLYGGGIVAGDYNALAVGLGRDLNEFGTVSADMTQSVARIPGEETKKGKSWRLSYSKRFDDVNADITFVGYRFSERNYMTMDQYLNARYRNDFTGREKELYTATFNKSFEDWNTSVNLQYSHQTYWDRRASDYYTLSVNRYFDAFGFKNVSLGLSASRSKYQKRDNDSAFVRLSVPWGTGTASYSGSMSNDRYTNTVGYSDTLNKGLSSYNLNAGVSSGGGQPSQSQMSAYYNHSSPLASLSANFSAVENGYTSFGMSASGGATITAKGAALHAGGMNGGTRLLVDTDGVGGVPVDGGRVATNRWGVGVVTDVSSYYRNTTSVDLNRLPEDMEATRSVVESVLTEGAIGYREFEVLKGSRLFAVLRLADNSYPPFGASVTNAKGRELGMVADSGLAWLSGVSPDETLSVDWDGRTQCVVDIPAKLDPAQQLLLHCRKTK

SEQ ID NO: 2824 - protein, 405 aa, Escherichia coli
MTERELSIIRALGEEFSTVLADLQRTFEGKMASQAQAFEEKLTSLSAVLQKHVTVDEVRPVLQAMVDDAVGAIPVPRDGRDYDPDVLQQAVNDAVANIPQPADGKSLTPDDVRPMLEQMVKEAVSHIPVPRDGRDYDPEVLQKAVNDAVANIPQPADGKSLTPDDVRPMLEQMVKEAVSHIPVPRDGRDYDPEVLQKAVNDAVANIPQPADGKSLTPDDVRPMLEQMVKEAVSHIPVPRDGRDYDPDVLQKAVLDAVSALPAPQDGRDATALEILPAIDDQKSFPRGTYATHQGGLWRAYEKTHGMRGWECLVDGVADIDVSMTGERLFSVVVRQSSGQRTEKTFSLPVMLYRGVFRAGETYHPGDTVTWGGSLWHCNSMTEDKPGEAHSSAWTLAAKRGRDAGG

SEQ ID NO: 2825 - protein, 89 aa, Escherichia coli
MKKMFMAVLFALVSVNAMAADCAKGKIEFSKYNENDTFTVKVAGKEYWTSRWNLQPLLQSAQLTGMTVTIKSSTCASGSGFAEVQFNND

SEQ ID NO: 2826 - protein, 359 aa, Escherichia coli; identical to SEQ ID NO: 2328

SEQ ID NO: 2827 - protein, 362 aa, Escherichia coli
MMKRNILAVIVPALLVAGTANAAEIYNKDGNKVDLYGKAVGLHYFSKGNGENSYGGNGDMTYARLGFKGETQINSDLTGYGQWEYNFQGNNSEGADAQTGNKTRLAFAGLKYADVGSFDYGRNYGVVYDALGYTDMLPEFGGDTAYSDDFFVGRVGGVATYRNSNFFGLVDGLNFAVQYLGKNERDTARRSNGDGVGGSISYEYEGFGIVGAYGAADRTNLQEAQPLGNGKKAEQWATGLKYDANNIYLAANYGETRNATPITNKFTNISGFANKTQDVLLVAQYQFDFGLRPSIAYTKSKAKDVEGIGDVDLVNYFEVGATYYFNKNMSTYVDYIINQIDSDNKLGVGSDDTVAVGIVYQF

SEQ ID NO: 2828 - protein, 181 aa, Escherichia coli
GSSLNDLVRTADELGIEVQYDEKNGTAITKQVFGTAEKLIGLTERGVTIFAPQLDKLLQKYQKAGNKLGGSAENIGDNLGKAGSVLSTFQNFLGTALSSMKIDELIKKQKSGSNVSSSELAKASIELINQLVDTAASINNNVNSFSQQLNKLGSVLSNTKHLNGVGNKLQNLPNLDNIGAG

SEQ ID NO: 2829 - protein, 119 aa, Escherichia coli; identical to SEQ ID NO: 2526

SEQ ID NO: 2830 - protein, 89 aa, Escherichia coli; identical to SEQ ID NO: 2812

SEQ ID NO: 2831 - protein, 124 aa, Escherichia coli; identical to SEQ ID NO: 2002

SEQ ID NO: 2832 - protein, 124 aa, Escherichia coli
MNKVKCYVLFTALLSSLYAHGAPQTITELCSEYRNTQIYTINDKILSYTESMAGKREMVIITFKSGETFQVEVPGSQHIDSQKKAIERMKDTLRITYLTETKIDKLCVWNNKTPNSIAAISMEN

SEQ ID NO: 2833 - protein, 89 aa, Escherichia coli
MKKTLLIAASLSFFSASALATPDCVTGKVEYTKYNDDDTFTVKVGDKELFTNRWNLQSLLLSAQITGMTVTIKTNACHNGGGFSEVIFR

SEQ ID NO: 2834 - protein, 43 aa, Escherichia coli
YWTSRWNLQPLLQSAQLTGMTVTIKSSTCESGSGFAEVQFNND

SEQ ID NO: 2835 - protein, 124 aa, Escherichia coli; identical to SEQ ID NO: 2001

SEQ ID NO: 2836 - protein, 240 aa, Escherichia coli
SNKNVNVRKSQEITFCLLAGILMFMAMVVAGRAEAGVALGATRVIYPAGQKQVQLAVTNNDENSTYLIQSWVENADGVKDGRFIVTPPLFAMKGKKENTLRILDATNNQLPQDRESLFWMNVKAIPSMDKSKLTENTLQLAIISRIKLYYRPAKLALPPDQAAEKLRFRRSANSLTLINPTPYYLTVTELNAGTRVLENALVPPMGESTVKLPSDAGSNITYRTINDYGALTPKMTGVME

SEQ ID NO: 2837 - protein, 89 aa, Escherichia coli
MKKVLLIAVSLSFLSASVLAAPDCVTGKVEYTKYNDDDTFTVKVADKELFTNRWNLQSLLLSAQITGMTVTIKTTACHNGGGFSEVIFR

SEQ ID NO: 2838 - protein, 247 aa, Escherichia coli
MKMRAVAVFTGMLTGVLSVTGLLSAGAYAAGGEGNMSASATETNARVFSLHLGATRVVYNPASSGETLTVINDQDYPMLVQSEVLSEDQKSPAPFVVTPPLFRLDGQQSSRLRIVRTGGEFPSDRESLQWICVKGIPPKEDDRWAEGKDGEKKADKVSLNVQLSVSSCIKLFVRPPAVKGRPDDVAGKVEWQRAGNRLKGVNPTPFYINLSTLTVGGKEVKEREYIAPFSSREYPLPAGHRVRFSGR

SEQ ID NO: 2839 - protein, 191 aa, Escherichia coli; identical to SEQ ID NO: 2727

SEQ ID NO: 2840 - protein, 46 aa, Escherichia coli
MKKMFMAVLFALVSVNAMAADCAKGKIEFSKYNENDTFTVKVAGKE

SEQ ID NO: 2841 - protein, 119 aa, Escherichia coli
MDAVLSVQGASAPVKKKSFFSKFTRLNMLRLARAVIPAAVLMMFFPQLAMAAQGQDLMASGNTTVKATFGKDSSVVKWVVLAEVLVGAVMYMMTKNVKFLAGFAIISVFIAVGMAVVGL

SEQ ID NO: 2842 - protein, 243 aa, Escherichia coli
MLKMKPALKKTLMAVACLSTVPAAQAAISLDRTRVIFNGGEKSMTLNIANDNKQLPYLAQAWVENEKKEKITTGPLIATPPVQRLEPDSKSMVRLTSTPDINRLPQDRESLFYFSLREIPPKSDKANVLQIALQTKIKLFYRPESIKAKPNAVWQDQLVLNKTTGGYQIENPTPYYVTVIGIGGNEKQAREGEFDAVMLAPKSTQMVKSGTYSTPYLSYINDYGGRPVLQFSCAGSRCTAVKK

SEQ ID NO: 2843 - protein, 89 aa, Escherichia coli; identical to SEQ ID NO: 2811

SEQ ID NO: 2844 - protein, 206 aa, Escherichia coli
MSLLEVIIVLGIIGTIAAGVVILAQRAFDSRAVTDLVTNTNTVRVAMKDAYQRDGVYPDYVSPLKLTSDTIKKDTGKIPAAQLVQLGKITPDEVRNNISGDFIAIGGALTSNGATVKKGFAIELNGLSQEQCRSILGQVGNNWEYVAVGNSASGSYAMQAAEVDMSVAATGDILRTLGTDGQKTLTAERILGTCTATVNSITLGSR

SEQ ID NO: 2845 - protein, 360 aa, Escherichia coli
MMKKYLALALIAPLLISCSTTKKGGTYNEAWVKDTNGFDILMGQFAHNIENIWGFKEVVIAGPKDYVKYTDQYQTRSHINFDDGTITIETIAGTEPAAHLRRAIIKTLLMGDDPSSVDLYSDVDDITISKEPFLYGQVVDNTGQPIRWEGRASNFADYLLKNRLKSRSNGLRIIYSVTINMVPNHLDKRAHKYLGMVRQASRKYGVDESLILAIMQTESSFNPYAVSRSDALGLMQVVQHTAGKDVFRSQGKSGTPSRSFLFDPASNIDTGTAYLAMLNNVYLGGIDNPTSRRYAVITAYNGGAGSVLRVFSNDKIQAANIINTMTPGDVYQTLTTRHPSAESRRYLYKVNTAQKSYRRR

SEQ ID NO: 2846 - protein, 860 aa, Escherichia coli
MRDTSSGRMKTGVTGLALAVMVACVMFRAESGIARTYSFDAAMLKGGGKGVDLTLFEEGGQLPGIYPVDIILNGSRVDSQEMAFHAERDAEGRPYLKTCLTREMLARYGVRIEEYPALFRVSGEGRGASVAEEACADLTAIPQATESYQFAAQQLVLGIPQVALRPQLRGIAPEALWDDGIPAFLLNWQANAGRSEYRGYGKRVTDSYWVSLQPGINIGPWRVRNLTTWNRSSGQSGKWESSYIRAERGLNGIKSRLTLGEDYTPSDIFDSVPFRGAMMSSDESMVPYNLREFAPVVRGIARTQARIEVRQNGYLIQSQTVAPGAFALTDLPVTGSGSDLQVTVLESDGTAQVFTVPFTTPAIALREGYLKYNVTAGQYRSPDDAVEHTSLGQVTVMYGLPWGLTVYGGVQGAEHYQAAALGLGWSLGRLGAVSLDTTHSRGQQKGHDYETGDTWRIRYNKSFELTGTSFTAASYQYSSDGYHTLPDVLDTWRDDRYTYRHTENRSRRTTLSLSQSLGQWGYVGLNGSRDEYRDRPHRDYFGASYSTSWNNISLSVNWSRNRNSGGYYGGWSRTEDSVSMWMSVPLGRWFGGTDNDISATAQMQRSTGQDTRYEAGLNGRAFDRRLYWDVREQMVPGSESHADTSRLNLTWYGTYGELTGMYSYSSTMRQLNAGMSGSMVAHSEGVTFGQRTGDTVALIAAPGVSGASVGGWPGVRTDFRGYTLAGYASPYQENVLTLDPTTFPEDAEVPQTDSRVVPTKGAVVRAGFRTRVGGRALVSLARQDGTPLPFGAVVTVEGEAGQAAGSAGVVGDRGEVYLSGLKESGKLKAQWGENSLCHADYRLPEEKGPAGIFLTRTVCM

SEQ ID NO: 2847 - protein, 89 aa, Escherichia coli
MKKIFVAALFAFVSVNAMAADCAKGKIEFSKYNENDTFTVKVAGKEYWTNRWNLQPLLQSAQLTGMTVTIKSNTCASGSGFAEVQFNND

SEQ ID NO: 2848 - protein, 364 aa, Escherichia coli
MKVKVLSLLVPALLVAGAANAAEIYNKDGNKLDLYGKVDGLHYFSDNDSKDGDKTYMRLGFKGETQVTDQLTGYGQWEYQIQGNEPESDNSSWTRVAFAGLKFQDVGSFDYGRNYGVVYDVTSWTDVLPEFGGDTYDSDNFMQQRGNGFATYRNTDFFGLVDGLDFAVQYQGKNGSAHGEGMTTNGRDDVFEQNGDGVGGSITYNYEGFGIGAAVSSSKRTWDQNNTGLIGTGDRAETYTGGLKYDANNIYLAAQYTQTYNATRVGSLGWANKAQNFEAVAQYQFDFGLRPSLAYLQSKGKNLGRGYDDEDILKYVDVGATYYFNKNMSTYVDYKINLLDDNQFTRAAGINTDDIVALGLVYQF

SEQ ID NO: 2849 - protein, 208 aa, Escherichia coli; identical to SEQ ID NO: 1949

SEQ ID NO: 2850 - protein, 161 aa, Escherichia coli; identical to SEQ ID NO: 2582

SEQ ID NO: 2851 - protein, 241 aa, Escherichia coli
MSNKNVNVRKSQEITFCLLAGILMFMAMMVAGRAEAGVALGATRVIYPAGQKQVQLAVTNNDENSTYLIQSWVENADGVKDGRFIVTPPLFAMKGKRENTLRILDATNNQLPQDRESLFWMNVKAIPSMDKSKLTENTLQLAIISRIKLYYRPAKLALPPDQAAEKLRFRRSANSLTLINPTPYYLTVTELNAGTRVLENALVPPMGESTVKLPSDAGSNITYRTINDYGALTPKMTGVME

SEQ ID NO: 2852 - protein, 122 aa, Escherichia coli
MNFKKSIALLFIALNIASLPTYAGVSKTFKDKCASTTAKLVQSVQLVKLASDTNKDSKGIYITDSTGKTRFIPGGQYYPENYLSNEMRKIAMAAVLSNVRVNICASEAYTPNHVWAIELAAE

SEQ ID NO: 2853 - protein, 233 aa, Escherichia coli
MKRIALFFCFIFSFAAHANNIIVNGTRFIYPGNEKEITVQLSNNADRPALAQAWLDNGDADATPDTITTPFIITPPISRVDAKSGQTLRIKLGSSAGLAKDKETLWWLNLLEIPPVVANQKNEGQNVLQLAIRSRFKFIYRPAGLGNRDAAAEKLTLTASGSSLAINNPTPFYITVSRISRDGGKALNSKTVMLAPQSSQTVALSSAVNRGETLTVNNINDYGADVAVKVAVK

SEQ ID NO: 2854 - protein, 451 aa, Escherichia coli
APQLDKLLQKYQKVGSKIGRTAENVGNNLGKAGTVLSALQNFTGIALSGMALDELLRKQREGEDISQNDIAKSSIELINQLVDTVSSINSTVDSFSEQLNQLGSFLSSKPRLSSVGGKLQNLPDLGSLGDGLDVVSGILSAVSASFILGNSDAHTGTKAAAGIELTTQVLGNVGKAVSQYILAQRMAQGLSTTAASAGLITSAVMLAISPLSFLAAADKFERAKQLESYSERFKKLNYEGDALLAAFHKETGAIDAALTTINTVLSSVSAGVSAASSASLIGAPISMLVSALTGTISGILEASKQAMFEHVAEKFAARINEWEKEHGKNYFENGYDARHAAFLEDSLSLLADFSRQHAVERAVAITQQHWDEKIGELAGITRNADRSQSGKAYINYLENGGLLEAQPKEFTQQVFDPQKGTIDLSTGNVSSVLTFITPTFTPGEEVRERKQ

SEQ ID NO: 2855 - protein, 878 aa, Escherichia coli
MSYLNLRLYQRNTQCLHIRKHRLAGFFVRLFVACAFAVQAPLSSAELYFNPRFLADDPQAVADLSRFENGQELPPGTYRVDIYLNNGYMATRDVTFNTGDSEQGIVPCLTRAQLASMGLNTASVAGMNLLADDACVPLTTMVQDATAHLDVGQQRLNLTIPQAFMSNRARGYIPPELWDPGINAGLLNYNFSGNSVQNRIGGNSHYAYLNLQSGLNIGAWRLRDNTTWSYNSSDRSSGSKNKWQHINTWLERDIIPLRSRLTLGDGYTQGDIFDGINFRGAQLASDDNMLPDSQRGFAPVIHGIARGTAQVTIKQNGYDIYNSTVPPGPFTINDIYAAGNSGDLQVTIKEADGSTQIFTVPYSSVPLLQREGHTRYSITAGEYRSGNAQQEKPRFFQSTLLHGLPAGWTIYGGTQLADRYRAFNFGIGKNMGALGALSVDMTQANSTLPDDSQHDGQSVRFLYNKSLNESGTNIQLVGYRYSTSGYFNFADTTYSRMNGYNIETQDGVIQVKPKFTDYYNLAYNKRGKLQLTVTQQLGRSSTLYLSGSHQTYWGTSNVDEQFQAGLNTAFEDINWTLSYSLTKNAWQKGRDQMLARNVNIPFSHWLRSDSKSQWRHASASYSMSHDLNGRMTNLAGVYGTLLEDNNLSYSVQTGYAGGGDGNSGSTGYATLNYRGGYGNANIGYSHSDDIKQLYYGVSGGVLAHANGVTLGQPLNDTVVLVKAPGAKDAKVENQTGVRTDWRGYAVLPYATEYRENRVALDTNTLADNVDLDNAVANVVPTRGAIVRAEFKARVGIKLLMTLTHNNKPLPFGAMVTSESSQSSGIVADNGQVYLSGMPLAGKVQVKWGEEENAHCVANYQLPPESQQQLLTQLSAECR

SEQ ID NO: 2856 - protein, 331 aa, Escherichia coli
MELLCPAGNLPALKAAIENGADAVYIGLKDDTNARHFAGLNFTEKKLQEAVSFVHQHRRKLHIAINTFAHPDGYARWQRAVDMAAQLGADALILADLAMLEYAAERYPHIERHVSVQASATNEEAINFYHRHFDVARVVLPRVLSIHQVKQLARVTPVPLEVFAFGSLCIMSEGRCYLSSYLTGESPNTVGACSPARFVRWQQTPQGLESRLNEVLIDRYQDGENAGYPTLCKGRYLVDGERYHALEEPTSLNTLELLPELMAANIASVKIEGRQRSPAYVSQVAKVWRQAIDRCKADPQNFVPQSAWMETLGSMSEGTQTTLGAYHRKWQ

SEQ ID NO: 2857 - protein, 451 aa, Escherichia coli
APQLDKLLQKYQKVGSKIGGTAENVGNNLGKAGTVLSALQNFTGIALSGMALDELLRKQREGEDISQNDIAKSSIELINQLVDTVSSINSTVDSFSEQLNQLGSFLSSKPRLSSVGGKLQNLPDLGPLGDGLDVVSGILSAVSASFILGNSDAHTGTKAAAGIELTTQVLGNVGKAVSQYILAQRMAQGLSTTAASAGLITSAVMLAISPLSFLAAADKFERAKQLESYSERFKKLNYEGDALLAAFHKETGAIDAALTTINTVLSSVSAGVSAASSASLIGAPISMLVSALTGTISGILEASKQAMFEHVAEKFAARINEWEKEHGKNYFENGYDARHAAFLEDSLSLLADFSRQHAVERAVAITQQHWDEKIGELAGITRNADRSQSGKAYINYLENGGLLEAQPKEFTQQVFDPQKGTIDLSTGNVSSVLTFITPTFTPGEEVRERKQ

SEQ ID NO: 2858 - protein, 77 aa, Escherichia coli
MKKTLLIAASLSFFSASALATPDCVTGKVEYTKYNDDDTFTVKVGDKELFTNRWNLQSLLLSAQITGMTVTIKTNAC

SEQ ID NO: 2859 - protein, 83 aa, Escherichia coli
MKKTLLIAASLSFFSASALATPDCVTGKVEYTKYNDDDTFTVKVGDKELFTNRWNLQSLLLSAQITGMTVTIKTNACHNGGGF

SEQ ID NO: 2860 - protein, 65 aa, Escherichia coli
MKKMFMAVLFALVSVNAMAADCAKGKIEFSKYNENDTFTVKVAGKEYWTSRWNLQPLLQSAQLTG

SEQ ID NO: 2861 - protein, 65 aa, Escherichia coli
MKKMFMAVLFALVSVNAMAADCAKGKIEFSKYNEDDTFTVKVDGKEYWTSRWNLQPLLQSAQLTG

SEQ ID NO: 2862 - protein, 44 aa, Escherichia coli
EYWTSRWNLQPLLQSAQLTGMTVTIKSSTCESGSGFAEVQFNND

SEQ ID NO: 2863 - protein, 241 aa, Escherichia coli
MSNKNVNVRKSQEITFCLLAGILMFMAMVVAGRAEAGVALGATRVIYPAGQKQVQLAVTNNDENSTYLIQSWVENADGVKDGRFIVTPPLFAMKGKRENTLRILDATNNQLPQDRESLFWMNVKAIPSMDKSKLTENTLQLAIISRIKLYYRPAKLALPPDQAAEKLRFRRSANSLTLINPTPYYLTVTELNAGTRVLENALVPPMGESTVKLPSDAGSNITYRTINDYGALTPKMTGVME

SEQ ID NO: 2864 - protein, 231 aa, Escherichia coli
MMKHMRIWAVLASFLVFFYIPQSYAGVALGATRVIYPEGQKQVQLAVTNNDDKSSYLIQSWIENAEGKKDARFVITPPLFSMQGKKENTLRIIDATNGQMPEDRESLFWVNVKAIPAMDKAKTGENYLQFAIVSRIKLLYRPQGLVIPPEQAPGKLEFTRENGGLTLFNPTPYYLTVTDLKAGNKSLENTMVPPQGKVTVNIPGGYTGGDITYKTINDYGALTEQVKGVVK

SEQ ID NO: 2865 - protein, 760 aa, Escherichia coli; identical to SEQ ID NO: 2078

SEQ ID NO: 2866 - protein, 181 aa, Escherichia coli
MKSKLIILLMLVPFSSFSTGNNFEINKTRVIYSDSTPSVQISNNKAYPLIIQSNIWDENNNKNHDFIATPPIFKMESESRNIIKIIKTNIKLPDSQESMRWLCIESMPPTEKSTKINRKEGRTDSINISIRGCIKLIYRPASVPSPVFNNIVEKLKWHKNGKYLVLKNNTPYYISFSEVFF

SEQ ID NO: 2867 - protein, 121 aa, Escherichia coli; identical to SEQ ID NO: 2522

SEQ ID NO: 2868 - protein, 231 aa, Escherichia coli
MSKRTFAMIFTLLCSFCIGQALAGGIVLQRTRVIYDASRKEAALPVANKGAETPYLLQSWVDNIDGTSRAPFIITPPLIRLEAGDDSSLRIIKTADNLPENKESLFYINVRAIPAKKKSDDVNANELTLVFKTRIKMFYRPAHLKGRVSDAWKSLEFKRSDHSLNIYNPTEYYVVFAGLAVDKADLTSKIEYIAPGEHKQLPLPASGGKNVKWAAINDYGGSSGTETRPLQ

SEQ ID NO: 2869 - protein, 43 aa, Escherichia coli
YWTSRWNLQPLLQSAQLTGMTVTIKSSTCASGSGFAEVQFNND

SEQ ID NO: 2870 - protein, 725 aa, Escherichia coli
MRINKILWSLTVLLVGLNSQVSVAKYSDDDNDETLVVEATAEQVLKQQPGVSVITSEDIKKTPPVNDLSDIIRKMPGVNLTGNSASGTRGNNRQIDIRGMGPENTLILIDGVPVTSRNSVRYSWRGERDTRGDTNWVPPEQVERIEVIRGPAAARYGSGAAGGVVNIITKRPTNDWHGSLSLYTNQPESSEEGATRRANFSLSGPLAGDALTTRLYGNLNKTDADSWDINSPVGTKNAAGHEGVRNKDINGVVSWKLNPQQILDFEVGYSRQGNIYAGDTQNSSSSAVTESLAKSGKETNRLYRQNYGITHNGIWDWGQSRFGVYYEKTNNTRMNEGLSGGGEGRILAGEKFTTNRLSSWRTSGELNIPLNVMVDQTLTVGAEWNRDKLDDPSSTSLTVNDRDISGISGSAADRSSKNHSQISALYIEDNIEPVPGTNIIPGLRFDYLSDSGGNFSPSLNLSQELGDYFKVKAGVARTFKAPNLYQSSEGYLLYSKGNGCPKDITSGGCYLIGNKDLDPEISVNKEIGLEFTWEDYHASVTYFRNDYQNKIVAGDNVIGQTASGAYILKWQNGGKALVDGIEASMSFPLVKERLNWNTNATWMITSEQKDTGNPLSVIPKYTINNSLNWTITQAFSASFNWTLYGRQKPRTHAETRSEDTGGLSGKELGAYSLVGTNFNYDINKNLRLNVGVSNILNKQIFRSSEGANTYNEPGRAYYAGVTASF

SEQ ID NO: 2871 - protein, 87 aa, Escherichia coli
MKKIFVAALFAFVSVNAMAADCAKGKIEFSKYNENDTFTVKVAGKEYWTNRWNLQPLLQSAQLTGMTVTIKSNTCASGSGFAEVQFN

SEQ ID NO: 2872 - protein, 351 aa, Escherichia coli
MKKSTLALVVMGIVASASVQAAEIYNKDGNKLDVYGKVKAMHYMSDNDSKDGDQSYIRFGFKGETQINDQLTGYGRWEAEFAGNKAESDTAQQKTRLAFAGLKYKDLGSFDYGRNLGALYDVEAWTDMFPEFGGDSSAQTDNFMTKRASGLATYRNTDFFGVIDGLNLTLQYQGKNENRDVKKQNGDGFGTSLTYDFGGSDFAISGAYTNSDRTNEQNLQSRGTGKRAEAWATGLKYDANNIYLATFYSETRKMTPITGGFANKTQNFEAVAQYQFDFGLRPSLGYVLSKGKDIEGIGDEDLVNYIDVGATYYFNKNMSAFVDYKINQLDSDNKLNINNDDIVAVGMTYQF

SEQ ID NO: 2873 - protein, 998 aa, Escherichia coli
MTVNKIKNIFNNATSTTKSAFNTASSSVRSAGKKLILLIPDNYEAQGVGINELVKAADDLGIEIHRTERDDTAIANQFFGTAEKVVGLTERGVAIFAPQLDKLLQKYQKVGSKIGGTAENVGNNLGKAGTVLSALQNFTGIALSGMALDELLRKQREGEDISQNDIAKSSIELINQLVDTVSSINSTVDSFSEQLNQLGSFLSSKPRLSSVGGKLQNLPNLGPLGDGLDVVSGILSAVSASFILGNSDAHTGTKAAAGIELTTQVLGNVGKAVSQYILAQRMAQGLSTTAASAGLITSAVMLAISPLSFLAIADKFERAKQLESYSERFKKLNYEGDALLAAFHKETGAIDAALTTINTVLSSVSAGVSAASSASLIGAPISMLVSALTGTISGILEASKQAMFEHVADKFAARINEWEKEHGKNYFENGYDARHAAFLEDSLSLLADFSRQHAVERAVAITQQHWDEKIGELAGITRNADRSQSGKAYINYLENGGLLEAQPKEFTQQVFDPQKGTIDLSTGNVSSVLTFVTPTFTPGEEVRERKQSGKYEYMTSLIVNGKDTWSVKGIKNHKGVYDYSNLIQFVEKDNKHYQARIISELGDKDDIVYSGAGSSEVFAGEGHDTVSYNKTDVGKLTIDATGASKPGEYIVSKNMYGDVKVLQEVVKEQEVSVGKRTEKIQYRDFEFRTGGIPYDVIDNLHSVEELIGGKHDDEFKGGKFNDIFHGADGNDYIEGNYGNDRLYGDDRDDYISGGQGDDQLFGGSGNDKLSGGDGNNYLTGGSGNDELQAHGAYNILSGGTGDDKLYGGGGIDLLDGGEGNDYLNGGFGNDIYVYRQNYGHHTIADEGGKGDRLHLSDISFDDIAFKRVGNDLIMNKAINGVLSFNESNDVNGITFKNWFAKDASGADNHLVEVITDKDGREIKADKIPHNNNERSGYIKASNIASEKNMVNITSVADDINKIISSVSGFDSGDERLASLYNLSLHQNNTHSTTLTTTV

SEQ ID NO: 2874 - protein, 551 aa, Escherichia coli; identical to SEQ ID NO: 2446

SEQ ID NO: 2875 - protein, 266 aa, Escherichia coli; identical to SEQ ID NO: 1892

SEQ ID NO: 2876 - protein, 362 aa, Escherichia coli; identical to SEQ ID NO: 2434

SEQ ID NO: 2877 - protein, 695 aa, Escherichia coli
MRITILASVVIPCLGFSASCMAAEDVMIVSASGYEKKLTNAAASVSVINQEELQSSQYHDLAEALRSVEGVDVESGTGKTGGLEVSIRGMPASYTLILIDGVRQGGSSDVTPNGFSAMNTGFMPPLAAIERIEVIRGPMSTLYGSDAMGGVVNIITKKNADKWHSSINAGLNQQESNKWGNSSQFNFWSSGPLVDDSVSLQIRGSTQQRQGSSVTSLSDTAATRIPYPTESQNYNLGARIDWKTTEQDMLWFDMDTTRQRYDNRDGQLGSLTGGYDHTLRYERNKISAGYDHAFTFGTWKSYLNWNETENKGRELVRSVLKSDKWGLAGKPRELKESNLILNSLLLTPLGESHLVTVGGEYQSSSMKDGVVLASTGETFRQKSWSVFAEDEWHLTDALALTAGSRYEHHEQFGGHLSPRAYLVWDVTDAWTLKGGVTTGYKAPSMGQLHKGISGVSGQGRTNLLGNPELKPEESVSYEAGVYYDNLAGLNANITGFITDFSNKIVSYSIDDNTNSYTNSGKARLHGVEFAGTLPLWSEDVTLSLNYTWTQSEQRDGDNKGAPLSYTPEHMVNAKLNWQITEEVASWLGARYRDKTPRFTQNYSSLSAVQKKVYDEKGEYLKAWTVVDAGMSWKVTDTLALNAAVNNVLNKDYSDVSLYRAGSSTLYAGDYFQTGASTTGYVIPERNYWMSLNYQF

SEQ ID NO: 2878 - protein, 189 aa, Escherichia coli
MPARHLYFIMTNTWNRLALLIFAVLSLLVAGELQAGVVVGGTRFIFPADRESISILLTNTSQESWLINSKINRPTRWAGGEASTVPAPLLAAPPLILLKPGTTGTLRLLRTESDILPVDRETLFELSIASVPSGKVENQSVKVAMRSVFKLFWRPEGCRATRWKLINNYAGHGSRRVYNSLTQRLITLT

SEQ ID NO: 2879 - protein, 193 aa, Escherichia coli; identical to SEQ ID NO: 2250

SEQ ID NO: 2880 - protein, 342 aa, Escherichia coli
MSAQAMAVDFHGYARSGIGWTGSGGEQQCFQTTGAQSKYRLGNECETYAELKLGQEVWKEGDKSFYFDTNVAYSVAQQNDWEATDPAFREANVQGKNLIEWLPGSTIWAGKRFYQRHDVHMIDFYYWDISGPGAGLENIDVGFGKLSLAATRSSEAGGSSSFASNNIYDYTNETANDVFDVRLAQMEINPGGTLELGVDYGRANLRDNYRLVDGASKDGWLFTAEHTQSVLKGFNKFVVQYATDSMTSQGKGLSQGSGVAFDNEKFAYNINNNGHMLRILDHGAISMGDNWDMMYVGMYQDINWDNDNGTKWWTVGIRPMYKWTPIMSTVMEIGYDNVESQH

SEQ ID NO: 2881 - protein, 733 aa, Escherichia coli
MMISKKYTLWALNPLLLTMMAPAVAQQTDDETFVVSANRSNRTVAEMAQTTWVIENAELEQQIQGGKELKDALAQLIPGLDVSSRSRTNYGMNVRGRPLVVLVDGVRLNSSRTDSRQLDSIDPFNIDHIEVISGATSLYGGGSTGGLINIVTKKGQPETMMEFEAGTKSGFSSSKDHDERIAGAVSGGNEHISGRLSVAYQKFGGWFDGNGDATLLDNTQTGLQYSDRLDIMGTGTLNIDESRQLQLITQYYKSQGDDDYGLNLGKGFSAIRGTSTPFVSNGLNSDRIPGTERHLISLQYSDSAFLGQELVGQVYYRDESLRFYPFPTVNANKQVTAFSSSQQDTDQYGMKLTLNSKPMDGWQITWGLDADHERFTSNQMFFDLAQASASGGLNNKKIYTTGRYPSYDITNLAAFLQSGYDINNLFTLNGGVRYQYTENKIDDFIGYAQQRQIAAGKATSADAIPGGSVDYDNFLFNAGLLMHITERQQAWLNFSQGVELPDPGKYYGRGIYGAAVNGHLPLTKSVNVSDSKLEGVKVDSYELGWRFTGNNLRTQIAAYYSISDKSVVANKDLTISVVDDKRRIYGVEGAVDYLIPDTDWSTGVNFNVLKTESKVNGTWQKYDVKTASPSKATAYIGWAPDPWSLRVQSTTSFDVSDAQGYKVDGYTTVDLLGSYQLPVGTLSFSIENLFDRDYTTVWGQRAPLYYSPGYGPASLYDYKGRGRTFGLNYSVLF

SEQ ID NO: 2882 - protein, 128 aa, Escherichia coli
MNIKQRNHMNTVLSVQGASAPVKKKSFFSKFTRLNMLRLARAVIPAAVLMMFFPQLAMAAQGQDLMASGNTTVKATFGKDSSVVKWVVLAEVLVGAVMYMMTKNVKFLAGFAIISVFIAVGMAVVGLK

SEQ ID NO: 2883 - protein, 240 aa, Escherichia coli
SNKNVNVRKSQEITFCLLAGILMFMAMMVAGRAEAGVALGATRVIYPAGQKQVQLAVTNNDENSTYLIQSWVENADGVKDGRFIVTPPLFAMKGKKENTLRILDATNNQLPQDRESLFWMNVKAIPSMDKSKLTENTLQLAIISRIKLYYRPAKLALPPDQAAEKLRFRRSANSLTLINPTPYYLTVTELNAGTRVLENALVPPMGESAVKLPSDAGSNITYRTINDYGALTPKMTGVME

SEQ ID NO: 2884 - protein, 241 aa, Escherichia coli
MSNKNVNVRKSQEITFCLLAGILMFMAMMVAGRAEAGVALGATRVIYPAGQKQVQLAVTNNDENSTYLIQSWVENADGVKDGRFIVTPPLFAMKGKKENTLRILDATNNQLPQDRESLFWMNVKAIPSMDKSKLTENTLQLAIISRIKLYYRPAKLALPPDQAAEKLRFRRSANSLTLINPTPYYLTVTELNAGARVLENALVPPMGESTVKLPSDAGSNITYRTINDYGALTPKMTGVME

SEQ ID NO: 2885 - protein, 240 aa, Escherichia coli
SNKNVNVRKSQEITFCLLAGILMFMAMMVAGRAEAGVALGATRVIYPAGQKQVQLAVTNNDENSTYLIQSWVENADGVKDGRFIVTPPLFAMKGKKENTLRILDATNNQLPQDRESLFWMNVKAIPSMDKSKLTENTLQLVIISRIKLYYRPAKLALPPDQAAEKLRFRRSANSLTLINPTPYYLTVTELNAGTRILENALVPPMGESTVKLPSDAGSNITYRTINDYGALTPKMTGVME

SEQ ID NO: 2886 - protein, 162 aa, Escherichia coli; identical to SEQ ID NO: 1969

SEQ ID NO: 2887 - protein, 241 aa, Escherichia coli
MSNKNVNVRKSQEITFCLLAGILMFMAMMVAGRAEAGVALGATRIIYPAGQKQVQLAVTNNDENSTYLIQSWVENADGVKDGRFIVTPPLFAMKGKKENTLRILDATNNQLPQDRESLFWMNVKAIPSMDKSKLTENTLQLAIISRIKLYYRPAKLALPPDQAAEKLRFRRSANSLTLINPTPYYLTVTELNAGARVLENALVPPMGESTVKLPSDAGSNITYRTINDYGALTPKMTGVME

SEQ ID NO: 2888 - protein, 357 aa, Escherichia coli
MMKRNILAVIVPALLVAGTANAAEIYNKDGNKVDLYGKAVGLHYFSKDNGVNSYGGNGDKTYARLGFKGETQINSDLTGYGQWEYNFQGNNSEGADAQKGNKTRLAFAGLKFADAGSIDYGRNYGVVYDALGYTDMLPEFGGDTAYSDDFFVGRVGGVATYRNSNFFGLVDGLNFAVQYLGKNERAGIPERSNGDGVGGSISYEFEGFGIVGAYGAADRTDAQEAEFRGQGKKAEQWATGLKYDANNIYLAANYGETRNATPIEGGFANKTQDVLLVAQYQFDFGLRPSIAYTKSKAKDVEGIGDVDLVNYFEVGATYYFNKNMSTYVDYIINQIDSDNKLGVGSDDTVAVGIVYQF

SEQ ID NO: 2889 - protein, 585 aa, Escherichia coli
MLNEEQYYQFFLSVLDVYGFAVVDMHNGILKVVRSKDAKTSAVPVASDVSPGTGDEVVTRVVPVSNVAARDLAPLLRQLNDNAGAGSVVHYEPSNVLLMTGRAAVMKRLMEIVERVDKVGNRSVATVPLTYASATDVARLVTELTKETDKTAIPAWMTAKLVADERTNSVLVSGEPISQQRIISIIKQLDRQEDVQGNTKVIYLKYAKAKDLVEVLTGISSSIENDSKKSPSTEALRKGVTIKSHEQTNALILTGAPDVIRDLENVISQLDIRRPQVLVEAIIAEIQDADGLNLGIQWVNKHAGVAQFTSTGLPITTMVQTRQNEILDSDQSNALSMFNGIAAGFYQGNWAMLLTALSTSSKNDILATPSIVTLDNMEATFNVGQEVPVLSGSQTTSGDNIFNTVERKTVGIKLRVKPQINEGDSVLLEIEQEVSGVADTAVATTTDLGATFNTRTVTNAMLVGNGETVVVGGLLDKSIRGSESKVPLLGDIPVLGHLFRAKSEQTAKRNLMLFIRPTIIRERDGFRHASAEKYQSFNQEQVQSRGKETTALTLNEEQLRLSPDQDDTAFRKVKAAIAAFYAQEM

SEQ ID NO: 2890 - protein, 241 aa, Escherichia coli
MSNKNVNVRKSQEITFCLLAGILMFMAMMVAGRAEAGVALGATRVIYPAGQKQVQLAVTNNDENSTYLIQSWVENADGVKDGRFIVTPPLFAMKGKKENTLRILDATNNQLPQDRESLFWMNVKAIPSMDKSKLTENTLQLAIISRIKLYYRPAKLALPPDQAAEKLRFRRSANSLTLINPTPYYLTVTELNAGTRVLENALVPPMGESAVKLPSDAGSNITYRTINDYGALTPKMTGVME

SEQ ID NO: 2891 - protein, 274 aa, Escherichia coli
MNKTAIALLALLASSVSLAATPWQKITQPVPGSAQSIGSFSNGCIVGADTLPIQSEHYQVMRTDQRRYFGHPDLVMFIQRLSSQVSNLGMGTVLIGDMGMPAGGRFNGGHASHQTGLDVDIFLQLPKTRWTSAQLLRPQALDLVSRDGKHVVSTLWKPEIFSLIKLAAQDKDVTRIFVNPAIKQQLCLDAGTDRDWLRKVRPWFQHRAHMHVRLRCPADSLECEDQPLPPPGDGCGAELQSWFEPPKPGTTKPEKKTPPPLPPSCQALLDEHVI

SEQ ID NO: 2892 - protein, 200 aa, Escherichia coli; identical to SEQ ID NO: 1788

SEQ ID NO: 2893 - protein, 247 aa, Escherichia coli
MKMRAVAVFTGMLTGVLSVTGLLSAGAYAAGGEGNMSASATETNARVFSLHLGATRVVYNPASSGETLTVINDQDYPMLVQSEVLSEDQKSPAPFVVTPPLFRLDGQQSSRLRIVRTGGEFPSDRESLQWICVKGIPPKEDDRWAEGKDGEKKADKVSLNVQLSVSSCIKLFVRPPAVKGQPDDVAGKVEWQRAGNRLKGVNPTPFYINLSALTVGGKEVKEREYIAPFSSREYPLPAGHRVRFSGR

SEQ ID NO: 2894 - protein, 240 aa, Escherichia coli
SNKNVNVRKSQEITFCLLAGILMFMAMMVAGRAEAGVALGATRVIYPAGQKQVQLAVTNNDENSTYLIQSWVENADGVKDGRFIVTPPLFAMKGKRENTLRILDATNNQLPQDRESLFWMNVKAIPSMDKSKLTENTLQLAIISRIKLYYRPAKLALPPDQAAEKLRFRRSANSLTLINPTPYYLTVTELNAGTRVLENALVPPMGESTVKLPSDAGSNITYRTINDYGALTPKMTGVME

SEQ ID NO: 2895 - protein, 240 aa, Escherichia coli
SNKNVNVRKSQEITFCLLAGILIFMAMMVAGRAEAGVALGATRVIYPAGQKQVQLAVTNNDENSTYLIQSWVENADGVKDGRFIVTPPLFAMKGKKENTLRILDATNNQLPQDRESLFWMNVKAIPSMDKSKLTENTLQLAIISRIKLYYRPAKLALPPDQAAEKLRFRRSANSLTLINPTPYYLTVTELNAGTRVLENALVPPMGESTVKLPSDAGSNITYRTINDYGALTPKMTGVME

SEQ ID NO: 2896 - protein, 472 aa, Escherichia coli
MSTIHTPLTYNEINGKPFGLDYELAKQFADYLGVKLKVTVRQNISQLFDDLDNGNADLLAAGLVYNSERVKNYQPGPTYYSVSQQLVYKVGQYRPRTLGNLTAEQLTVAPGHVVVNDLQTLKETKFPELSWKVDDKKGSAELMEDVIEGKLDYTIADSVAISLFQRVHPELAVALDITDEQPVTWFSPLDGDNTLSAALLDFFNEMNEDGTLARIEEKYLGHGDDFDYVDTRTFLRAVDAVLPQLKPLFEKYAEEIDWRLLAAIAYQESHWDAQATSPTGVRGMMMLTKNTAQSLGITDRTDAEQSISGGVRYLQDMMSKVPESVPENERIWFALAAYNMGYAHMQDARALTAKTKGNPDSWADVKQRLPLLSQKPYYSKLTYGYARGHEAYAYVENIRKYQISLVGYLQEKEKQATEAAMQLAQDYPAVSPTELGKEKFPFLSFLSQSSSNYLTHSPSLLFSRKGSEEKQN

SEQ ID NO: 2897 - protein, 232 aa, Escherichia coli
MKSKLIILLMFVPFSSFSTGNNFEINKTRVIYSDSTPSVQISNNKAYPLIIQSNIWDENNNKNHDFIATPPIFKMESESRNIIKIIKTNIKLPDSQESMRWLCIESMPPTEKSTKINRKEGRTDSINISIRGCIKLIYRPASVPSPVFNNIVEKLKWHKNGKYLVLKNNTPYYISFSEVFFDSDKVNNAKDILYVKPYSEKKIDISNRIIKKIKWAMIDDAGAKTKLYESIL

SEQ ID NO: 2898 - protein, 243 aa, Escherichia coli
MLKMKPALKKTLMAVACLSTVPAAQAAISLDRTRVIFNGGEKSMTLNIANDNKQLPYLAQAWVENEKKEKITTGPLIATPPVQRLEPDSKSMVRLTSTPDINRLPQDRESLFYFSLREIPPKSDKANVLQIALQTKIKLFYRPESIKAKPNAVWQDQLVLNKTTGGYQIENPTPYYVTVIGIGGNEKQAKEGEFDAVMLAPKSTQMVKSGTYSTPYLSYINDYGGRPVLQFSCAGSRCTAVKK

SEQ ID NO: 2899 - protein, 89 aa, Escherichia coli; identical to SEQ ID NO: 2810

SEQ ID NO: 2900 - protein, 883 aa, Escherichia coli
MTAFRAAFKAYRMHQVLIMPRFARLTIALGLATAVFPVDAEYYFNPRFLSNDLAESVDLSAFTKGREAPPGTYRVDIYLNDEFMTSRDITFIADDNNAELIPCLSTDLLVSLGIKKIALLDNKEHSAEKHVPDNSACTPLQDRLADASTEFDVGQQHLSLSVPQIYVGRMARGYVSPDLWEEGINAGLLNYSFNGNSINNRSNHNAGKSNYAYLNLQSGINIGSWRLRDNSTWSYYSGSSNSSDSNKWQHINTSAERDIIPLRSRLTVGDSYTDGDIFDSVNFRGLKINSTEAMLPDSQHGFAPVIHGIARGTAQVSVKQNGYDVYQTTVPPGPFTIDDINSAANGGDLQVTIKEADGSIQTLYVPYSSVPVLQRAGYTRYALAMGEYRSGNNLQSSPKFIQGSLMHGLEGNWTPYGGMQIAEDYQAFNLGIGKDLGLFGAFSFDITQANTTLADGTRHSGQSVKSVYSKSFYQTGTNIQVAGYRYSTQGFYNLSDSAYSRMSGYTVKPPTGDSNEQTQFIDYFNLFYSKRGQEQISISQQLGNYGTTFFSASRQSYWNTSRSDQQISFGLNVPFGDITTSLNYSYSNNIWQNDRDHLLAFTLNVPFSHWMRTDSQSAFRNSNASYSMSNDLKGGMTNLSGVYGTLLPDNNLNYSVQVGNTHGGNTSSGTSGYSSLNYRGAYGNTNVGYSRNGDSSQIYYGMSGGIIAHADGITFGQPLGDTMVLVKAPGADNVKIENQTGIHTDWRGYAILPFATEYRENRVALNANSLADNVELNETVVTVIPTHGAIARATFNAQIGGKVLMTLKYGNKSVPFGAIVTHGENKNGSIVAENGQVYLTGLPQSGQLQVSWGKDKNSNCIVEYKLPEVSPGTLLNQQTAICR

SEQ ID NO: 2901 - protein, 656 aa, Escherichia coli
MYMNVIRTVICTLIILPVGLQAATSHSSMVKDTITIVATGNQNTVFETPSMVSVVTNDTPWSQNAVTSAGMLKGVAGLSQTGAGRTNGQTFNLRGYDKSGVLVLVDGVRQLSDMAKSSGTYLDPALVKRIEVVRGPNSSLYGSGGLGGVVDFRTADAADFLPPGETNGLSLWGNIASGDHSTGSGLTWFGKTGKTDALLSVIMRKRGNIYQSDGEHAPNKEKPAALFAKGSVGITDSNKAGASLRLYRNNTTEPGNSTQTHGDSGLRDRKTVQNDVQFWYQYAPVDNSLINVKSTLYLSDITIKTNGHNKTAEWRNNRTSGVNVVNRSHTLIFPGAHQLSYGAEYYRQQQKPEGSATLYPEGNIDFTSLYFQDEMTMKSYPVNIIVGSRYDRYKSFNPRAGELKAERLSPRAAISVSPTDWLMMYGSISSAFRAPTMAEMYRDDVHFYRKGKPNYWVPNLNLKPENNITREIGAGIQLDGLLTDNDRLQLKGGYFGTDARNYIATRVDMKRMRSYSYNVSRARIWGWDMQGNYQSDYVDWMLSYNRTESMDASSREWLGSGNPDTLISDISIPVGHRGVYAGWRAELSASATHVKKGDPHQAGYTIHSFSLSYKPVSVKGFEASVTLDNAFNKLAMNGKGVPLSGRTVSLYTRYQW

SEQ ID NO: 2902 - protein, 678 aa, Escherichia coli
MVPSTFSRLKAARCLPVVLAALIFVGCGTHTPDQSTAYMQGTAQADSAFYLQQMQQSSDDTRINWQLLAIRALVKEGKTGQAVELFNQLPQELNDSQRREKTLLAVEIKLAQKDFAGAQNLLAKITPADLEQNQQARYWQAKIDASQGRPSIDLLRALIAQEPLLGAKEKQQNIDATWQALSSMTQEQANTLVINADENILQGWLDLQRVWFDNRNDPDMMKAGIADWQKRYPNNPGAKMLPTQLVNVKAFKPASTNKIALLLPLNGQAAVFGRTIQQGFEAAKNIGTQPVAAQVAAAPAADVAEQPQPQTADGVASPAQASVSDLTGDQPAAQPVPVSAPATSTAAVSAPANPSAELKIYDTSSQPLSQILSQVQQDGASIVVGPLLKNNVEELLKSNTPLNVLALNQPENIENRVNICYFALSPEDEARDAARHIRDQGKQAPLVLIPRSSLGDRVANAFAQEWQKLGGGTVLQQKFGSTSELRAGVNGGSGIALTGTPITPRATTDSGMTTNNPTLQTTPTDDQFTNNGGRVDAVYIVATPGEIAFIKPMIAMRNGSQSGATLYASSRSAQGTAGPDFRLEMEGLQYSEIPMLAGGNLPLMQQALSAVNNDYSLARMYAMGVDAWSLANHFSQMRQVQGFEINGNTGSLTANPDCVINRKLSWLQYQQGQVVPAS

SEQ ID NO: 2903 - protein, 869 aa, Escherichia coli
MKIPTTTDIPQRYTWCLAGICYSSLAILPSFLSYAESYFNPAFLLENGTFVADLSRFERGNHQPAGVYRVDLWRNDEFIGSQDIVFESTTENTGDKSGGLMPCFNQVLLERIGLNSSAFPELAQQQNNKCINLLKAVPDATINFDFAAMRLNITIPQIALLSSAHGYIPPEEWDEGIPALLLNYNFTGNRGNGNDSYFFSELSGINIGPWRLRNNGSWNYFRGNGYHSEQWNNIGTWVQRAIIPLKSELVMGDGNTGSDIFDGVGFRGVRLYSSDNMYPDSQQGFAPTVRGIARTAAQLTIRQNGFIIYQSYVSPGAFEITDLHPTSSNGDLDVTIDERDGNQQNYTIPYSTVPILQREGRFKFDLTAGDFRSGNSQQSSPFFFQGTALGGLPQEFTAYGGTQLSANYTAFLLGLGRNLGNWGAVSLDVTHARSQLADDSRHEGDSIRFLYAKSMNTFGTNFQLMGYRYSTQGFYTLDDVAYRRMEGYEYDYDYDGEHRDEPIIVNYHNLRFSRKDRLQLNISQSLNDFGSLYISGTHQKYWNTSDSDTWYQVGYTSSWVGISYSLSFSWNESVGIPDNERIVGLNVSVPFNVLTKRRYTRENALDRAYASFNANRNSNGQNSWLAGVGGTLLEGHNLSYHVSQGDTSNNGYTGSATANWQAAYGTLGVGYNYDRDQHDVNWQLSGGVVGHENGITLSQPLGDTNVLIKAPGAGGVRIENQTGILTDWRGYAVMPYATVYRYNRIALDTNTMGNSIDVEKNISSVVPTQGALVRANFDTRIGVRALITVTQGGKPVPFGSLVRENSTGITSMVGDDGQVYLSGAPLSGELLVQWGDGANSRCIAHYVLPKQSLQQAVTVISAVCTHPGS

SEQ ID NO: 2904 - protein, 274 aa, Escherichia coli; identical to SEQ ID NO: 2304

SEQ ID NO: 2905 - protein, 238 aa, Escherichia coli
MLSVYNRTQKMKEEARKKLAKYHELRKQRGMSLLEVIIVLGIIGTIAAGVVILAQRAFDSRTVSELVTNTNTIRVAMKDAYQRDGKYPDYQAPLSLTADSIKTDSTGIAVAQLVQLGKLTPDEARNGISGDYIGIGGAITSSGSTINKGFAMELNGLSQEQCRSILGQVGDNWEYVAVGTSPSGSYDALSAGAVNMLAATDNTTILRSLAANGQVSLTAEKILKTCTATVNSITLASR

SEQ ID NO: 2906 - protein, 241 aa, Escherichia coli
MSNKNVNVRKSQEITFCLLAGILIFMAMMVAGRAEAGVALGATRVIYPAGQKQVQLAVTNNDENSTYLIQSWVENADGVKDGRFIVTPPLFAMKGKKENTLRILDATNNQLPQDRESLFWMNVKAIPSMDKSKLTENTLQLAIISRIKLYYRPAKLALPPDQAAEKLRFRRSANSLTLINPTPYYLTVTELNAGTRVLENALVPPMGESTVKLPSDAGSNITYRTINDYGALTPKMTGVME

SEQ ID NO: 2907 - protein, 258 aa, Escherichia coli
MKNITFIFFILLASPLYANGDKLYRADSRPPDEIKRSGGLMPRGHNEYFDRGTQMNINLYDHARGTQTGFVRYDDGYVSTSLSLRSAHLAGQSILSGYSTYYIYVIATAPNMFNVNDVLGVYSPHPYEQEVSALGGIPYSQIYGWYRVNFGVIDERLHRNREYRDRYYRNLNIAPAEDGYRLAGFPPDHQAWREEPWIHHAPQGCGNSSRTITGDTCNEETQNLSTIYLREYQSKVKRQIFSDYQSEVDIYNGIRDEL

SEQ ID NO: 2908 - protein, 412 aa, Escherichia coli
MKQWIAALLLMLIPGVQAAKPQKVTLMVDDVPVAQVLQALAEQEKLNLVVSPDVSGTVSLHLTDVPWKQALQTVVKSAGLITRQEGNILSVHSIAWQNDNIARQEAEQARAQANLPLENRNITLQYADAGELAKAGEKLLSAKGSMTVDKRTNRLLLRDNKTALSALEQWVAQMDLPVGQVELSAHIVTINEKSLRELGVKWTLADAQHAGGVGQVTTLGSDLSVATATTHVGFNIGRINGRLLDLELSALEQKQQLDIIASPRLLASHLQPASIKQGSEIPYQVSSGESGATSVEFKEAVLGMEVTPTVLQKGRIRLKLHISQNVPGQVLQQADGEVLAIDKQEIETQVEVKSGETLALGGIFTRKNKSGQDSVPLLGDIPWFGQLFRHDGKEDERRELVVFITPRLVSSE

SEQ ID NO: 2909 - protein, 831 aa, Escherichia coli
MKQRSFCPGRLSTAIAIALCCFPPFSSGQENPGTVYQFNDGFIVGSREKVDLSRFSTSAITEGTYSLDVYTNDEWKGRYDLSIARDKDGRLGVCYTKAMLAQYGIAAEKLNPQLSEQEGYCGSLKSWRNEENVKDNLVQSSLRLNISVPQIYEDQRLKNYVSPEFWDKGITALNLGWMANAWNSHTSSVGGSDNSSAYLGVNAGLSWDGWLLKHIGNLNWQQQQGKAHWNSNQTYLQRPIPQLNSIVSGGQIFTNGEFFDTIGLRGVNLSTDDNMFPDGMRSYAPEIRGVAQSNALVTVRQGSNIIYQTTVPPGPFTLQDVYPSGYGSDLEVSVKEADGSVEVFSVPYASVAQLLRPGMTRYALSAGKVDDSALRNKPMLYQATWQHGINNLLTGYTGVTGFDDYQAFLVGTGMNTGIGALSFDVTHSRLKSDAHDDSGQSYRATFNRMFTDTQTSIVLAAYRYSTKGYYNLNDALYAVDQEKNSRSNYTLWRQKNGMTFTVNQNLPDGWGGFYLSGRISDYWNRSGTEKQYQVSYNNSFGRLSWSASAQRVYTPDSSGHRRDDRISLNFSYPLWFGDNRTANLTSNTSFNNSRFASSQIGINGSLDSENNLNYGVSTTTATGGQHDVALNGSYRTPWTTLNGSYSQGEGYRQSGIGASGTMIAHSGGVVLSPESGSTMALIEAKDAAGAMLPGSPGTRVDSNGYAILPYLRPYRINAINAVEIDPKGSHDDVAFDRTVAQVVPWEGSVVKVAFGTKVQNNLTLQARQANHEPLPFAASIFSPDGKEIGVVGQGSMMFISDANAKRAIVKWSGGQCSVDLGQQTTKDSVCR

SEQ ID NO: 2910 - protein, 243 aa, Escherichia coli
MSRKSCLIRLFKTTVSCKLFTAIILSVFLGQPALTYAGVVIGGTRVVYLSNNADKSISVFSKEEKIPYLIQAWVDPFNKEDKSKAPFTVIPPVSRLEPSQEKILRIIHTKGVSLPDDRESVFWLNIKNIPPSASNKATNSLEIAVKTRIKLFWRPANIRLIPEDAAPKVKWRREGRNLIAENPNPIHISVMDVIVDGHDVPLNMIRPFETLTLPLPANSAGGQMTWRFINDYGAVSDPIKMTL

SEQ ID NO: 2911 - protein, 111 aa, Escherichia coli
MKKQIEGMTMKKVLALVVAAAMGLSSAAFAAETATTPAPTATTTKAAPAKTTHHKKQHKAAPAQKAQAAKKHHKNTKAEQKAPEQKAQAAKKHAKKHSHQQPAKPAAQPAA

SEQ ID NO: 2912 - protein, 653 aa, Escherichia coli
MRNNSTWSRSSGQTAEWKNLSSYLQRAVIPLKGELTVGDDYTAGDFFDSVSFRGVQLASDDNMLPDSLKGFAPVVRGIAKSNAQITIKQNGYTIYQTYVSPGAFEISDIYSTSSSGDLLVEIKEADGSVNSYSVPFSSVPLLQRQGRIKYAVTLAKYRTNSNEQQESKFAQATLQWGGPWGTTWYGGGQYAEYYRAAMFGLGFNLGDFGAISFDVTQAKSTLADQSEHKGQSYRFLYAKTLNQLGTNFQLMGYRYSTSGFYTLSDTMYKHMDGYEFNDGDDEDTPMWSRYYNLFYTKRGKLQVNISQQLSEYGSFYLSGSQQTYWHTDQQDRLLQFGYNTQIKDLSLGISWNYSKSRGQPDADQVFALNFSLPLNLLLSRSNDSYTSKKNYAWMTSNTSIDNEGHTTQNLGLTETLLDDGNLSYSVQQGYNSEGKTANGSASMDYKGAFADARVGYNYSDNGSQQQLNYALSGSLVAHSQGITLGQSLGETNVLIAAPGAENTRVANSTGLKTDWRGYTVVPYATSYRENRIALDAASLKRNVDLENAVVNVVPTKGALVLAEFNAHAGARVLMKTSKQGISLRFGAIATLDGVQTNSGIIDDDGSLYMAGLPAKGTITVRWGEAPDQICHISYELTEQQINSAITRMDAICR

SEQ ID NO: 2913 - protein, 243 aa, Escherichia coli
MQKMKPALKKTLMAVACLSAVPAAQAAVSLDRTRAIFNGDEKSMTLNIANDNKQLPYLAQAWVENEKKEKITTGPIIATPPVQRLEPGSKSMVRLTSTPDISRLPQDRESLFYFSLREIPPKSDKANVLQIALQTKIKLFYRPESIKAKPNAVWQDQLVLNKTSGGYRIDNPTPYYVTVIGIGGSEKQAREGEFDAVMLAPKSTQMVKSGTYNTPYLSYINDYGGRPVLQFSCGGSRCTAVKK

SEQ ID NO: 2914 - protein, 206 aa, Escherichia coli
MSLLEVIIVLGIIGTIAAGVVILAQRAFDSRAVTDLVTNTNTVRVAMKDAYQRDGVYPDYVSPLNLTSDTIKTDTGKIPAAQLVQLGKITPDEVRNNISGDFIAIGGALTSDGATVKKGFAIELNGLSQEQCRSILGQVGNNWEYVAVGNSASGSYAMQTAGVNMSVAATGNILRTLGTDGQKTLTAERILGTCTATVNSITLGSR

SEQ ID NO: 2915 - protein, 122 aa, Escherichia coli
MEKNMKKRGAFLGLLLVSACASVFAANNETSKSVTFPKCEGLDAAGIAASVKRDYQQNRVARWADDQKIVGQADPVAWVSLQDIQGKDDKWSVPLTVRGKSADIHYQVSVDCKAGMAEYQRR

SEQ ID NO: 2916 - protein, 838 aa, Escherichia coli
MPQRHHQGHKRTPKQLALIIKRCLPMVLTGSGMLCTTANAEEYYFDPIMLETTKSGMQTTDLSRFSKKYAQLPGTYQVDIWLNKKKVSQKKITFTANAEQLLQPQFTVEQLRELGIKVDEIPALAEKDDDSVINSLEQIIPGTAAEFDFNHQRLNLSIPQIALYRDARGYVSPSRWDDGIPTLFTNYSFTGSDNRYRQGNRSQRQYLNMQNGANFGPWRLRNYSTWTRNDQASSWNTISSYLQRDIKALKSQLLLGESATSGSIFSSYNFTGVQLASDDNMLPNSQRGFAPTVRGIANSSAIVTIRQNGYVIYQSNVPAGAFEINDLYPSSNSGDLEVTIEESDGTQRRFIQPYSSLPMMQRPGHLKYSATAGRYRADANSDSKEPEFAEATAIYGLNNTFTLYGGLLGSEDYYALGIGIGGTLGALGALSMDINRADTQFDNQHSFHGYQWRTQYIKDIPETNTNIAVSYYRYTNDGYFSFDEANTRNWDYNSRQKSEIQFNISQTIFDGVSLYASGSQQDYWGNNEKNRNISVGVSGQQWGIGYSLNYQYSRYTDQNNDRALSLNLSIPLERWLPRSRVSYQMTSQKDRPTQHEMRLDGSLLDDGRLSYSLEQSLDDDNNHNSSVNASYRSPYGTFSAGYSYGNDSSQYNYGVTGGVVIHPHGVTLSQYLGNAFALIDANGASGVRIQNYPGIATDPFGYAVVPYLTTYQENRLSVDTTQLPDNVDLEQTTQFVVPNRGAMVAARFNANIGYRVLVTVSDRNGKPLPFGALASNDDTGQQSIVDEGGILYLSGISSKSQSWTVRWGNQADQQCQFAFSTPDSEPTTSVLQGTAQCH

SEQ ID NO: 2917 - protein, 367 aa, Escherichia coli; identical to SEQ ID NO: 2433

SEQ ID NO: 2918 - protein, 998 aa, Escherichia coli
MTVNKIKNIFNNATLTTKSAFNTASSSVRSAGKKLILLIPDNYEAQGVGINELVKAADELGIEIHRTERDDTAIANQFFGAAEKVVGLTERGVAIFAPQLDKLLQKYQKVGSKIGGTAENVGNNLGKAGTVLSALQNFTGIALSGMALDELLRKQREGEDISQNDIAKSSIELINQLVDTVSSINSTVDSFSEQLNQLGSFLSSKPRLSSVGGKLQNLPDLGPLGDGLDVVSGILSAVSASFILGNSDAHTGTKAAAGIELTTQVLGNVGKAVSQYILAQRMAQGLSTTAASAGLITSAVMLAISPLSFLAAADKFERAKQLESYSERFKKLNYEGDALLAAFHKETGAIDAALTTINTVLSSVSAGVSAASSASLIGAPISMLVSALTGTISGILEASKQAMFEHVAEKFAARINEWEKEHGKNYFENGYDARHAAFLEDSLSLLADFSRQHAVERAVAITQQHWDEKIGELAGITRNADRSQSGKAYINYLENGGLLEAQPKEFTQQVFDPQKGTIDLSTGNVSSVLTFITPTFTPGEEVRERKQSGKYEYMTSLIVNGKDTWSVKGIKNHKGVYDYSKLIQFVEKNNKHYQARIISELGDKDDVVYSGAGSSEVFAGEGYDTVSYNKTDVGKLTIDATGASKPGEYIVSKNMYGDVKVLQEVVKEQEVSVGKRTEKIQYRDFEFRTGGIPYDVIDNLHSVEELIGGKHDDEFKGGKFNDIFHGADGNDYIEGNYGNDRLYGDDGDDYISGGQGDDQLFGGSGNDKLSGGDGNNYLTGGSGNDELQAHGAYNILSGGTGDDKLYGGGGIDLLDGGEGNDYLNGGFGNDIYVYGQNYGHHTIADEGGKGDRLHLSDISFDDIAFKRVGNDLIMNKAINGVLSFNESNDVNGITFKNWFAKDASGADNHLVEVITDKDGREIKVDKIPHNNNERSGYIKASNIASEKNMVNITSVANDINKIISSVSGFDSGDERLASLYNLSLHQNNTHSTTLTTTV

SEQ ID NO: 2919 - protein, 673 aa, Escherichia coli
MKMTRLYPLALGGLLLPAIANAQTSQQDESTLVVTASKQSSRSASANNVSSTVVSAPELSDAGVTASDKLPRVLPGLNIENSGNMLFSTISLRGVSSAQDFYNPAVTLYVDGVPQLSTNTIQALTDVQSVELLRGPQGTLYGKSAQGGIINIVTQQPDSTPRGYIEGGVSSRDSYRSKFNLSGPIQDGLLYGSVTLLRQVDDGDMINPATGSDDLGGTRASIGNVKLRLAPDDQPWEMGFAASRECTRATQDAYVGWNDIKGRKLSISDGSPDPYMRRCTDSQTLSGKYTTDDWVFNLISAWQQQHYSRTFPSGSLIVNMPQRWNQDVQELRAATLGDARTVDMVFGLYRQNTREKLNSAYDMPTMPYLSSTGYTTAETLAAYSDLTWHLTDRFDIGGGVRFSHDKSSTQYHGSMLGNPFGDQGKSNDDQVLGQLSAGYMLTDDWRVYTRVAQGYKPSGYNIVPTAGLDAKPFVAEKSINYELGTRYETADVTLQAATFYTHTKDMQLYSGPVGMQTLSNAGKADATGVELEAKWRFAPGWSWDINGNVIRSEFTNDSELYHGNRVPFVPRYGAGSSVNGVIDTRYGALMPRLAVNLVGPHYFDGDNQLRQGTYATLDSSLGWQATERMNISVYVDNLFDRRYRTYGYMNGSSAVAQVNMGRTVGINTRIDFF

SEQ ID NO: 2920 - protein, 843 aa, Escherichia coli
MNLVMRGMKDRIPFAVNNITCVILLSLFCNAASAVEFNTDVLDAADKKNIDFTRFSEAGYVLPGQYLLDVIVNGQSISPASLQISFVEPQSSGDKAEKKLPQACLTSDMVRLMGLTAESLDKVVYWHDGQCADFHGLPGVDIRPDTGAGVLRINMPQAWLEYSDATWLPPSRWDDGIPGLMLDYNLNGTVSRNYQGGDSHQFSYNGTVGGNLGPWRLRADYQGSQEQSRYNGEKTTNRNFTWSRFYLFRAIPRWRANLTLGENNINSDIFRSWSYTGASLESDDRMLPPRLRGYAPQITGIAETNARVVVSQQGRVLYDSMVPAGPFSIQDLDSSVRGRLDVEVIEQNGRKKTFQVDTASVPYLTRPGQVRYKLVSGRSRGYGHETEGPVFATGEASWGLSNQWSLYGGAVLAGDYNALAAGAGWDLGVPGTLSADITQSVARIEGERTFQGKSWRLSYSKRFDNADADITFAGYRFSERNYMTMEQYLNARYRNDYSSREKEMYTVTLNKNVADWNTSFNLQYSRQTYWDIRKTDYYTVSVNRYFNVFGLQGVAVGLSASRSKYLGRDNDSAYLRISVPLGTGTASYSGSMSNDRYVNMAGYTDTFNDGLDSYSLNAGLNSGGGLTSQRQINAYYSHRSPLANLSANIASLQKGYTSFGVSASGGATITGKGAALHAGGMSGGTRLLVDTDGVGGVPVDGGQVVTNRWGTGVVTDISSYYRNTISVDLKRLPDDVEATRSVVESALTEGAIGYRKFSVLKGKRLFAILRLADGSQPPFGASVTSEKGRELGMVADEGLAWLSGVTPGETLSVNWDGKIQCQVNVPETAISDQQLLLPCTPQK

SEQ ID NO: 2921 - protein, 241 aa, Escherichia coli
MSNKNVNVRKSQEITFCLLAGILMFMAMMVAGRAEAGVALGATRVIYPAGQKQVQLAVTNNDENSTYLIQSWVENADGVKDGRFIVTPPLFAMKGKKENTLRILDATNNHLPQDRESLFWMNVKAIPSMDKSKLTENTLQLAIISRIKLYYRPAKLALPPDQAAEKLRFRRSANSLTLINPTPYYLTVTELNAGARVLENALVPPMGESTVKLPSDAGSNITYRTINDYGALTPKMTGVME

SEQ ID NO: 2922 - protein, 241 aa, Escherichia coli
MSNKNVNVRKSQEITFCLLAGILMFMAMMVAGRAEAGVALGATRVIYPAGQKQVQLAVTNNDENSTYLIQSWVENADGVKDGRFIVTPPLFAMKGKKENTLRILDATNNQLPQDRESLFWMNVKAIPSMDKSKLTENTLQLAIISRIKLYYRPAKLALPPDQAAEKLRFRRSANSLTLINPTPYYLTVTELNAGTRVLENALVPPMGESTVKLPSDAGSNITYRTINDYGALTPKMTGVME

SEQ ID NO: 2923 - protein, 89 aa, Escherichia coli
MKKMFMAVLFALVSVNAMAADCAKGKIEFSKYNENDTFTVKVAGKEYWTNRWNLQPLLQSAQLTGMTVTIKSNTCASGSGFAEVQFNND

SEQ ID NO: 2924 - protein, 85 aa, Escherichia coli
LLIAASLSFFSASALATPDCVTGKVEYTKYNDDDTFTVKVGDKELFTNRWNLQSLLLSAQITGMTVTIKTNACHNGGGFSEVIFR

SEQ ID NO: 2925 - protein, 364 aa, Escherichia coli
MKVKVLSLLVPALLVAGAANAAEIYNKDGNKLDLYGKVDGLHYFSDNDSKDGDKTYMRLGFKGETQVTDQLTGYGQWEYQIQGNEPESDNSSWTRVAFAGLKFQDVGSFDYGRNYGVVYDVTSWTDVLPEFGGDTYDSDNFMQQRGNGFATYRNTDFFGLVDGLDFAVQYQGKNGSAHGEGMTTNGRDDVFEQNGDGVGGSITYNYEGFGIGAAVSSSKRTWDQNNTGLIGTGDRAETYTGGLKYDANNIYLAAQYTQTYNATRVGSLGWANKAQNFEAVAQYQFDFGLRPSLAYLQSKGKNLGRGYDDEDILKYVDVGATYYFNKNMSTYVDYKTNLLDDNRFTRDAGINTDDIVALGLVYQF

SEQ ID NO: 2926 - protein, 700 aa, Escherichia coli
MKIVFVRQTVLPALLVLSPVVFAADEQTMIVSAAPQVVSELDTPAAVSVVDGEEMRLATPRINLSESLTGVPGLQVQNRQNYAQDLQLSIRGFGSRSTYGIRGIRLYVDGIPATMPDGQGQTSNIDLSSVQNVEVLRGPFSALYGNASGGVMNVTTQTGQQPPTIEASSYYGSFGSWRYGLKATGATGDGTQPGDVDYTVSTTRFTTHGYRDHSGAQKNLANAKLGVRIDDASKLSLIFNSVDIKADDPGGLTKAEWKANPQQAPRAEQYDTRKTIKQTQAGLRYERSLSSRDDMSVMMYAGERETTQYQSIPMAPQLNPSHAGSVITLQRHYQGIDSRWTHRGELGVPVTFTTGLNYENMSENRKGYNNFRLNSGMPEYGQKGELRRDERNLMWNIDPYLQTQWQLSEKLSLDAGVRYSSVWFDSNDHYVTPGNGDDSGDASYHKWLPAGSLKYAMTDAWNIYLAAGRGFETPTINELSYRADGQSGMNFGLKPSTNDTIEIGSKTRIGDGLLSLALFQTDTDDEIVVDSSSGGRTTYKNAGKTRRQGAELAWDQRFAGDFRVNASWTWLDATYRSNVCNEQDCNGNRMPGIARNMGFASIGYVPEDGWYAGMEARYMGDIMADDENTAKAPSYTLVGLFTGYKYNYHNLTVDLFGRVDNLFDKEYVGSVIVNESNGRYYEPAPGRNYGVGVNIAWRFE

SEQ ID NO: 2927 - protein, 364 aa, Escherichia coli
MKVKVLSLLVPALLVAGAANAAEIYNKDGNKLDLYGKVDGLHYFSDNDSKDGDKTYMRLGFKGETQVTDQLTGYGQWEYQIQGNEPESDNSSWTRVAFAGLKFQDVGSFDYGRNYGVVYDVTSWTDVLPEFGGDTYDSDNFMQQRGNGFATYRNTDFFGLVDGLDFAVQYQGKNGSAHGEGMTTNGRDDVFEQNGDGVGGSITYNYEGFGIGAAVSSSKRTWDQNNTGLIGTGDRAETYTGGLKYDANNIYLAAQYTQTYNATRVGSLGWANKAQNFEAVAQYQFDFGLRPSLAYLQSKGKNLGRGYDDEDILKYVDVGATYYFNKNMSTYVDYKINLLDDNRFTRDAGINTDDIVALGLVYQF

SEQ ID NO: 2928 - protein, 233 aa, Escherichia coli; identical to SEQ ID NO: 2005

SEQ ID NO: 2929 - protein, 89 aa, Escherichia coli
MKKMFMAVLFALVSVNAMAADCAKGKIEFSKYNGDNTFTVKVDGKEYWTNRWNLQPLLQSAQLTGMTVTIKSNTCESGSGFAEVQFNND

SEQ ID NO: 2930 - protein, 835 aa, Escherichia coli
MKNNTSFVINGITYALLFSLAGAPTYAVDFNTDVLDAADRQNIDFSRFSQAGYIMPGQYQMEIMVNDQGISPSAFPVTFLEQPASVADGKKMLPQPCLTAEMVSRMGLTEASQKKVTYWNNGQCADLSQLPGVEIRPNLAEGMLYINMPQAWLEYSDASWLPPSRWDNGIPGLLFDYNLNGTVNKPHKGKQSQSLSYNGTAGANFGAWRLRADYQGNLNHTTGSGQGTDSQFTWSRFYMYRAIPRWRTNLTLGENYINSEVFSSWRYTGASLESDDRMLPPKLRGYAPQVSGIADTNARVVISQQGRILYDSTVPAGPFTIQDLDSSVRGRLDVEVIEQDGRKKTFQVDTAYVPYLTRPGQIRYKLVSGRSRNYEHTTEGPVFAAGEASWGISNKWSLYGGGIVAGDYNALAVGLGRDLNEFGTVSADMTQSVARIPGEETKQGKSWRLSYSKRFDDVNADITFVGYRFSERNYMTMDQYLNARYRNDFTGREKELYTATFNKSFEDWNTSVNLQYSHQTYWDRRASDYYTLSVNRYFDAFGFKNVSLGLSASRSKYQKRDNDSAFVRLSMPWGTGTASYSGSMSNDRYTNTVGYSDTLNKGLSSYNLNAGVSSGGGQPSQSQMSAYYNHSSPLASLSANFSAVENGYTSFGMSASGGATITAKGAALHAGGMNGGTRLLVDTDGVGGVPVDGGRVATNRWGVGVVTDVSSYYRNTTSVDLNRLPEDMEATRSVVESVLTEGAIGYREFEVLKGSRLFAVLRLADNSYPPFGASVTNAKGRELGMVADSGLAWLSGVSPDETLNVDWDGRTQCVVDIPAKLDPAQQLLLHCRKTK

SEQ ID NO: 2931 - protein, 258 aa, Escherichia coli; identical to SEQ ID NO: 1999

SEQ ID NO: 2932 - protein, 124 aa, Escherichia coli
MNKVKCYVLFTALLSSLCAHGAPQSITELCSEYRNTQIYTINDKILSYTESMAGKREMVIITFKSGATFQVEVPGSQHIDSQKKAIERMKDTLRITYLTETKIDKLCVWNNKTPNSIAAISMEN

SEQ ID NO: 2933 - protein, 332 aa, Escherichia coli; identical to SEQ ID NO: 2701

SEQ ID NO: 2934 - protein, 240 aa, Escherichia coli
SNKNVNVRKSQEITFCLLAGILMFMAMVVAGRAEAGVALGATRVIYPAGQKQVQLAVTNNDENSTYLIQSWVENADGVKDGRFIVTPPLFAMKGKKENTLRILDATNNQLPQDRESLFWMNVKAIPSMDKSKLTENTLQLAIISRIKLYYRPAKLALPPDQAAEKLRFRRSANSLTLINPTPYYLTVTELNAGTRVLENALVPPMGESAVKLPSDAGSNITYRTINDYGALTPKMTGVME

SEQ ID NO: 2935 - protein, 240 aa, Escherichia coli
SNKNVNVRKSQEITFCLLAGILMFMAMVVAGRAEAGVALGATRVIYPAGQKQVQLAVTNNDENSTYLIQSWVENADGVKDGRFIVTPPLFAMKGKKENTLRILDATNNQLPQDRESLFWMNVKAIPSMDKSKLTENTLQLAIISRIKLYYRPAKLALPPDQAAEKLRFRRSANSLTLINPTPFYLTVTELNAGTRVLENALVPPMGESAVKLPSDAGSNITYRTINDYGALTPKMTGVME

SEQ ID NO: 2936 - protein, 367 aa, Escherichia coli
MKVKVLSLLVPALLVAGAANAAEVYNKDGNKLDLYGKVDGLHYFSDNKDVDGDQTYMRLGFKGETQVTDQLTGYGQWEYQIQGNSAENENNSWTRVAFAGLKFQDVGSFDYGRNYGVVYDVTSWTDVLPEFGGDTYGSDNFMQQRGNGFATYRNTDFFGLVDGLNFAVQYQGKNGSVSGEGMTNNGRGALRQNGDGVGGSITYDYEGFGIGGAISSSKRTDDQNSPLYIGNGDRAETYTGGLKYDANNIYLAAQYTQTYNATRVGSLGWANKAQNFEAVAQYQFDFGLRPSVAYLQSKGKNLGVINGRNYDDEDILKYVDVGATYYFNKNMSTYVDYKINLLDDNQFTRDAGINTDNIVALGLVYQF

SEQ ID NO: 2937 - protein, 240 aa, Escherichia coli
SNKNVNVRKSQEITFCLLAGILMFMAMVVAGRAEAGVALGATRVIYPAGQKQVQLAVTNNDENSTYLIQSWVENADGVKDGRFIVTPPLFAMKGKRENTLRILDATNNQLPQDRESLFWMNVKAIPSMDKSKLTENTLQLAIISRIKLYYRPAKLALPPDQAAEKLRFRRSANSLTLINPTPYYLTVTELNAGTRVLENALVPPMGESTVKLPSDAGSNITYRTINDYGALTPKMTGVME

SEQ ID NO: 2938 - protein, 236 aa, Escherichia coli
MLSVYNRTQKFKAEARKKIAKYHELRKQRGMSLLEVIIVLGIIGTIAAGVVILAQRAFDSRAVTDLVTNTNTVRVRMKDAYQRDGKYPDFVDPLSLTANTIKTDTSGIPAAQLVQLGKITPDEVRNNISGDFIAIGGALTSNGAQVKKGFAIELNGLSQEQCRSILGQVGNNWEYVAIGTSASGSYAMTATGVDMSVAASTTVLRSLGNNGQTTLTADKILSTCTAQVNSITLGSR

SEQ ID NO: 2939 - protein, 240 aa, Escherichia coli
SNKNVNVRKSQEITFCLLAGILMFMAMMVAGRAEAGVALGATRVIYPAGQKQVQLAVTNNDENSTYLIQSWVENADGVKDGRFIVTPPLFAMKGKKENTLRILDATNNQLPQDRESLFWMNVKAIPSMDKSKLTENTLQLAIISRIKLYYRPAKLALPPDQAAEKLRFRRSANSLTLINPTPYYLTVTELNAGTRVLENALVPPMGESTVKLPSDAGSNITYRTINDYGALTPKMTGVME

SEQ ID NO: 2940 - protein, 240 aa, Escherichia coli
SNKNVNVRKSQEITFCLLAGILMFMAMMVAGRAEAGVALGATRVIYPAGQKQVQLAVTNNDENSTYLIQSWVENADGVKDGRFIVTPPLFAMKGKKENTLRILDATNNQLPQDRESLFWMNVKAIPSMDKSKLTENTLQLAIISRIKLYYRPAKLALPPDQAAEKLRFRRSANSLTLINPTPYYLTVTELNAGARVLENALVPPMGESTVKLPSDAGSNITYRTINDYGALTPKMTGVME

SEQ ID NO: 2941 - protein, 259 aa, Escherichia coli
MIKHVLLFFVFISFSVSANDFFRADSRTPDEIRRAGGLLPRGQQEAYERGTPININLYEHARGTVTGNTRYNDGYVSTTTTLRQAHLIGQNILGSYNEYYIYVVAPAPNLFDVNGVLGRYSPYPSENEFAALGGIPLSQIIGWYRVSFGAIEGGMQRNRHYRGDLFQGLSVAPNHDGYHLAGFPEGFAAWRELPWSAFAPEQCEQDYMVRNLDACDSYTNILSQNDLVAFKRFMRIRSSLMILQSIEDDLQNNENKDEL

SEQ ID NO: 2942 - protein, 659 aa, Escherichia coli
MFRLNPFVRVGLCLSAISCAWPVLAVDDDGETMVVTASSVEQNLKDAPASISVITQEDLQRKPVQNLKDVLKEVPGVQLTNEGDNRKGVSIRGLDSSYTLILVDGKRVNSRNAVFRHNDFDLNWIPVDSIERIEVVRGPMSSLYGSDALGGVVNIITKKIGQKWSGTVTVDTTIQEHRDRGDTYNGQFFTSGPLIDGVLGMKAYGSLAKREKDDPQNSTTTDTGETPRIEGFSSRDGNVEFAWTPNQNHDFTAGYGFDRQDRDSDSLDKNRLERQNYSVSHNGRWDYGTSELKYYGEKVENKNPGNSSPITSESNTVDGKYTLPLTAINQFLTVGGEWRHDKLSDAVNLTGGTSSKTSASQYALFVEDEWRIFEPLALTTGVRMDDHETYGEHWSPRAYLVYNATDTVTVKGGWATAFKAPSLLQLSPDWTSNSCRGACKIVGSPDLKPETSESWELGLYYMGEEGWLEGVESSVTVFRNDVKDRISISRTSDVNAAPGYQNFVGFTANGVPVFSYYNVNKARIQGVETELKIPFNDEWKLSLNYTYNDGRDVSNGENKPLSDLPFHTANGTLDWKPLALEDWSFYVSGHYTGQKRADSATAKTPGGYTIWNTGAAWQVTKDVKLRAGVLNLGDKDLSRDDYSYNEDGRRYFMAVDYRF

SEQ ID NO: 2943 - protein, 240 aa, Escherichia coli
SNKNVNVRKSQEITFCLLAGILIFMAMMVAGRAEAGVALGATRVIYPAGQKQVQLAVTNNDENSTYLIQSWVENADGVKDGRFIVTPPLFAMKGKKENTLRILDATNNQLPQDRESLFWMNVKAIPSMDKSKLTENTLQLAIISRIKLYYRPAKLALPPDQAAEKLRFRRSANSLTLINPTPYYLTVTELNAGARVLENALVPPMGESTVKLPSDAGSNITYRTINDYGALTPKMTGVME

SEQ ID NO: 2944 - protein, 240 aa, Escherichia coli
SNKNVNVRKSQEITFCLLAGILMFMAMMVAGRAEAGVALGATRVIYPAGQKQVQLAVTNNDENSTYLIQSWVENADGVKDGRFIVTPPLFAMKGKKENTLRILDATNNQLPQDRESLFWMNVKAIPSMDKSKLTENTLQLAIISRIKLYYRPAKLALPPDQAAEKLRFRRSANSLTLINSTPYYLTVTELNAGTRVLENALVPPMGESTVKLPSDAGSNITYRTINDYGALTPKMTGVME

SEQ ID NO: 2945 - protein, 828 aa, Escherichia coli; identical to SEQ ID NO: 2381

SEQ ID NO: 2946 - protein, 87 aa, Escherichia coli
MKKMIIAVLFGLFSANSMAADCAVGKIEFSKYNEDDTFTVKVSGREYWTNRWNLQPLLQSAQLTGMTVTIISNTCSSGSGFAQVKFN

SEQ ID NO: 2947 - protein, 89 aa, Escherichia coli
MKKMFMAVLFALVSVNAMAADCAKGKIEFSKYNENDTFTVKVDGKEYWTSRWNLQPLLQSAQLTGMTVTIKSSTCASGSGFAEVQFNND

SEQ ID NO: 2948 - protein, 729 aa, Escherichia coli
MLSTQFNRDNQYQAITKPSLLAGCIALALLPSAAFAAPATEETVIVEGSATAPDDGENDYSVTSTSAGTKMQMTQRDIPQSVTIVSQQRMEDQQLQTLGEVMENTLGISKSQADSDRALYYSRGFQIDNYMVDGIPTYFESRWNLGDALSDMALFERVEVVRGATGLMTGTGNPSAAINMVRKHATSREFKGDVSAEYGSWNKERYVADLQSPLTEDGKIRARIVGGYQNNDSWLDRYNSEKTFFSGIVDADLGDLTTLSAGYEYQRIDVNSPTWGGLPRWNTDGSSNSYDRARSTAPDWAYNDKEINKVFMTLKQRFADTWQATLNATHSEVEFDSKMMYVDAYVNKADGMLVGPYSNYGPGFDYVGGTGWNSGKRKVDALDLFADGSYELFGRQHNLMFGGSYSKQNNRYFSSWANIFPDEIGSFYNFNGNFPQTDWSPQSLAQDDTTHMKSLYAATRVTLADPLHLILGARYTNWRVDTLTYSMEKNHTTPYAGLVFDINDNWSTYASYTSIFQPQNDRDSSGKYLAPITGNNYELGLKSDWMNSRLTTTLAIFRIEQDNVAQSTGTPIPGSNGETAYKAVDGTVSKGVEFELNGAITDNWQLTFGATRYIAEDNEGNAVNPNLPRTTVKMFTSYRLPVMPELTVGGGVNWQNRVYTDTVTPYGTFRAEQGSYALVDLFTRYQVTKNFSLQGNVNNLFDKTYDTNVEGSIVYGAPRNFSITGTYQF

SEQ ID NO: 2949 - protein, 746 aa, Escherichia coli
MNKKIHSLALLVNLGIYGVAQAQEPTDTPVSHDDTIVVTAAEQNLQAPGVSTITADEIRKNPVARDVSEIIRTMPGVNLTGNSTSGQRGNNRQIDIRGMGPENTLILIDGKPVSSRNSVRQGWRGERDTRGDTSWVPPEMIERIEVLRGPAAARYGNGAAGGVVNIITKKGSGEWHGSWDAYFNAPEHKEEGATKRTNFSLTGPLGDEFSFRLYGNLDKTQADAWDINQGHQSARAGTYATTLPAGREGVINKDINGVVRWDFAPLQSLELEAGYSRQGNLYAGDTQNTNSDAYTRSKYGDETNRLYRQNYSLTWNGGWDNGVTTSNWVQYEHTRNSRIPEGLAGGTEGKFNEKATQDFVDNDLDDVMLHSEVNLPIDFLVNQTLTLGTEWNQQRMKDLSSNTQALTGTNTGGAIDGVSATDRSPYSKAEIFSLFAENNMELTDSTIVTPGLRFDHHSIVGNNWSPALNISQGLGDDFTLKMGIARAYKAPSLYQTNPNYILYSKGQGCYASAGGCYLQGNDDLKAETSINKEIGLEFKRDGWLAGITWFRNDYRNKIEAGYVAVGQNAVGTDLYQWDNVPKAVVEGLEGSLNVPVSETVMWTNNITYMLKSENKTTGDRLSIIPEYTLNSTLSWQAREDLSMQTTFTWYGKQQPKKYNYKGQPAVGPETKEISPYSIVGLSATWDVTKNVSLTGGVDNLFDKRLWRAGNAQTTGDLAGANYIAGAGAYTYNEPGRTWYMSVNTHF

SEQ ID NO: 2950 - protein, 241 aa, Escherichia coli
MSNKNVNVRKSQEITFCLLAGILMFMAMMVAGRAEAGVALGATRVIYPAGQKQVQLAVTNNDENSTYLIQSWVENADGVKDGRFIVTPPLFAMKGKRENTLRILDATNNQLPQDRESLFWMNVKAIPSMDKSKLTENTLQLAIISRIKLYYRPAKLALPPDQAAEKLRFRRSANSLTLINPTPYYLTVTELNAGARVLENALVPPMGESTVKLPSDAGSNITYRTINDYGALTPKMTGVME

SEQ ID NO: 2951 - protein, 232 aa, Escherichia coli
MKSKLIILLMLVPFSSFSTGNNFEINKTRVIYSDSTPSVQISNNKAYPLIIQSNIWDENNNKNHDFIATPPIFKMESESRNIIKIIKTNIKLPDSQESMRWLCIESMPPTEKSTKINRKEGRTDSINISIRGCIKLIYRPASVPSPVFNNIVEKLKWHKNGKYLVLKNNTPYYISFSEVFFDSDKVNNAKDILYVKPYSEKKIDISNRIIKKIKWAMIDDAGAKTKLYESIL

SEQ ID NO: 2952 - protein, 239 aa, Escherichia coli; identical to SEQ ID NO: 2496

SEQ ID NO: 2953 - protein, 998 aa, Escherichia coli
MTVNKIKNIFNNATLTTKSAFNTASSSVRSAGKKLILLIPDNYEAQGVGINELVKAADELGIEIHRTERDDTAIANQFFGAAEKVVGLTERGVAIFAPQLDKLLQKYQKVGSKIGRTAENVGNNLGKAGTVLSALQNFTGIALSGMALDELLRKQREGEDISQNDIAKSSIELINQLVDTVSSINSTVDSFSEQLNQLGSFLSSKPRLSSVGGKLQNLPDLGSLGDGLDVVSGILSAVSASFILGNSDAHTGTKAAAGIELTTQVLGNVGKAVSQYILAQRMAQGLSTTAASAGLITSAVMLAISPLSFLAAADKFERAKQLESYSERFKKLNYEGDALLAAFHKETGAIDAALTTINTVLSSVSAGVSAASSASLIGAPISMLVSALTGTISGILEASKQAMFEHVAEKFAARINEWEKEHGKNYFENGYDARHAAFLEDSLSLLADFSRQHAVERAVAITQQHWDEKIGELAGITRNADRSQSGKAYINYLENGGLLEAQPKEFTQQVFDPQKGTIDLSTGNVSSVLTFITPTFTPGEEVRERKQSGKYEYMTSLIVNGKDTWSVKGIKNHKGVYDYSKLIQFVEKNNKHYQARMISELGDKDDVVYSGAGSSEVFAGEGHDTVSYNKTDVGKLTIDATGASKPGEYIVSKNMYGDVKVLQEVVKEQEVSVGKRTEKIQYRDFEFRTGGIPYDVIDNLHSVEELIGGKHDDEFKGGKFNDIFHGADGNDYIEGNYGNDRLYGDDGDDYISGGQGDDQLFGGSGNDKLSGGDGNNYLTGGSGNDELQAHGAYNILSGGTGDDKLYGGGGIDLLDGGEGNDYLNGGFGNDIYVYRQNYGHHTIADEGGKGDRLHLSDISFDDIAFKRVGNDLIMNKAINGVLSFNESNDVNGITFKNWFAKDASGADNHLVEVITDKDGREIKVDKIPHNNNERSGYIKASNIASEKNMVNITSVANDINKIISSVSGFDSGDERLASLYNLSLHQNNTHSTTLTTTV

SEQ ID NO: 2954 - protein, 747 aa, Escherichia coli
MARSKTAQPKHSLRKIAVVVATAVSGMSVYAQAAVEPKEDTITVTAAPAPQESAWGPAATIAARQSATGTKTDTPIQKVPQSISVVTAEEMALHQPKSVKEALSYTPGVSVGTRGASNTYDHLIIRGFAAEGQSQNNYLNGLKLQGNFYNDAVIDPYMLERAEIMRGPVSVLYGKSSPGGLLNMVSKRPTTEPLKEVQFKAGTDSLFQTGFDFSDALDDDGVYSYRLTGLARSANAQQKGSEEQRYAIAPAFTWRPDDKTNFTFLSYFQNEPETGYYGWLPKEGTVEPLPNGKRLPTDFNEGAKNNTYSRNEKMVGYSFDHEFNDTFTVRQNLRFAENKTSQNSVYGYGVCSDPANAYSKQCAALAPADKGHYLARKYVVDDEKLQNFSVDTQLQSKFATGDIDHTLLTGVDFMRMRNDINAWFGYDDSVPLLDLYNPVNTDFDFNAKDPANSGPYRILNKQKQTGVYVQDQAQWDKVLVTLGGRYDWADQESLNRVAGTTDKRDDKQFTWRGGVNYLFDNGVTPYFSYSESFEPSSQVGKDGNIFAPSKGKQYEVGVKYVPEDRPIVVTGAVYNLTKTNNLMADPEGSFFSVEGGEIRARGVEIEAKAALSASVNVVGSYTYTDAEYTTDTTYKGNTPAQVPKHMASLWADYTFFDGPLSGLTLGTGGRYTGSSYGDPANSFKVGSYTVVDALVRYDLARVGMAGSNVALHVNNLFDREYVASCFNTYGCFWGAERQVVATATFRF

SEQ ID NO: 2955 - protein, 478 aa, Escherichia coli; identical to SEQ ID NO: 2404

SEQ ID NO: 2956 - protein, 240 aa, Escherichia coli
SNKNVNVRKSQEITFCLLAGILMFMAMMVAGRAEAGVALGATRVIYPAGQKQVQLAVTNNDENSTYLIQSWVENADGVKDGRFIVTPPLFAMKGKKENTLRILDATNNQLPQDRESLFWMNVKAIPSMDKSKLTENTLQLAIISRIKLYYRPAKLALPPDQVAEKLRFRRSANSLTLINPTPYYLTVTELNAGTRVLENALVPPMGESTVKLPSDAGSNITYRTINDYGALTPKMTGVME

SEQ ID NO: 2957 - protein, 204 aa, Escherichia coli
MMKKIAITCALLSSLVASSVWADAASDLKSRLDKVSSFHASFTQKVTDGSGAAVQEGQGDLWVKRPNLFNWHMTQPDESILVSDGKTLWFYNPFVEQATATWLKDATGNTPFMLIARNQSSDWQQYNIKQNGDDFVLTPKASNGNLKQFTINVGRDGTIHQFSAVEQDDQRSSYQLKSQQNGAVDAAKFTFTPPQGVTVDDQRK

SEQ ID NO: 2958 - protein, 860 aa, Escherichia coli
MRDTSSGRMKTGVTGLALAVMVACVMFRAESGIARTYSFDAAMLKGGGKGVDLTLFEEGGQLPGIYPVDIILNGSRVDSQEMAFHAERDAEGRPYLKTCLTREMLARYGVRIEEYPALFRASGEGRGASVAEEACADLTAIPQATESYQFAAQQLVLGIPQVALRPQLRGIAPEALWDDGIPAFLLNWQANAGRSEYRGYGKRVTDSYWVSLQPGINIGPWRVRNLTTWNRSSGQSGKWESSYIRAERGLNGIKSRLTLGEDYTPSDIFDSVPFRGAMMSSDESMVPYNLREFAPVVRGIARTQARIEVRQNGYLIQSQTVAPGAFALTDLPVTGSGSDLQVTVLESDGTAQVFTVPFTTPAIALREGYLKYNVTAGQYRSSDDAVEHTSLGQVTAMYGLPWGLTVYGGLQGAEHYQSAALGLGWSLGRLGAVSLDTTHSRGQQKGHDYETGDTWRIRYNKSFELTGTSFTAASYQYSSDGYHTLPDVLDTWRDDRYAYRHTENRSRRTTLSLSQSLGQWGYVGLNGSRDEYRDRPHRDYFGASYSTSWNNISLSVNWSRNRNSGGYYGGWSRTEDSVSMWMSVPLGRWFGGTDNDISATAQMQRSTGQDTRYEAGLNGRAFDRRLYWDVREQMVPGSESHADTSRLNLTWYGTYGELTGMYSYSSTMRQLNAGMSGSMVAHSEGVTFGQRTGDTVALIAAPGVSGASVGGWPGVRTDFRGYTLAGYASPYQENVLTLDPTTFPEDAEVPQTDSRVVPTKGAVVRAGFRTRVGGRALVSLARQDGTPLPFGAVVTVEGEAGQAAGSAGVVGDRGEVYLSGLKESGKLKAQWGENSLCHADYRLPEEKGPAGIFLTRTVCM

SEQ ID NO: 2959 - protein, 240 aa, Escherichia coli
SNKNVNVRKSQEITFCLLAGILMFMAMMVAGRAEAGVALGATRVIYPAGQKQVQLAVTNNDENSTYLIQSWVENADGVKDGRFIVTPPLFAMKGKRENTLRILDATNNQLPQDRESLFWMNVKAIPSMDKSKLTENTLQLAIISRIKLYYRPAKLALPPDQAAEKLRFRRSANSLTLINPTPYYLTVTELNAGARVLENALVPPMGESTVKLPSDAGSNITYRTINDYGALTPKMTGVME

SEQ ID NO: 2960 - protein, 159 aa, Escherichia coli
ILKWQNGGKALVDGIEASMSFPLVKDRLNWNTNATWMITSEQKDTGNPLSVIPKYTINNSLNWTITQAFSASVNWTLYGRQKPRTHAETRSEDTGGLSGKELGAYSLVGTNFNYDINKNLRLNVGVSNILNKQIFRSSEGANTYNEPGRAYYAGVTASF

SEQ ID NO: 2961 - protein, 446 aa, Escherichia coli; identical to SEQ ID NO: 2180

SEQ ID NO: 2962 - protein, 368 aa, Escherichia coli
MKVKVLSLLVPALLVAGAANAAEVYNKDGNKLDLYGKVDGLHYFSDNKSEDGDQTYVRLGFKGETQVTDQLTGYGQWEYQIQGNTSEDNKENSWTRVAFAGLKFQDVGSFDYGRNYGVVYDVTSWTDVLPEFGGDTYGSDNFMQQRGNGFATYRNTDFFGLVDGLNFAVQYQGKNGSVSGEGMTNNGRDALRQNGDGVGGSITYDYEGFGIGAAVSSSKRTDAQNTAAYIGNGDRAETYTGGLKYDANNIYLAAQYTQTYNATRVGSLGWANKAQNFEAVAQYQFDFGLRPSVAYLQSKGKNLGVINGRNYDDEDILKYVDVGATYYFNKNMSTYVDYKINLLDDNRFTRDAGINTDDIVALGLVYQF

SEQ ID NO: 2963 - protein, 430 aa, Escherichia coli; identical to SEQ ID NO: 2617

SEQ ID NO: 2964 - protein, 244 aa, Escherichia coli
MWKLSMIRKKILMAAIPLFVISGADAAVSLDRTRAVFDGSEKSMTLDISNDNKQLPYLAQAWIENENQEKIITGPVIATPPVQRLEPGAKSMVRLSTTPDISKLPQDRESLFYFNLREIPPRSEKANVLQIALQTKIKLFYRPAAIKTRPNEVWQDQLILNKVSGGYRIENPTPYYVTVIGLGGSEKQAEEGEFETVMLSPRSEQTVKSANYNTPYLSYINDYGGRPVLSFICNGSRCSVKKEK

SEQ ID NO: 2965 - protein, 42 aa, Escherichia coli
EYWTNRWNLQPLLQSAQLTGMTVTIKSNTCASGSGFAEVQFN

SEQ ID NO: 2966 - protein, 43 aa, Escherichia coli
KEYWTNRWNLQPLLQSAQLTGMTVTIKSNTCASGSGFAEVQFN

SEQ ID NO: 2967 - protein, 241 aa, Escherichia coli; identical to SEQ ID NO: 2075

SEQ ID NO: 2968 - protein, 432 aa, Escherichia coli; identical to SEQ ID NO: 2026

SEQ ID NO: 2969 - protein, 373 aa, Escherichia coli
MKVKVLSLLVPALLVAGAANAAEVYNKDGNKLDLYGKVDGLHYFSDNKSEDGDQTYMRLGFKGETQVTDQLTGYGQWEYQIQGNSAENENNSWTRVAFAGLKFQDVGSFDYGRNYGVVYDVTSWTDVLPEFGGDTYGSDNFMQQRGNGFATYRNTDFFGLVDGLNFAVQYQGKNGSVDGEGMTNNGRGALRQNGDGVGGSITYDYEGFGIGAAVSSSKRTDDQNFGLNGYGERYLGNGDRAETYTGGLKYDANNIYLAAQYTQTYNATRVGSLGWANKAQNFEAVAQYQFDFGLRPSVAYLQSKGKNLGVINGRNYDDEDILKYVDVGATYYFNKNMSTYVDYKINLLDDNRFTRDAGINTDDIVALGLVYQF

SEQ ID NO: 2970 - protein, 206 aa, Escherichia coli
MSLLEVIIVLGIIGTIAAGVVILAQRAFDSRAVTDLVTNTNTVRVAMKDAYQRDGKYPDFVDPLSLTANTIKTDTNGIPAAQLVQLGKITPDEVRNNISGDFIAIGGALTSNGAQVKKGFAIELNGLSQEQCRSILGQVGNNWEYVAIGTSASGSYAMTATGVDMSVAASTTVLRSLGNNGQTTLTADKILSTCTAQVNSITLGSR

SEQ ID NO: 2971 - protein, 753 aa, Escherichia coli
MNVIKLAIGSGILLLSCGAYSQSISEKTNSDKKGAAEFSPLSVSVGKTTSEQEALEKTGATSSRTTDKNLQSLDATVRSMPGTYTQIDPGQGAISVNIRGMSGFGRVNTMVDGITQSFYGTSTSGTTAHGSTNNMAGVLIDPNLLVAVDVTRGDSSGSEGINALAGSANMRTIGVDDVIFNGNTYGLRSRFSVGSNGLGRSGMIALGGKSDAFTDTGSIGVMAAVSGSSVYSNFSNGSGINSKEFGYDKYMKQNPKSQLYKMDIRPDEFNSFELSARTYENKFTRRDITSDDYYIKYHYTPFSELIDFNVTASTSRGNQKYRDGSLYTFYKTSAQNRSDALDINNTSRFTVADNELEFMLGSKLMRTRYDRTIHSAAGDPKANQESIENNPFAPSGQQDISALYTGLKVTRGIWEADFNLNYTRNRITGYKPACDSRVICVPQGSYDIDDKEGGFNPSVQLSAQVTPWLQPFIGYSKSMRAPNIQEMFFSNSGGASMNPFLKPERAETWQAGFNIDTRDLLVEQDALRFKALAYRSRIQNYIYSESYLVCSGGRKCSMAEVIGNDWEGISDEYSDNMYIYVNSASDVIAKGFELEMDYDAGFAFGRLSFSQQQTDQPTSIASTYFGAGDMTELPRKYMTLDTGVRFFDNALTLGTIIKYTGKARRLSPDFEQDEHTGAIIKQDLPQIPTIIDLYGTYEYNRNLTLKLSVQNLMNRDYSEALNKLNMMPGLGDETHPANSARGRTWIFGGDIRF

SEQ ID NO: 2972 - protein, 232 aa, Escherichia coli; identical to SEQ ID NO: 2087

SEQ ID NO: 2973 - protein, 512 aa, Escherichia coli
MKKISFFIFTALFCCSAQAAPSSLEKRLGKNEYFIITKSSPVRAILNDFAANYSIPVFISSSVNDDFSGEIKNEKPVKVLEKLSKLYHLTWYYDENILYIYKTNEISRSIITPTYLDIDSLLKYLSDTISVNKNSCNVRKITTFNSIEVRGVPECIKYITSLSESLDKEAQSKAKNKDVVKVFKLNYASATDITYKYRDQNVVVPGVVSILKTMASNGSLPSTGKGAVERSGNLFDNSVTISADPRLNAVVVKDREITMDIYQQLISELDIEQRQIEISVSIIDVDANDLQQLGVNWSGTLNAGQGTIAFNSSTAQANISSSVISNASNFMIRVNALQQNSKAKILSQPSIITLNNMQAILDKNVTFYTKVSGEKVASLESITSGTLLRVTPRILDDSSNSLTGKRRERVRLLLDIQDGNQSTNQSNAQDASSTLPEVQNSEMTTEATLSAGESLLLGGFIQDKESSSKDGIPLLSDIPVIGSLFSSTVKQKHSVVRLFLIKATPIKSASSE

SEQ ID NO: 2974 - protein, 512 aa, Escherichia coli
MKKISFFIFTALFCCSAQAAPSSLEKRLGKNEYFIITKSSPVRAILNDFAANYSIPVFISNSVNDDFSGEIKNEKPMKVLEKLSRLYHLTWYYDENILYIYKTNEISRSIITPTYLDIDSLLKYLRDTISVNKNSCNVRKITTFNSIEVRGVPECIKYITSLSESLDKEAQSKAKNKDVVRVFKLNYASATDITYKYRDQNVVVPGVVSILKTMASNGSLPSTGKGAVERNGNLFDNSVKISADPRLNAVVVKDREITMDIYRQLISELDIEQRQIEISVSIIDVDANDLQQLGVNWSGTLNAGQGSIAFNSSTAQANLSSSVISNANNFMIRVNALQQNSKAKILSQPSIITLNNMQAILDKNVTFYTKVSGEKVASLESITSGTLLRVTPRILDDNSNSLTGKRRERVRLLLDIQDGNQSTNQSNAQDASSILPEVQNSEMTTEATLSAGESLLLGGFIQDKESSSKDGIPLLSDIPVIGNLFSSTTKQKHSVVRLFLIKATPIKSASSE

SEQ ID NO: 2975 - protein, 370 aa, Escherichia coli
MKVKVLSLLVPALLVAGAANAAEVYNKDGNKLDLYGKVDGLHYFSDNDKVDGDKTYMRLGFKGETQVTDQLTGYGQWEYQIQGNAPESENNSWTRVAFAGLKFQDVGSFDYGRNYGVVYDVTSWTDVLPEFGGDTYGSDNFMQQRGNGFATYRNTDFFGLVDGLNFAVQYQGKNGSVSGEGMTNNGRDALEQNGDGVGGSITYDIGEGFSFGGAISSSKRTAEQNNSARFIGNGDRAETYTGGLKYDANNIYLAAQYTQTYNATLAGDLGWANKAQNFEVVAQYQFDFGLRPSVAYLQSKGKNLNANIAGRTYDDEDLVKYVDVGATYYFNKNMSTYVDYKINLLDDNNFTRAAGINTDDIVALGLVYQF

SEQ ID NO: 2976 - protein, 667 aa, Escherichia coli
MAKIAAIFQLLDKNVTVSSHRLELLSPARDAAIAREAILHGADAVYIGGPGFGARHNASNSLKDIAELVPFAHRYGAKIFVTLNTILHDDELEPAQRLITDLYQTGVDALIVQDMGILELDIPPIELHASTQCDIRTVEKAKFLSDVGFTQIVLARELNLDQIRAIHQATDATIEFFIHGALCVAYSGQCYISHAQTGRSANRGDCSQACRLPYTLKDDQGRVVSYEKHLLSMKDNDQTANLGALIDAGVRSFKIEGRYKDMSYVKNITAHYRQMLDAIIEERGDLARASSGRTEHFFVPSTEKTFHRGSTDYFVNARKGDIGAFDSPKFIGLPVGEVVKVAKDHLDVAVTEPLANGDGLNVLIKREVVGFRANTVEKTGENQYRVWPNEMPADLHKIRPHHPLNRNLDHNWQQALTKTSSERRVAVDIELGGWQEQLILTLTSEEGVSITHTLDGQFDEANNAEKAMNNLKDGLAKLGQTLYYARDVQINLPGALFVPNSLLNQFRREAADMLDAARLASYQRGSRKPVADPAPVYPQTHLSFLANVYNQKAREFYHRYGVQLIDAAYEAHEEKGEVPVMITKHCLRFAFNLCPKQAKGNIKSWKATPMQLVNGDEVLTLKFDCRPCEMHVIGKIKNHILKMPLPGSVVASVSPDELLKTLPKRKG

SEQ ID NO: 2977 - protein, 255 aa, Escherichia coli
MKIRHLAALVGILAGLPASGVMAAGNQESTKTTSKVFSLHLGATRVIYNLDSSGASLTVMNDLDYPMLVQSEVLAENQKDPAPFVVTPPLFRLDALQSSRLRIVRTGGVFPEDRESLQWLCVKGIPPKHDDRWAEEKGADKKKADKATLQVNLSVSSCVKLFVRPPAVKGPPEDAGGKVEWTKSGNKLKGNNPTPFYINISELSVGGKEVKEHRYISPYSSYEYEIPSGASGKVSWTVITDYGGKSKPFESELKS

SEQ ID NO: 2978 - protein, 614 aa, Escherichia coli; identical to SEQ ID NO: 1883

SEQ ID NO: 2979 - protein, 365 aa, Escherichia coli
MKVKVLSLLVPALLVAGAANAAEIYNKDGNKLDLYGKVDGLHYFSDNDSKDGDKTYMRLGFKGETQVTDQLTGYGQWEYQIQGNEPESDNSSWTRVAFAGLKFQDVGSFDYGRNYGVVYDVTSWTDVLPEFGGDTYDSDNFMQQRGNGFATYRNTDFFGLVDGLDFAVQYQGKNGSAHGEGMTTNGRNDVFEQNGDGVGGSITYNYEGFGIGAAVSSSKRTDAQNNTADYIGTGDRAETYTGGLKYDANNIYLAAQYTQTYNATRVGSLGWANKAQNFEAVAQYQFDFGLRPSLAYLQSKGKNLGRGYDDEDILKYVDVGATYYFNKNMSTYVDYKINLLDDNQFTRDAGINTDNIVALGLVYQF

SEQ ID NO: 2980 - protein, 124 aa, Escherichia coli
MNKVKFYVLFTALLSSLCAHGAPQSITELCSEYRNTQIYTINDKILSYTESMAGKREMVIITFKSGATFQVEVPGSQHIDSQKKAIERMKDTLRIAYLTETKIDKLCVWNNKTPNSIAAISMEN

SEQ ID NO: 2981 - protein, 89 aa, Escherichia coli
MKKILLIAASLSFFSASVLAAPDCVTGKVEYTKYNDDDTFTVKVGDKELFTNRWNLQSLLLSAQITGMTVTIKTNACHNGGGFSEVIFR

SEQ ID NO: 2982 - protein, 374 aa, Escherichia coli
MKVKVLSLLVPALLVAGAANAAEVYNKDGNKLDLYGKVDGLHYFSDNKSEDGDQTYVRLGFKGETQVTDQLTGYGQWEYQIQGNTSEDNKENSWTRVAFAGLKFQDVGSFDYGRNYGVVYDVTSWTDVLPEFGGDTYGSDNFMQQRGNGYATYRNTDFFGLVDGLNFAVQYQGKNGSVSGEGMTNNGRGALRQNGDGVGGSITYDYEGFGIGAAVSSSKRTDDQNFGLNGYGERYLGNGDRAETYTGGLKYDANNIYLAAQYTQTYNATRVGSLGWANKAQNFEAVAQYQFDFGLRPSVAYLQSKGKNLGVVAGRNYDDEDILKYVDVGATYYFNKNMSTYVDYKINLLDDNQFTRDAGINTDNIVALGLVYQF

SEQ ID NO: 2983 - protein, 784 aa, Escherichia coli; identical to SEQ ID NO: 2240

SEQ ID NO: 2984 - protein, 185 aa, Escherichia coli
MKSKLIILLMLVPFSSFSTGNNFEINKTRVIYSDSTPSVQISNNKAYPLIIQSNIWDENNNKNHDFIATPPIFKMESESRNIIKIIKTNIKLPDSQESMRWLCIESMPPTEKSTKINRKEGRTDSINISIRGCIKLIYRPASVPSPVFNNIVEKLKWHKNGKYLVLKNNTPYYISFSEVFLIQIK

SEQ ID NO: 2985 - protein, 148 aa, Escherichia coli
MKSKLIILLMLVPFSSFSTGNNFEINKTRVIYSDSTPSVQISNNKAYPLIIQSNIWDENNNKNHDFIATPPIFKMESESRNIIKIIKTNIKLPDSQESMRWLCIESMPPTEKSTKINRKEGRTDSINISIRGCIKLIYRHCQCSVSCF

SEQ ID NO: 2986 - protein, 725 aa, Escherichia coli
MRINKILWSLTVLLVGLNSQVSVAKSSDDDNDETLVVEATAEQVLKQQPGVSVITSEDIKKTPPVNDLSDIIRKMPGVNLTGNSASGTRGNNRQIDIRGMGPENTLILIDGVPVTSRNSVRYSWRGERDTRGDTNWVPPEQVERIEVIRGPAAARYGSGAAGGVVNIITKRPTNDWHGSLSLYTNQPESSDEGATRRANFSLSGPLAGNALTTRLYGNLNKTDADSWDINSPVGTKNAAGHEGVRNKDINGVVSWKLNPQQILDFEAGYSRQGNIYAGDTQNSSSSAVTESLAKSGKETNRLYRQNYGITHNGIWDWGQSRFGVYYEKTNNTRMNEGLSGGGEGRILAGEKFTTNRLSSWRTSGELNIPLNVMVDQTLTVGAEWNRDKLDDPSSTSLTVNDSDISGISGSAADRSSKNHSQISALYIEDNIEPVPGTNIIPGLRFDYLSDSGGNFSPSLNLSQELGDYFKVKAGVARTFKAPNLYQSSEGYLLYSKGNGCPKDITSGGCYLIGNKDLDPEISVNKEIGLEFTWEDYHASVTYFRNDYQNKIVAGDNVIGQTASGAYILKWQNGGKALVDGIEASMSFPLVKDRLNWNTNATWMITSEQKDTGNPLSVIPKYTINNSLNWTITQAFSASVNWTLYGRQKPRTHAETRSEDTGGLSGKELGAYSLVGTNFNYDINKNLRLNVGVSNILNKQIFRSSEGANTYNEPGRAYYAGVTASF

SEQ ID NO: 2987 - protein, 653 aa, Escherichia coli
MRNNSTWSRSSGQTAEWKNLSSYLQRAVIPLKGELTVGDDYTAGDFFDSVSFRGVQLASDDNMLPDSLKGFAPVVRGIAKSNAQITIKQNGYTIYQTYVSPGAFEISDIYSTSSSGDLLVEIKEADGSVNSYSVPFSSVPLLQRQGRIKYAVTLAKYRTNSNEQQESKFAQATLQWGGPWGTTWYGGGQYAEYYRAAMFGLGFNLGDFGAISFDVTQAKSTLADQSEHKGQSYRFLYAKTLNQLGTNFQLMGYRYSTSGFYTLSDTMYKHMDGYEFNDGDDEDTPMWSRYYNLFYTKRGKLQVNISQQLSEYGSFYLSGSQQTYWHTDQQDRLLQFGYNTQIKDLSLGISWNYSKSRGQPDADQVFALNFSLPLNLLLSRSNDSYTSKKNYAWMTSNTSIDNEGHTTQNLGLTETLLDDGNLSYSVQQGYNSEGKTANGSASMDYKGVFADARVGYNYSDNGSQQQLNYALSGSLVAHSQGITLGQSLGETNVLIAAPGAENTRVANSTGLKTDWRGYTVVPYATSYRENRIALDAASLKRNVDLENAVVNVVPTKGALVLAEFNAHAGARVLMKTSKQGISLRFGAIATLDGVQTNSGIIDDDGSLYMAGLPAKGTITVRWGEAPDQICHISYELTEQQINSAITRMDAICR

SEQ ID NO: 2988 - protein, 367 aa, Escherichia coli
MKVKVLSLLVPALLVAGAANAAEVYNKDGNKLDLYGKVDGLHYFSDNDKVDGDKTYMRLGFKGETQVTDQLTGYGQWEYQIQGNAPESENNSWTRVAFAGLKFQDVGSFDYGRNYGVVYDVTSWTDVLPEFGGDTYDSDNFMQQRGNGFATYRNTDFFGLVDGLNFAVQYQGKNGSVSGEGMTNNGRDALEQNGDGVGGSITYDYEGFGIGAAVSSSKRTDAQNTAAYIGNGDRAETYTGGLKYDANNIYLAAQYTQTYNATRVGSQGWANKAQNFEAVAQYQFDFGLRPSVAYLQSKGKNLGTIGTRNYDDEDILKYVDVGATYYFNKNMSTYVDYKINLLDDNQFTRDAGINTDNIVALGLVYQF

SEQ ID NO: 2989 - protein, 124 aa, Escherichia coli; identical to SEQ ID NO: 2000

SEQ ID NO: 2990 - protein, 367 aa, Escherichia coli; identical to SEQ ID NO: 2431

SEQ ID NO: 2991 - protein, 87 aa, Escherichia coli
MKKMFIAVLFALVSVNAMAADCAKGKIEFSKYNEDNTFTVKVSGREYWTNRWNLQPLLQSAQLTGMTVTIISNTCSSGSGFAQVKFN

SEQ ID NO: 2992 - protein, 213 aa, Escherichia coli; identical to SEQ ID NO: 2232

SEQ ID NO: 2993 - protein, 374 aa, Escherichia coli
MKVKVLSLLVPALLVAGAANAAEVYNKDGNKLDLYGKVDGLHYFSDNKSEDGDQTYVRLGFKGETQVTDQLTGYGQWEYQIQGNTSEDNKENSWTRVAFAGLKFQDVGSFDYGRNYGVVYDVTSWTDVLPEFGGDTYGSDNFMQQRGNGYATYRNTDFFGLVDGLNFAVQYQGKNGSVSGEGMTNNGRGALRQNGDGVGGSITYDYEGFGIGAAVSSSKRTDDQNFGLNGYGERYLGNGDRAETYTGGLKYDANNIYLAAQYTQTYNATRVGSLGWANKAQNFEAVAQYQFDFGLRPSVAYLQSKGKNLGVINGRNYDDEDILKYVDVGATYYFNKNMSTYVDYKINLLDDNQFTRDAGINTDNIVALGLVYQF

SEQ ID NO: 2994 - protein, 241 aa, Escherichia coli
MSNKNVNVRKSQEITFCLLAGILMFMAMVVAGRAEAGVALGATRVIYPAGQKQVQLAVTNNDENSTYLIQSWVENADGVKDGRFIVTPPLFAMKGKKENTLRILDATNNQLPQDRESLFWMNVKAIPSMDKSKLTENTLQLAIISRIKLYYRPAKLALPPDQAAEKLRFRRSANSLTLINPTPYYLTVTELNAGTRVLENALVPPMGESTVKLPSDAGSNITYRTINDYGALTPKMTGVME

SEQ ID NO: 2995 - protein, 230 aa, Escherichia coli
MMTKIKLLMLIIFYLIISASVHAAGGIALGATRIIYPADAKQTAVWIRNSHTNERFLVNSWIENSSGVKEKSFIITPPLFVSEPKSENTLRIIYTGPPLAADRESLFWMNVKTIPSVDKNALNGRNVLQLAILSRMKLFLRPIQLQELPAEAPDTLKFSRSGNYINVHNPSPFYVTLVNLQVGSQKLGNAMAAPRVNSQIPLPSGVQGKLKFQTVNDYGSVTPVREVNLN

SEQ ID NO: 2996 - protein, 191 aa, Escherichia coli
MSTSYDFDFGLSLGAAYSNSDRTDNQVHKGTHNTRYGDRFDATAGGETAEAWTVGAKYDANNVYLAAMYAEPRNMTGYGDADAIANKTQNFEVVAQYQFDFGLRPSIAYLQSKGKDLGGVNSDNFDSQGNHHYTNKDLVKYVDIGMTYYFNKNMSTYVDYKINLLDNDDDFYKENGIATDDIVAVGLVYQF

SEQ ID NO: 2997 - protein, 511 aa, Escherichia coli; identical to SEQ ID NO: 2457

SEQ ID NO: 2998 - protein, 362 aa, Escherichia coli
MMKRNILAVIVPALLVAGTANAAEIYNKDGNKVDLYGKAVGLHYFSKGNGENSYGGNGDMTYARLGFKGETQINSDLTGYGQWEYNFQGNNSEGADAQTGNKTRLAFAGLKYADVGSFDYGRNYGVVYDALGYTDMLPEFGGDTAYSDDFFVGRVGGVATYRNSNFFGLVDGLNFAVQYLGKNERDTARRSNGDGVGGSISYEYEGFGIVGAYGAADRTNLQEAQLLGNGKKAEQWATGLKYDANNIYLAANYGETRNATPITNKFTNISGFANKTQDVLLVAQYQFDFGLRPSIAYTKSKAKDVEGIGDVDLVNYFEVGATYYFNKNMSTYVDYIINQIDSDNKLGVGSDDTVAVGIVYQF

SEQ ID NO: 2999 - protein, 859 aa, Escherichia coli
MWNLLRRTRKNQKSGRDVREAGWTSLFQAVAEPFSGAWQQGVKADPEAVLSFHAVFACISLISQDIAKMRLRLMQTDAHGIRRETRRGDIARLCRRPNAQQNRIQFFELWLNAKLRHGNTVVLKIRNARGQIKELRILDWSRVEPLVADDGEVFYRITPDRNCGITEAVTVPAREVIHDRFNCFFHPLIGLPPVYAAGLAATQGHHIQENSTSFFRNGGRPSGVIEIPGSITEENAKKLKSNWDSGYTGENAGKTAILSNGAKYNPTTFSPVDAQTVEQLKMTAEIVCSVFRVPAYKIGVGQPPSSDNVEALEQQYYSQCLQTLIESIELLLDEALETGENESTEFDVTTLLRMDSERRMKTLGDAVKNTLLTPNEARKRENLPPLAGGDALYLQQQNYSLEALSRRDAREDPFASAGKTVSSQLPDGASDGNKAISETEHDAVKAMFRGDTEKMTERELSIIRALGEEFSTVLADLQRTFEGKMASQAQAFEEKLTSLSAVLQKHVTVDEVRPVLQAMVDDAVGAIPVPRDGRDYDPDVLQQAVNDAVANIPQPADGKSLTPDDVRPMLEQMVKEAVSHIPVPRDGRDYDPEVLQKAVNDAVANIPQPADGKSLTPDDVRPMLEQMVKEAVSHIPVPRDGRDYDPDVLQKAVNDAVANIPQPADGKSLTPDDVRPMLEQMVKEAVSHIHVPRDGRDYDPDVLQKAVLDAVSALPAPQDGRDATALEILPAIDDQKSFPRGTYATHQGGLWRAYEKTHGMRGWECLVDGVADIDVSMTGERLFSVVVRQSSGQRTEKTFSLPVMLYRGVFRAGETYHPGDTVTWGGSLWHCNSMTEDKPGEAHSSAWTLAAKRGRDAGG

SEQ ID NO: 3000 - protein, 193 aa, Escherichia coli; identical to SEQ ID NO: 2246

SEQ ID NO: 3001 - protein, 89 aa, Escherichia coli; identical to SEQ ID NO: 2810

SEQ ID NO: 3002 - protein, 89 aa, Escherichia coli; identical to SEQ ID NO: 2812

SEQ ID NO: 3003 - protein, 121 aa, Escherichia coli
MNAVLSVQGASAPVKKKSFFSKFTRLNMLRLVRAVIPVAVLMMLFPELAMASAGKGTDLMAKGNDTVKATFGKDSSIVKWVVLAEVLVGAVMYMMTKNVKFLVGFAIISVFIAVGMTVVGL

SEQ ID NO: 3004 - protein, 89 aa, Escherichia coli; identical to SEQ ID NO: 2833

SEQ ID NO: 3005 - protein, 89 aa, Escherichia coli; identical to SEQ ID NO: 2810

SEQ ID NO: 3006 - protein, 835 aa, Escherichia coli
MRLRKKLLLPSLLVFISNRAVGGDYFDPSLLAAGIDGENIDLSVFSHPGGGIEGEQEVSVQVNDNFYTRKTLHFRNSGDKGLLPDFPAGFFDDLLAPEYRPVQKDTLLSSADFMSQTPYSSVTFNQGEGRVDIRVPQAFLGRAAQLRSSPDTWENGVPALLMDYSLTGNRNDSDSYSSRSLYASARLGLNVGPWRLRTSGNYSQYQSESRWWRSRTENTSFYSTWLERDISALRASLRIGEVSTGGMILDSVSFRGVRLYSNDDMLSSRLRNYSPTVKGFARTQAVVIITQNGRQVYQTNVPAGPFELNDFYISGYSGDLVVTVRESDGSEHSFIQPFSTLPEMKREGVSGFELSAGRYDNHGSEDYYNDPLFVYGAWSRGFGGGVTVFGETLQAGKYQSAGIGSTLSLGRVGAVSADISVSRAEKYDDIHTGQSYGLKYSKSQVETGTTVTLATYRYSTKDFYSFGDFVSRTEQARYVWENRLKNRMTLSLNQSLGSLGSVSLSASQQDYWTSGEVNRSFSLSHSFSWRDIYFSTTFSMDQMSGNRYGYDNNRQIDFYMSVPLSRLLGREEPTSSSVSWSATRTERQLRQTATLSGSVPDTRMRYRVGGNWGNGGAAEGQSASLTWNGDFTTASLGYTRSGGYRTTDFSLSGAAVAWSGGVAFGSNSVTDNGAIVVNTSGVSGIGTSAGGRTTWPGTALISSPQLYTENRIDLRTDGLPDDIVLAETSARTVPSRGAVVVLDYTVYRGGQVVFTLKRPDGSALPFGSVVSLDGMPSGKENTGIVGDEGRVYLAGVPEKGRLTVNSGGKQCHADFVLPQDRKKSGPVAEAVAVCR

SEQ ID NO: 3007 - protein, 234 aa, Escherichia coli
MRIFSSAFILAGMLLCSYASAASFGPRESTLIFDGRQGSTSYRIDNSDARLPWLVQAWVEDINEERTDAFTSVPLVFRVEPSSTFTVRIVKKGTVPEDRETLYWAVSNSLPGGERSEQKTDGDKISAQLSLAYRFKVPMIYRPAALAGKPQQPESLQWHTAAGGKMTVRNPTPYVVQLNYVSVDGKRHQGKGVSWFISPEKSVTVDVSAGAGSRIKYGVVNDYGAVREYEGVVR

SEQ ID NO: 3008 - protein, 880 aa, Escherichia coli
MPDHSLFRLRILPWCIALAMSGSYSSVWAEDDIQFDSRFLELKGDTKIDLKRFSSQGYVEPGKYNLQVQLNKQPLAEEYDIYWYAGEDDASKSYACLTPELVAQFGLKEDVANNLQWSHDAKCLKSGQLEGMEIKADLSQSALVISLPQAYLEYTYPDWDPPSRWDDGISGIVADYSINAQTRHEENGGDDSNEISGNGTVGVNLGPWRMRADWQTNYQHTRSNDDDEFSGDETQKKWEWSRYYAWRALPSLKAKLALGEDYLRSDIFDGFNYVGGSVSTDDQMLPPNLRGYAPDISGVAHTTAKVTVSQMGRVIYETQVPAGPFRIQDLGDSVSGTLHIRIEEQNGQVQEYDISTASMPYLTRPGQVRYKIMMGRPQEWGHHVEGEFFSGAEASWGIANGWSLYGGALGDENYQSAALGVGRDLSTFGAVAFDVTHSHTKLDKDTAYGKGSLDGNSFRVSYSKDFDQLNSRVTFAGYRFSEENFMTMSEYLDASDSGMVRTGNDKEMYTATYNQNFRDAGVSVYLNYTRHTYWDREEQTNYNIMLSHYFNMGSIRNVSISMTGYRYEYDNQADKGMYISLSMPWGDNSTVSYNGNYGSGTDSSQVGYFSRVDDATHYQLNVGTSDKHTSVDGYYSHDGSLAQVDLSANYHEGQYTSAGLSLQGGATLTAHGGALHRTQNMGGTRLLIDADGVADVPVEGNGAAVYTNMFGKAVVSDVNNYYRNQAYIDLNRLPENAEATQSVVQATLTEGAIGYRKFAVISGQKAMAVQRLQDGSHPPFGAEVKNDNEQTVGLVDDDGNVYLAGVKPGEHMSVFWSGVAHCDINLPDPLPADLFNGLLLPCQHKGNVAPVVPDDIKPVIQEQTQQVTPTNPPVSVSANQ

SEQ ID NO: 3009 - protein, 208 aa, Escherichia coli; identical to SEQ ID NO: 1949

SEQ ID NO: 3010 - protein, 351 aa, Escherichia coli
MKKSTLALVVMGIVASASVQAAEIYNKDGNKLDVYGKVKAMHYMSDNDSKDGDQSYIRFGFKGETQINDQLTGYGRWEAEFAGNKAESDTAQQKTRLAFAGLKYKDLGSFDYGRNLGALYDVEAWTDMFPEFGGDSSAQTDNFMTKRASGLATYRNTDFFGVIDGLNLTLQYQGKNENRDVKKQNGDGFGTSLTYDFGGSDFAISGAYTNSDRTNEQNLQSRGTGKRAEAWATGLKYDANNIYLATFYSEIRKMTPITGGFANKTQNFEAVAQYQFDFGLRPSLGYVLSKGKDIEGIGDEDLVNYIDVGATYYFNKNMSAFVDYKINQLDSDNKLNINNDDIVAVGMTYQF

SEQ ID NO: 3011 - protein, 213 aa, Escherichia coli; identical to SEQ ID NO: 2232

SEQ ID NO: 3012 - protein, 869 aa, Escherichia coli
MKIPTTTDIPQRYTWCLAGICYSSLAILPSFLSYAESYFNPAFLLENGTSVADLSRFERGNHQPAGVYRVDLWRNDEFIGSQDIVFESTTENTGDKSGGLMPCFNQVLLERIGLNSSAFPELAQQQNNKCINLLKAVPDATINFDFAAMRLNITIPQIALLSSAHGYIPPEEWDEGIPALLLNYNFTGNRGNGNDSYFFSELSGINIGPWRLRNNGSWNYFRGNGYHSEQWNNIGTWVQRAIIPLKSELVMGDGNTGSDIFDGVGFRGIRLYSSDNMYPDSQQGFAPTVRGIARTAAQLTIRQNGLIIYQSYVSPGAFEITDLHPTSSNGDLDVTIDERDGNQQNYTIPYSTVPILQREGRFKFDLTAGDFRSGNSQQSSPFFFQGTALGGLPQEFTAYGGTQLSANYTAFLLGLGRNLGNWGAVSLDVTHARSQLADDSRHEGDSIRFLYAKSMNTFGTNFQLMGYRYSTQGFYTLDDVAYRRMEGYEYDYDYDGEHRDEPIIVNYHNLRFSRKDRLQLNISQSLNDFGSLYISGTHQKYWNTSDSDTWYQVGYTSSWVGISYSLSFSWNESVGIPDNERIVGLNVSVPFNVLTKRRYTRENALDRAYASFNANRNSNGQNSWLAGVGGTLLEGHNLSYHVSQGDTSNNGYTGSATANWQATYGTLGVGYNYDRDQHDVNWQLSGGVVGHENGITLSQPLGDTNVLIKAPGAGGVRIENQTGILTDWRGYAVMPYATVYRYNRIALDTNTMGNSIDVEKNISSVVPTQGALVRANFDTRIGVRALITVTQGGKPVPFGSLVRENSTGITSMVGDDGQVYLSGAPLSGELLVQWGDGANSRCIAHYVLPKQSLQQAVTVISAVCTHPGS

SEQ ID NO: 3013 - protein, 191 aa, Escherichia coli; identical to SEQ ID NO: 2727

SEQ ID NO: 3014 - protein, 678 aa, Escherichia coli
MVPSTFSRLKAARCLPVVLAALIFAGCGTHTPDQSTAYMQGTAQADSAFYLQQMQQSSDDTRINWQLLAIRALVKEGKTGQAVELFNQLPQELNDSQRREKTLLAVEIKLAQKDFAGAQNLLAKITPADLEQNQQARYWQAKIDASQGRPSIDLLRALIAQEPLLGAKEKQQNIDATWQALSSMTQEQANTLVINADENILQGWLDLQRVWFDNRNDPDMMKAGIADWQKRYPNNPGAKMLPTQLVNVKAFKPASTNKIALLLPLNGQAAVFGRTIQQGFEAAKNIGTQPVAAQVAAAPAADVAEQPQPQTVDGVASPAQASVSDLTGEQPAAQPAPVSTPAATTTAVSAPANPSAELKIYDTSSQPLSQILSQVQQDGASIVVGPLLKNNVEELLKSNTPLNVLALNQPENIENRVNICYFALSPEDEARDAARHIRDQGKQAPLVLIPRSSLGDRVANAFAQEWQKLGGGTVLQQKFGSTSELRAGVNGGSGIALTGTPITPRATTDSGMTTNNPTLQTTPTDDQFTNNGGRVDAVYIVATPGEIAFIKPMIAMRNGSQSGATLYASSRSAQGTAGPDFRLEMEGLQYSEIPMLAGGNLPLMQQALSAVNNDYSLARMYAMGVDAWSLANHFSQMRQVQGFEINGNTGSLTANPDCVINRKLSWLQYQQGQVVPAS

SEQ ID NO: 3015 - protein, 686 aa, Escherichia coli
MFWRDITLSVWRKKTTGLKTKKRLLPLVLAAALCSSPVWAEEATFTANFKDTDLKSFIETVGANLNKTIIMGPGVQGKVSIRTMTPLNERQYYQLFLNLLEAQGYAVVPMENDVLKVVKSSAAKVEPLPLVGEGSDNYAGDEMVTKVVPVRNVSVRELAPILRQMIDSAGSGNVVNYDPSNVIMLTGRASVVERLTEVIQRVDHAGNRTEEVIPLDNASASEIARVLESLTKNSGENQPATLKSQIVADERTNSVIVSGDPATRDKMRRLIRRLDSEMERSGNSQVFYLKYSKAEDLVDVLKQVSGTLTAAKEEAEGTVGSGREVVSIAASKHSNALIVTAPQDIMQSLQSVIEQLDIRRAQVHVEALIVEVAEGSNINFGVQWASKDAGLMQFANGTQIPIGTLGAAISQAKPQKGSTVISENGATTINPDTNGDLSTLAQLLSGFSGTAVGVVKGDWMALVQAVKNDSSSNVLSTPSITTLDNQEAFFMVGQDVPVLTGSTVGSNNSNPFNTVERKKVGIMLKVTPQINEGNAVQMVIEQEVSKVEGQTSLDVVFGERKLKTTVLANDGELIVLGGLMDDQAGESVAKVPLLGDIPLIGNLFKSTADKKEKRNLMVFIRPTILRDGMAADGVSQRKYNYMRAEQIYRDEQGLSLMPHTAQPVLPAQNQALPPEVRAFLNAGRTR

SEQ ID NO: 3016 - protein, 367 aa, Escherichia coli
MKVKVLSLLVPALLVAGAANAAEVYNKDGNKLDLYGKVDGLHYFSDNKDVDGDQTYMRLGFKGETQVTDQLTGYGQWEYQIQGNSAENENNSWTRVAFAGLKFQDVGSFDYGRNYGVVYDVTSWTDVLPEFGGDTYGSDNFMQQRGNGFATYRNTDFFGLVDGLNFAVQYQGKNGSARGEGMTNNGRDALRQNGDGVGGSITYDYEGFGIGAAVSSSKRTDAQNTAAYIGNGDRAETYTGGLKYDANNIYLAAQYTQTYNATRVGSLGWANKAQNFEAVAQYQFDFGLRPSVAYLQSKGKNLGTIGTRNYDDEDILKYVDVGATYYFNKNMSTYVDYKINLLDDNQFTRDAGINTDNIVALGLVYQF

SEQ ID NO: 3017 - protein, 359 aa, Escherichia coli; identical to SEQ ID NO: 2328

SEQ ID NO: 3018 - protein, 774 aa, Escherichia coli
MTPLRVFRKTTPLVNAIRLSLLPLAGLSFSAFAAQVNIAPGSLDKALNQYAAHSGFTLSVDASLTRDKQSNGLHGDYDVESGLQQLLDGSGLQVKPLGNNSWTLEPAPAPKEDALTVVGDWLGDARENDVFEHAGARDVIRREDFAKTGATTMREVLNRIPGVSAPENNGTGSHDLAMNFGIRGLNPRLASRSTVLMDGIPVPFAPYGQPQLSLAPISLGNMDAIDVVRGGGAVRYGPQSVGGVVNFVTRAIPQDFGIEAGVEGQLSPTSSQNNPKETHNLMVGGTADNGFGTALLYSGTRGSDWREHSATRIDDLMLKSKYAPDEVHTFNSLLQYYDGEADMPGGLSRADYDADRWQSTRPYDRFWGRRKLASLGYQFQPDSQHKFNIQGFYTQTLRSGYLEQGKRITLSPRNYWVRGIEPRYSQIFMIGPSAHEVGVGYRYVNESTHEMRYYTATSSGQLPSGSSPYDRDTRSGTEAHAWYLDDKIDIGNWTITPGMRFEHIESYQNNAITGTHEEVSYNAPLPALNVLYHLTDSWNLYANTEGSFGTVQYSQIGKAVQSGNVEPEKARTWELGTRYDDGALTAEMGLFLINFNNQYDSNQTNDTVTARGKTRHTGLETQARYDLGTLTPTLDNVSIYASYAYVNAEIREKGDTYGNLVPFSPKHKGTLGVDYKPGNWTFNLNSDFQSSQFADNANTVKESADGSTGRIPGFMLWGARVAYDFGPQMADLNLAFGVKNIFDQDYFIRSYDDNNKGIYAGQPRTLYMQGSLKF

SEQ ID NO: 3019 - protein, 230 aa, Escherichia coli
MMTKIKLLMLIIFYLIISASAHAAGGIALGATRIIYPADAKQTAVWIRNSHTNERFLVNSWIENSSGVKEKSFIITPPLFVSEPKSENTLRIIYTGPPLAADRESLFWMNVKTIPSVDKNALNGRNVLQLAILSRMKLFLRPIQLQELPAEAPDTLKFSRSGNYINVHNPSPFYVTLVNLQVGSQKLGNAMAAPRVSSQIPLPSGVQGKLKFQTVNDYGSVTPVREVNLN

SEQ ID NO: 3020 - protein, 162 aa, Escherichia coli; identical to SEQ ID NO: 1965

SEQ ID NO: 3021 - protein, 246 aa, Escherichia coli
MFFNTKHTTALCFVTCMAFSSSSIADIVISGTRVIYKSDQKSVNVRLENKGNNPLLVQSWLDTGDDNAEPGSITVPFTATPPVSRIDAKRGQTIKLMYTASTSLPKDRESVFWFNVLEVPPKPDAEKVANQSLLQLAFRTRIKLFYRPDGLKGNPSEAPLALKWFWSGSEGKASLRVTNPTPYYVSFSSGDLEASGKRYPIDVKMIAPFSDEVMKVTGLNGKASSAKVHFYAINDFGGAIEGNASL

SEQ ID NO: 3022 - protein, 237 aa, Escherichia coli
MRKITQAISAVCLLFALNSSAVALASSPSPLNPGTNVARLAEQAPIHWVSVAQIENSLAGRPPMAVGFDIDDTVLFSSPGFWRGKKTFSPESEDYLKNPVFWEKMNNGWDEFSIPKEVARQLIDMHVRRGDAIFFVTGRSPTKTETVSKTLADNFHIPVTNMNPVIFAGDKPGQNTKSQWLQDKNIRIFYGDSDNDITAARDVGARGIRILRASNSTYKPLPQAGAFGEEVIVNSEY

SEQ ID NO: 3023 - protein, 784 aa, Escherichia coli; identical to SEQ ID NO: 2244

SEQ ID NO: 3024 - protein, 203 aa, Escherichia coli; identical to SEQ ID NO: 2009

SEQ ID NO: 3025 - protein, 866 aa, Escherichia coli
MTIKPTKNYHNHLTRIATFCALLYCNSAFCAELVEYDHTFLMGQNASNIDLSRYSEGNPAIPGMYDVSVYVNDQPIINQSITFIEIEGKKNAQACITLKNLLQFHINSPDINNEKAVLLARDETLGNCLNLTEIIPQASVRYDVNEQRLDIDVPQAWVMKNYQNYVDPSLWENGINAAMLSYNLNGYHSETPGRRNDSIYAAFNGGMNLGAWRLRASGNYNWMTDSGSNYDFKNRYIQRDIASLRSQLILGESYTTGETFDSVSIRGIRLYSDSRMLPPTLASFAPIIHGVANTNAKVTIMQGGYKIYETTVPPGAFVIDDLSPSGYGSDLIVTVEESDGSKRTFSQPFSSVVQMLRPGVGRWDISGGQVLKDDIQDEPNLFQASYYYGLNNYLTGYTGIQITDNNYTAGLLGLGLNTSAGAFSFDVTHSNVRIPDDKTYQGQSYRVSWNKLFEETSTSLNIAAYRYSTQNYLGLNDALTLIDEVKHPEQDLEPKSMRNYSRMKNQVTVSINQPLKFEKKDYGSFYLSGSWSDYWASGQNRSNYSIGYSNSASWGSYSVSAQRSWNEDGDTDDSVYLSFTIPIEKLLGTEQRTSGFQSIDTQMSSDFKGNNQLNVSSSGYSDNARVSYSVNTGYTMNKASKDLSYVGGYASYESPWGTLAGSVSANSDNSRQVSLSTDGGFVLHSGGLTFSNDSFSDSDTLAVVQAPGAQGARINYGNSTIDRWGYGVTSALSPYHENRIALDINDLENDVELKSTSAVAVPRQGSVVFADFETVQGQSAIMNITRSDGKNIPFAADIYDEKGNVIGNVGQGGQAFVRGIEQQGNISIKWLEESKPVSCLAHYQQSSEAEKIAQSIILNGIRCQIQ

SEQ ID NO: 3026 - protein, 760 aa, Escherichia coli
MENNRNFPARQFHSLTFFAGLCIGITPVAQALAAEGQTNADDTLVVEASTPSLYAPQQSADPKFSRPVADTTRTMTVISEQVIKDQGATNLTDALKNVPGVGAFFAGENGNSTTGDAIYMRGADTSNSIYIDGIRDIGSVSRDTFNTEQVEVIKGPSGTDYGRSAPTGSINMISKQPRNDSGIDASASIGSAWFRRGTLDVNQVIGDTTAVRLNVMGEKTHDAGRDKVKNERYGVAPSIAFGLGTANRLYLNYLHVTQHNTPDGGIPTIGLPGYSAPSAGTAALNHSGKVDTHNFYGTDSDYDDSTTDTATMRFEHDINDNTTIRNTTRWSRVKQDYLMTAIMGGASNITQPTSDVNSWTWSRTANTKDVSNKILTNQTNLTSTFYTGSIGHDVSTGVEFTRETQTNYGVNPVTLPAVNIYHPDSSIHPGGLTRNGANANGQTDTFAIYAFDTLQITRDFELNGGIRLDNYHTEYDSATACGGSGRGAITCPTGVAKGSPVTTVDTAKSGNLVNWKAGALYHLTENGNVYINYAVSQQPPGGNNFALAQSGSGNSANRTDFKPQKANTSEIGTKWQVLDKRLLLTAALFRTDIENEVEQNDDGTYSQYGKKRVEGYEISVAGNITPAWQVIGGYTQQKATIKNGKDVAQDGSSSLPYTPEHAFTLWSQYQATDDISVGAGARYIGSMHKGSDGAVGTPAFTEGYWVADAKLGYRVNRNLDFQLNVYNLFDTDYVASINKSGYRYHPGEPRTFLLTANMHF

SEQ ID NO: 3027 - protein, 207 aa, Escherichia coli; identical to SEQ ID NO: 2211

SEQ ID NO: 3028 - protein, 249 aa, Escherichia coli
MRYLNTKNLIAAGVLLACMSSIAWGAIIPDRTRIIMNESDKGEALKLTNQSKNLPYLAQTWKEDTKGNKSRDFIVTVPPMVRLNPSEQIQIRMISQEKIAQLPNDRETLFYFNVREIPPKTDKKNVMQVTMQHALKLFWRPKAIELEDDGVMSYEKVEIIRRNDGSIRFNNKMPYHVTLGYIGTNGITMLPQTQSLMVTPYSHADTQFKNVPSAFQVGYINDFGGLSFYEINCPTVNNSCNVSVAKRDK

SEQ ID NO: 3029 - protein, 89 aa, Escherichia coli; identical to SEQ ID NO: 2810

SEQ ID NO: 3030 - protein, 200 aa, Escherichia coli; identical to SEQ ID NO: 1784

SEQ ID NO: 3031 - protein, 746 aa, Escherichia coli
MNKKIHSLALLVNLGIYGVAQAQEPTDTPVSHDDTIVVTAAEQNLQAPGVSTITADEIRKNPVARDVSEIIRTMPGVNLTGNSTSGQRGNNRQIDIRGMGPENTLILIDGKPVSSRNSVRQGWRGERDTRGDTSWVPPEMIERIEVLRGPAAARYGNGAAGGVVNIITKKGSGEWHGSWDAYFNAPEHKEEGATKRTNFSLTGPLGDEFSFRLYGNLDKTQADAWDINQGHQSARAGTYATTLPAGREGVINKDINGVVRWDFAPLQSLELEAGYSRQGNLYAGDTQNTNSDAYTRSKYGDETNRLYRQNYALTWNGGWDNGVTTSNWVQYEHTRNSRIPEGLAGGTEGKFNEKATQDFVDIDLDDVMLHSEVNLPIDFLVNQTLTLGTEWNQQRMKDLSSNTQALTGANTGGAIDGVSATDRSPYSKAEIFSLFAENNMELTDSTIVTPGLRFDHHSIVGNNWSPALNISQGLGDDFTLKMGIARAYKAPSLYQTNPNYILYSKGQGCYASAGGCYLQGNDDLKAETSINKEIGLEFKRDGWLAGVTWFRNDYRNKIEAGYVAVGQNAVGTDLYQWDNVPKAVVEGLEGSLNVPVSETVMWTNNITYMLKSENKTTGDRLSIIPEYTLNSTLSWQAREDLSMQTTFTWYGKQQPKKYNYKGQPAVGPETKEISPYSIVGLSATWDVTKNVSLTGGVDNLFDKRLWRAGNAQTTGDLAGANYIAGAGAYTYNEPGRTWYMSVNTHF

SEQ ID NO: 3032 - protein, 360 aa, Escherichia coli
MKKLTVAISAVAASVLMAMSAQAAEIYNKDSNKLDLYGKVNAKHYFSSNDADDGDTTYARLGFKGETQINDQLTGFGQWEYEFKGNRAESQGSSKDKTRLAFAGLKFGDYGSIDYGRNYGVAYDIGAWTDVLPEFGGDTWTQTDVFMTGRTTGVATYRNNDFFGLVDGLNFAAQYQGKNDRNEVTEANGDGFGFSTTYEYEGFGVGATYAKSDRTNNQVIYGNNGLNASGQNAEVWAAGLKYDANNIYLATTYSETQNMTVFGNNHIANKAQNFEAVAQYQFDFGLRPSVAYLHSKGKDLGVWGDQDLVEYVDVGATYYFNKNMSTFVDYKINLIDKSDFTKASGVATDDIVAVGMVYQF

SEQ ID NO: 3033 - protein, 193 aa, Escherichia coli; identical to SEQ ID NO: 2246

SEQ ID NO: 3034 - protein, 228 aa, Escherichia coli
MKRISFAVLALLMTAQQCFAGGVALSTTRVIYDGGKKEASLTVENHNKNEEFLIQSWIDDVNGNKKTPFIITPPLFKLDPDKNNVLRIVNIEDTLPKDRESVYWINVKAIPAKSAENENKNVLQIAVRTRLKLFYRPKGLPGSNLEAMKQLRFQRQNNQIVVNNDSAYNLTFNQFSINGQKIERAGMVLAKGKLNINLPAGTGNAHEVKYSIINDFGVAGEMLTKPIN

SEQ ID NO: 3035 - protein, 224 aa, Escherichia coli
MKGLLSLLIFSMVLPAHAGIVIYGTRIIYPAENKEVMVQLMNQGNRSSLLQAWIDDGDTSLPPEKIQVPFMLTPPVAKIGANSGQQVKIKIMPNKLPTNKESIFYLNVLDIPPNSPEQEGKNALKFAMQNRIKLFYRPAGIAPVNKATFKKLLVSRSGNGLVIKNDSANWVTISDVKANNVKVNYETIMIAPLESQSVNVKSNNANNWYLTIIDDHGNYISDKI

SEQ ID NO: 3036 - protein, 747 aa, Escherichia coli; identical to SEQ ID NO: 2072

SEQ ID NO: 3037 - protein, 266 aa, Escherichia coli; identical to SEQ ID NO: 1894

SEQ ID NO: 3038 - protein, 518 aa, Escherichia coli; identical to SEQ ID NO: 2349

SEQ ID NO: 3039 - protein, 663 aa, Escherichia coli; identical to SEQ ID NO: 1910

SEQ ID NO: 3040 - protein, 161 aa, Escherichia coli; identical to SEQ ID NO: 2582

SEQ ID NO: 3041 - protein, 838 aa, Escherichia coli
MPQRHHQGHKRTPKQLALIIKRCLPMVLTGSGMLCTTANAEEYYFDPIMLETTKSGMQTTDLSRFSKKYAQLPGTYQVDIWLNKKKVSQKKITFTANAEQLLQPQFTVEQLRELGIKVDEIPALAEKDDDSVINSLEQIIPGTAAEFDFNHQRLNLSIPQIALYRDARGYVSPSRWDDGIPTLFTNYSFTGSDNRYRQGNRSQRQYLNMQNGANFGPWRLRNYSTWTRNDQASSWNTISSYLQRDIKALKSQLLLGESATSGSIFSSYTFTGVQLASDDNMLPNSQRGFAPTVRGIANSSAIVTIRQNGYVIYQSNVPAGAFEINDLYPSSNSGDLEVTIEESDGTQRRFIQPYSSLPMMQRPGHLKYSATAGRYRADANSDSKEPEFAEATAIYGLNNTFTLYGGLLGSEDYYALGIGIGGTLGALGALSMDINRADTQFDNQHSFHGYQWRTQYIKDIPETNTNIAVSYYRYTNDGYFSFNEANTRNWNYNSRQKSEIQFNISQTIFDGVSLYASGSQQDYWGNNDKNRNISVGVSGQQWGIGYSLNYQYSRYTDQNNDRALSLNLSIPLERWLPRSRVSYQMTSQKDRPTQHEMRLDGSLLDDGRLSYSLEQSLDDDNNHNSSLNASYRSPYGTFSAGYSYGNDSSQYNYGVTGGVVIHPHGVTLSQYLGNAFALIDANGASGVRIQNYPGIATDPFGYAVVPYLTTYQENRLSVDTTQLPDNVDLEQTTQFVVPNRGAMVAARFNANIGYRVLVTVSDRNGKPLPFGALASNDETGQQSIVDEGGILYLSGISSKSQSWTVRWGNQADQQCQFAFSTPDSEPTTSVLQGTAQCH

SEQ ID NO: 3042 - protein, 843 aa, Escherichia coli
MHWMHLPLYHYRAHFSFSLLALTIASSLPAYGGKFNPKFLENVQGIDQHIDLSVYDSPVGQQIPGKYRVSVFVNEEKMASRTLDFSTASEAKRKASGESLMPCLSRVQLEEMGVRVDSFPALKMSPPEACVAFDEIIPQATSRFDFNTQTLHLSFPQAAMMMTARGTVDPSRWDEGIPALLLDYSFSGSNGRNEGTGSSSDSTSDSYYLNLRSGLNVGPWRLRNNSIWNRTDGKNQWDNVGTSLNRAIIPLKSQITLGDTATPGEIFDSVQMRGALLASDDEMLPDSQRGFAPVVRGIAKSNAEVSIEQNGYVIYRTFVQPGAFEINDLYATSGSGDLTVIIKEADGSEQRFIQPFSAVAIFQREGYLKYSLAAGEYRAGNYDSDKPHFGQFTAMYGLPWGMTAYGGALLSADYSALALGLGKNFGTIGAVSVDVTQAKSQLRNNEKEEGQSYRFLYSKSFEGGTDLRLLGYKYSTSGYYTFQEATDVRSDADSDYRRYHKRSQIQGNITQQLGDYGSVYFNMTQQDYWNVDGKENSLSAGYHGHIGRVNYSVAYTWTRSPEWEEDDRLWSFSVSIPLGGAWSSYRMTTDQNGKTSQQASVSGTLLEDRNLSYNVQQGYTSNGVGYSGSVNMGYMGGSGNIDVGYNYSKDNQQVNYGVRGGVIVHSEGITLSQPLGESLAIVSAPGARGGHVVNSSGVEVDWMGNAVVPYLTPYRETIVELRSDTLGQNVELQEAFQKVVPTRGAVVRSRFDTRVGYRVLMSLKQANGNAVPFGATAALIDESKPASSIVGEEGQLYISGMPEEGELQVSWGNEQAQRCRVPFRLPENKDNAAIVMVNAVCEK

SEQ ID NO: 3043 - protein, 274 aa, Escherichia coli; identical to SEQ ID NO: 2303

SEQ ID NO: 3044 - protein, 232 aa, Escherichia coli; identical to SEQ ID NO: 2087

SEQ ID NO: 3045 - protein, 446 aa, Escherichia coli; identical to SEQ ID NO: 2179

SEQ ID NO: 3046 - protein, 828 aa, Escherichia coli; identical to SEQ ID NO: 2380

SEQ ID NO: 3047 - protein, 700 aa, Escherichia coli
MKIFSVRQTVLPALLVLSPVVFAADEQTMIVSAAPQVVSELDTPAAVSVVDGEEMRLATPRINLSESLTGVPGLQVQNRQNYAQDLQLSIRGFGSRSTYGIRGIRLYVDGIPATMPDGQGQTSNIDLSSVQNVEVLRGPFSALYGNASGGVMNVTTQTGQQPPTIEASSYYGSFGSWRYGLKATGATGDGTQPGDVDYTVSTTRFTTHGYRDHSGAQKNLANAKLGVRIDEASKLSLIFNSVDIKADDPGGLTKAEWKANPQQAPRAEQYDTRKTIKQTQAGLRYERSLSAQDDMSVMMYAGERETTQYQSIPMAPQLNPSHAGGVITLQRHYQGIDSRWTHRGELGVPVTFTTGLNYENMSENRKGYNNFRLNSGMPEYGQKGELRRDERNLMWNIDPYLQTQWQLSEKLSLDAGVRYSSVWFDSNDHYVTPGNGDDSGDASYHKWLPAGSLKYAMTDAWNIYLAAGRGFETPTINELSYRADGQSGMNFGLKPSTNDTIEIGSKTRIGDGLLSLALFQTDTDDEIVVDSSSGGRTTYKNAGKTRRQGAELAWDQRFAGDFRVKASWTWLDATYRSNVCNEQDCNGNRMPGIARNMGFASIGYVPEDGWYAGTEARYMGDIMADDENTAKAPSYTLVGLFTGYKYNYHNLTVDLFGRVDNLFDKEYVGSVIVNESNGRYYEPSPGRNYGAGMNIAWRFE

SEQ ID NO: 3048 - protein, 250 aa, Escherichia coli
MSDLLCSAKLGATTLALLLSAASLSAQASVTPDRTRLIFNESDKSISVTLRNNDPKLPYLAQSWIEDEKGNKISSPLTVLPPVQRIDSMMNGQVKVQGMPDINKLPADRESLFYFNVREIPPKSNKANTLQIALQTRIKLFWRPKALENVSMKNPWQYKVTLTRNGQEFTVNNPTPYYVIFSNASTQKNGNPAAGFSPIVMSPKTSAPLNVKMGSVPVLTYVNDYGARMPLFFTCNGNSCQVDEEQSRKG

SEQ ID NO: 3049 - protein, 478 aa, Escherichia coli; identical to SEQ ID NO: 2404

SEQ ID NO: 3050 - protein, 539 aa, Escherichia coli
MAAVCGTSGIASLFSQAAFAADSDIADGQTQRFDFSILQSMAHDLAQTAWRGAPRPLPDTLATMTPQAYNSIQYDAEKSLWHNVENRQLDAQFFHMGMGFRRRVRMFSVDPATHLAREIHFRPELFKYNDAGVDTKQLEGQSDLGFAGFRVFKAPELARRDVVSFLGASYFRAVDDTYQYGLSARGLAIDTYTDSKEEFPDFTAFWFDTVKPGATTFTVYALLDSASITGAYKFTIHCEKSQVIMDVENHLYARKDIKQLGIAPMTSMFSCGTNERRMCDTIHPQIHDSDRLSMWRGNGEWICRPLNNPQKLQFNAYTDNNPKGFGLLQLDRDFSHYQDIMGWYNKRPSLWVEPRNKWGKGTIGLMEIPTTGETLDNIVCFWQPEKAVKAGDEFAFQYRLYWSAQPPVHCPLARVMATRTGMGGFPEGWAPGEHYPEKWARRFAVDFVGGDLKAAAPKGIEPVITLSSGEAKQIEILYIEPIDGYRIQFDWYPTSDSTDPVDMRMYLRCQGDAISETWLYQYFPPAPDKRQYVDDRVMS

SEQ ID NO: 3051 - protein, 362 aa, Escherichia coli; identical to SEQ ID NO: 2434

SEQ ID NO: 3052 - protein, 729 aa, Escherichia coli
MLSTQFNRDNQYQAITKPSLLAGCIALALLPSAAFAAPATEETVIVEGSATAPDDGENDYSVTSTSAGTKMQMTQRDIPQSVTIVSQQRMEDQQLQTLGEVMENTLGISKSQADSDRALYYSRGFQIDNYMVDGIPTYFESRWNLGDALSDMALFERVEVVRGATGLMTGTGNPSAAINMVRKHATSREFKGDVSAEYGSWNKERYVADLQSPLTEDGKIRARIVGGYQNNDSWLDRYNSEKTFFSGIVDADLGDLTTLSAGYEYQRIDVNSPTWGGLPRWNTDGSSNSYDRARSTAPDWAYNDKEINKVFMTLKQRFADTWQATLNATHSEVEFDSKMMYVDAYVNKADGMLVGPYSNYGPGFDYVGGTGWNSGKRKVDALDLFADGIYELFGRQHNLMFGGSYSKQNNRYFSSWANIFPDEIGSFYNFNGNFPQTDWSPQSLAQDDTTHMKSLYAATRVTLADPLHLILGARYTNWRVDTLTYSMEKNHTTPYAGLVFDINDNWSTYASYTSIFQPQNDRDSSGKYLAPITGNNYELGLKSDWMNSRLTTTLAIFRIEQDNVAQSTGTPIPGSNGETAYKAVDGTVSKGVEFELNGAITDNWQLTFGATRYIAEDNEGNAVNPNLPRTTVKMFTSYRLPVMPELTVGGGVNWQNRVYTDTVTPYGTFRAEQGSYALVDLFTRYQVTKNFSLQGNVNNLFDKTYDTNVEGSIVYGTPRNFSITGTYQF

SEQ ID NO: 3053 - protein, 243 aa, Escherichia coli; identical to SEQ ID NO: 2910

SEQ ID NO: 3054 - protein, 432 aa, Escherichia coli; identical to SEQ ID NO: 2026

SEQ ID NO: 3055 - protein, 231 aa, Escherichia coli
MSKRTFAVIITLLCSFCIGQALAGGIVLQRTRVIYDASRKEAALPVANKGAETPYLLQSWVDNIDGTSRAPFIITPPLFRLEAGDDSSLRIIKTADNLPENKESLFYINVRAIPAKKKSDDVNANELTLVFKTRIKMFYRPAHLKGRVNDAWTSLEFKRSDHSLNIYNPTEYYVVFAGLAVDKTDLTSKIEYIAPGEHKQLPLPASGGKNVKWAAINDYGGSSGTETRPLQ

SEQ ID NO: 3056 - protein, 998 aa, Escherichia coli
MTVNKIKNIFNNATLTTKSAFNTASSSVRSAGKKLILLIPDNYEAQGVGINELVKAADELGIEIHRTERDDTAIANQFFGAAEKVVGLTERGVAIFAPQLDKLLQKYQKVGSKIGGTAENVGNNLGKAGTVLSALQNFTGIALSGMALDELLRKQRAGEDISQNDIAKSSIELINQLVDTVSSINSTVDSFSEQLNQLGSFLSSKPRLSSVGGKLQNLPDLGPLGDGLDVVSGILSAVSASFILGNSDAHTGTKAAAGIELTTQVLGNVGKAVSQYILAQRMAQGLSTTAASAGLITSAVMLAISPLSFLAAADKFERAKQLESYSERFKKLNYEGDALLAAFHKETGAIDAALTTINTVLSSVSAGVSAASSASLIGAPISMLVSALTGTISGILEASKQAMFEHVAEKFAARINEWEKEHGKNYFENGYDARHAAFLEDSLSLLADFSRQHAVERAVAITQQHWDEKIGELAGITRNADRSQSGKAYINYLENGGLLEAQPKEFTQQVFDPQKGTIDLSTGNVSSVLTFITPTFTPGEEVRERKQSGKYEYMTSLIVNGKDTWSVKGIKNHKGVYDYSKLIQFVEKNNKHYQARIISELGDKDDVVYSGAGSSEVFAGEGYDTVSYNKTDVGKLTIDATGASKPGEYIVSKNMYGDVKVLQEVVKEQEVSVGKRTEKIQYRDFEFRTGGIPYDVIDNLHSVEELIGGKHDDEFKGGKFNDIFHGADGNDYIEGNYGNDRLYGDDGDDYISGGQGDDQLFGGSGNDKLSGGDGNNYLTGGSGNDELQAHGAYNILSGGTGDDKLYGGGGIDLLDGGEGNDYLNGGFGNDIYVYGQNYGHHTIADEGGKGDRLHLSDISFDDIAFKRVGNDLIMNKAINGVLSFNESNDVNGITFKNWFAKDASGADNHLVEVITDKDGREIKVDKIPHNNNERSGYIKASNIASEKNMVNITSVANDINKIISSVSGFDSGDERLASLYNLSLHQNNTHSTTLTTTV

SEQ ID NO: 3057 - protein, 650 aa, Escherichia coli
MNGRLPVLVFTTVILGAIPGWGAEFSANFKDTDIQEFINTVSKNLHKTVIINPDVQGTITVRSYDMLNEEQYYQFFLSVLDVYGFAVVDMHNGILKVVRSKDAKTSAVPVASDVSPGTGDEVVTRVVPVSNVAARDLAPLLRQLNDNAGAGSVVHYEPSNVLLMTGRAAVMKRLMEIVERVDKVGNRSVATVPLTYASATDVARLVTELTKETDKTAIPAWMTAKLVADERTNSVLVSGEPISQQRIISIIKQLDRQEDVQGNTKVIYLKYAKAKDLVEVLTGISSSIENDSKKSPSTEALRKGVTIKSHEQTNALILTGAPDVIRDLENVISQLDIRRPQVLVEAIIAEIQDADGLNLGIQWVNKHAGVAQFTSTGLPITTMVQTRQNEILDSDQSNALSMFNGIAAGFYQGNWAMLLTALSTSSKNDILATPSIVTLDNMEATFNVGQEVPVLSGSQTTSGDNIFNTVERKTVGIKLRVKPQINEGDSVLLEIEQEVSGVADTAVATTTDLGATFNTRTVTNAMLVGNGETVVVGGLLDKSIRGSESKVPLLGDIPVLGHLFRAKSEQTAKRNLMLFIRPTIIRERDGFRHASAEKYQSFNQEQVQSRGKETTALTLNEEQLRLSPDQDDTAFRKVKAAIAAFYAQEM

SEQ ID NO: 3058 - protein, 631 aa, Escherichia coli
MVVTASSVEQNLKDAPASISVITQEDLQRKPVQNLKDVLKEVPGVQLTNEGDNRKGVSIRGLDSSYTLILVDGKRVNSRNAVFRHNDFDLNWIPVDSIERIEVVRGPMSSLYGSDALGGVVNIITKKIGQKWSGTVTVDTTIQEHRDRGDTYNGQFFTSGPLIDGVLGMKAYGSLAKREKDDPQNSTTTDTGETPRIEGFSSRDGNVEFAWTPNQNHDFTAGYGFDRQDRDSDSLDKNRLERQNYSVSHNGRWDYGTSELKYYGEKVENKNPGNSSPITSESNTVDGKYTLPLTAINQFLTVGGEWRHDKLSDAVNLTGGTSSKTSASQYALFVEDEWRIFEPLALTTGVRMDDHETYGEHWSPRAYLVYNATDTVTVKGGWATAFKAPSLLQLSPDWTSNSCRGACKIVGSPDLKPETSESWELGLYYMGEEGWLEGVESSVTVFRNDVKDRISISRTSDVNAAPGYQNFVGFETGANGRRIPVFSYYNVNKARIQGVETELKIPFNDEWKLSINYTYNDGRDVSNGENKPLSDLPFHTANGTLDWKPLALEDWSFYVSGHYTGQKRADSATAKTPGGYTIWNTGAAWQVTKDVKLRAGVLNLGDKDLSRDDYSYNEDGRRYFMAVDYRF

SEQ ID NO: 3059 - protein, 241 aa, Escherichia coli; identical to SEQ ID NO: 2922

SEQ ID NO: 3060 - protein, 826 aa, Escherichia coli
MLRMTPLASAIVALLLGIEAYAAEETFDTHFMIGGMKDQQVANIRLDDNQPLPGQYDIDIYVNKQWRGKYEIIVKDNPQETCLSREVIKRLGINSDNFASGKQCLTFEQLVQGGSYTWDIGVFRLDFSVPQAWVEELESGYVPPENWERGINAFYTSYYLSQYYSDYKASGNNKSTYVRFNSGLNLLGWQLHSDASFSKTNNNPGVWKSNTLYLERGFAQLLGTLRVGDMYTSSDIFDSVRFRGVRLFRDMQMLPNSKQNFTPRVQGIAQSNALVTIEQNGFVVYQKEVPPGPFAITDLQLAGGGADLDVSVKEADGSVTTYLVPYAAVPNMLQPGVSKYDLAAGRSHIEGASKQSDFVQAGYQYGFNNLLTLYGGSMVANNYYAFTLGAGWNTRIGAISVDATKSHSKQDNGDVFDGQSYQIAYNKFVSQTSTRFGLAAWRYSSRDYRTFNDHVWANNKDNYRRDENDVYDIADYYQNDFGRKNSFSANMSQSLPEGWGSVSLSTLWRDYWGRSGSSKDYQLSYSNNLRRISYTLAASQAYDENHHEEKRFNIFISIPFDWGDDVSTPRRQIYMSNSTTFDDQGFASNNTGLSGTVGSRDQFNYGVNLSHQHQGNETTAGANLTWNAPVATVNGSYSQSSTYRQAGASVSGGIVAWSGGVNLANRLSETFAVMNAPGIKDAYVNGQKYRTTNRNGVVIYDGMTPYRENHLMLDVSQSDSEAELRGNRKIAAPYRGAVVLVNFDTDQRKPWFIKALRADGQSLTFGYEVNDIHGHNIGVVGQGSQLFIRTNEVPSSVNVAIDKQQGLSCTITFGKEIDESRNYICQ

SEQ ID NO: 3061 - protein, 361 aa, Escherichia coli
MKRNILAVIVPALLVAGTANAAEIYNKDGNKVDLYGKAVGLHYFSKGNGENSYGGNGDMTYARLGFKGETQINSDLTGYGQWEYNFQGNNSEGADAQTGNKTRLAFAGLKYADVGSFDYGRNYGVVYDALGYTDMLPEFGGDTAYSDDFFVGRVGGVATYRNSNFFGLVDGLNFAVQYLGKNERDTARRSNGDGVGGSISYEYEGFGIVGAYGAADRTNLQEAQPLGNGKKAEQWATGLKYDANNIYLAANYGETRNATPITNKFTNTSGFANKTQDVLLVAQYQFDFGLRPSIAYTKSKAKDVEGIGDVDLVNYFEVGATYYFNKNMSTYVDYIINQIDSDNKLGVGSDDTVAVGIVYQF

SEQ ID NO: 3062 - protein, 360 aa, Escherichia coli
MKKLTVAISAVAASVLMAMSAQAAEIYNKDSNKLDLYGKVNAKHYFSSNDADDGDTTYARLGFKGETQINDQLTGFGQWEYEFKGNRAESQGSSKDKTRLAFAGLKFGDYGSIDYGRNYGVAYDIGAWTDVLPEFGGDTWTQTDVFMTGRTTGVATYRNNDFFGLVDGLNFAAQYQGKNDRTDVTEANGDGFGFSTTYEYEGFGVGATYAKSDRTNNQVIYGNNSLNASGQNAEVWAAGLKYDANNIYLATTYSETQNMTVFGNNHIANKAQNFEVVAQYQFDFGLRPSVAYLQSKGKDLGAWGDQDLVEYIDVGATYYFNKNMSTFVDYKINLIDKSDFTKASGVATDDIVAVGMVYQF

SEQ ID NO: 3063 - protein, 673 aa, Escherichia coli
MKMTRLYPLALGGLLLPAIANAQTSQQDESTLVVTASKQSSRSASANNVSSTVVSAPELSDAGVTASDKLPRVLPGLNIENSGNMLFSTISLRGVSSAQDFYNPAVTLYVDGVPQLSTNTIQALTDVQSVELLRGPQGTLYGKSAQGGIINIVTQQPDSTPRGYIEGGVSSRDSYRSKFNLSGPIQDGLLYGSVTLLRQVDDGDMINPATGSDDLGGTRASIGNVKLRLAPDDQPWEMGFAASRECTRATQDAYVGWNDIKGRKLSISDGSPDPYMRRCTDSQTLSGKYTTDDWVFNLISAWQQQHYSRTFPSSSLIVNMPQRWNQDVQELRAATPGDARTVDMVFGLYRQNTREKLNSAYDMPTMPYLSSTGYTTAETLAAYSDLTWHLTDRFDIGGGVRFSHDKSSTQYHGSMLGNPFGDQGKNNDDQVLGQLSAGYMLTDDWRVYTRVAQGYKPSGYNIVPTAGLDAKPFVAEKSINYELGTRYETADVTLQAATFYTHTKDMQLYSGPVRMQTLSNAGKADATGVELEAKWRFAPGWSWDINGNVIRSEFTNDSELYHGNRVPFVPRYGAGSSVNGVIDTRYGALMPRLAVNLVGPHYFDGDNQLRQGTYATLDSSLGWQATERINISVYVDNLFDRRYRTYGYMNGSSDVAQVNMGRTVGINTRIDFF

SEQ ID NO: 3064 - protein, 130 aa, Escherichia coli
MPVDRETLFELSIASVPSGKVENQSVKVAMRSVFKLFWRPEGLPGDPLEAYQQLRWTRNSQGVQLTNPTPYYINLIQVSVNGKALSNVGVVPPKSQRQTSWCQAIAPCHVAWRAINDYGGLSAKKEQNLP

SEQ ID NO: 3065 - protein, 518 aa, Escherichia coli; identical to SEQ ID NO: 2349

SEQ ID NO: 3066 - protein, 432 aa, Escherichia coli; identical to SEQ ID NO: 2026

SEQ ID NO: 3067 - protein, 359 aa, Escherichia coli; identical to SEQ ID NO: 2329

SEQ ID NO: 3068 - protein, 732 aa, Escherichia coli
MMRKKYMPRALGPLLLVVLSPAVAQQNDDNEIIVSASRSNRTVAEMAQTTWVIENAELEQQIQGGKELKDALAQLIPGLDVSSQSRTNYGMNMRGRPLVVLIDGVRLNSSRSDSRQLDSVDPFNIDHIEVISGATALYGGGSTGGLINIVTKKGQPETMMEFEAGTKSGFNSSKDHDERIAGAVSGGNDHISGRLSVAYQKFGGWFDGNGDATLLDNTQTGLQHSNRLDIMGTGTLNIDESRQLQLITQYYKSQGDDNYGLNLGKGFSAISGSSTPYVSKGLNSDRIPGTERHLISLQYSDSDFLRQELVGQVYYRDESLRFYPFPTVNANKQATAFSSSQQDTDQYGMKLTLNSQLMDGWQITWGLDAEHERFTSNQMFFDLAQASASGGLNNHKIYTTGRYPSYDITNLAAFLQSSYDINDIFTVSGGVRYQYTENRVDDFIDYTQQQKIAAGKAISADAIPGGSVDYDNFLFNAGLLMHITERQQAWFNFSQGVALPDPGKYYGRGIYGAAVNGHLPLTKSVNVSDSKLEGVKVDSYELGWRFTGDNLRTQIAAYYSLSNKSVERNKDLTISVKDDRRRIYGVEGAVDYLIPDTDWSTGVNFNVLKTESKVNGQWQKYDVKESSPSKATAYISWAPEPWSLRVQSTTSFDVSDAEGNDINGYTTVDFISSWLLPVGTLSFSVENLFDRDYTTVWGQRAPLYYSPGYGPASLYDYKGRGRTFGLNYSVLF

SEQ ID NO: 3069 - protein, 203 aa, Escherichia coli; identical to SEQ ID NO: 2015

SEQ ID NO: 3070 - protein, 207 aa, Escherichia coli; identical to SEQ ID NO: 2211

SEQ ID NO: 3071 - protein, 838 aa, Escherichia coli; identical to SEQ ID NO: 2795

SEQ ID NO: 3072 - protein, 386 aa, Escherichia coli
MVDDVPVAQVLQALAEQEKLNLVVSPDVSGTVSLHLTDVPWKQALQTVVKSAGLITRQEGNILSVHSIAWQNNNIARQEAEQARAQANLPLENRSITLQYADAGELAKAGEKLLSAKGSMTVDKRTNRLLLRDNKTALSALEQWVAQMDLPVGQVELSAHIVTINEKSLRELGVKWTLADAQHAGGVGQVTTLGSDLSVATATTHVGFNIGRINGRLLDLELSALEQKQQLDIIASPRLLASHLQPASIKQGSEIPYQVSSGESGATSVEFKEAVLGMEVTPTVLQKGRIRLKLHISQNVPGQVLQQADGEVLAIDKQEIETQVEVKSGETLALGGIFTRKNKSGQDSVPLLGDIPWFGQLFRHDGKEDERRELVVFITPRLVSSE

SEQ ID NO: 3073 - protein, 865 aa, Escherichia coli; identical to SEQ ID NO: 2167

SEQ ID NO: 3074 - protein, 747 aa, Escherichia coli; identical to SEQ ID NO: 2072

SEQ ID NO: 3075 - protein, 266 aa, Escherichia coli; identical to SEQ ID NO: 1894

SEQ ID NO: 3076 - protein, 161 aa, Escherichia coli; identical to SEQ ID NO: 2582

SEQ ID NO: 3077 - protein, 250 aa, Escherichia coli; identical to SEQ ID NO: 2761

SEQ ID NO: 3078 - protein, 826 aa, Escherichia coli
MLRMTPLASAIVALLLGIEAYAAEETFDTHFMIGGMKDQQVANIRLDDNQPLPGQYDIDIYVNKQWRGKYEIIVKDNPQETCLSREVIKRLGINSDNFASGKQCLTFEQLVQGGSYTWDIGVFRLDFSVPQAWVEELESGYVPPENWERGINAFYTSYYVSQYYSDYKASGNSKSTYVRFNSGLNLLGWQLHSDASFSKTNNNPGVWKSNTLYLERGFAQLLGTLRVGDMYTSSDIFDSVRFRGVRLFRDMQMLPNSKQNFTPRVQGIAQSNALVTIEQNGFVVYQKEVPPGPFAITDLQLAGGGADLDVSVKEADGSVTTYLVPYAAVPNMLQPGVSKYDFAAGRSHIEGASKHSDFVQAGYQYGFNNLLTLYGGSMVANNYYAFTLGTGWNTRIGAISVDATKSHSKQDNGDVFDGQSYQIAYNKFVSQTSTRFGLAAWRYSSRDYRTFNDHVWANNKDNYRRDENDVYDIADYYQNDFGRKNSFSANMSQSLPEGWGSVSLSTLWRDYWGRSGSSKDYQLSYSNNLRRISYTLAASQAYDENHHEEKRFNIFISIPFDWGDDVSTPRRQIYMSNSTTFDDQGFASNNTGLSGTVGSRDQFNYGVNLSHQHQGNETTAGANLTWNAPVATVNGSYSQSSTYRQAGASVSGGIVAWSGGVNLANRLSETFAVMNAPGIKDAYVNGQKYRTTNRNGVVVYDGMTPYRENHLMLDVSQSDSEAELRGNRKIAAPYRGAVVLVNFDTDQRKPWFIKALRADGQPLTFGYEVNDIHGHNIGVVGQGSQLFIRTNEIPPSVNVAIDKQQGLSCTITFGKEIDESRNYICQ

SEQ ID NO: 3079 - protein, 162 aa, Escherichia coli; identical to SEQ ID NO: 1973

SEQ ID NO: 3080 - protein, 359 aa, Escherichia coli; identical to SEQ ID NO: 2328

SEQ ID NO: 3081 - protein, 815 aa, Escherichia coli; identical to SEQ ID NO: 2698

SEQ ID NO: 3082 - protein, 653 aa, Escherichia coli
MRNNSTWSRSSGQTAEWKNLSSYLQRAVIPLKGELTVGDDYTAGDFFDSVSFRGVQLASDDNMLPDSLKGFAPVVRGIAKSNAQITIKQNGYTIYQTYVSPGAFEISDLYSTSSSGDLLVEIKEADGSVNSYSVPFSSVPLLQRQGRIKYAVTLAKYRTNSNEQQESKFAQATLQWGGPWGTTWYGGGQYAEYYRAAMFGLGFNLGDFGAISFDATQAKSTLADQSEHKGQSYRFLYAKTLNQLGTNFQLMGYRYSTSGFYTLSDTMYKHMDGYEFNDGDDEDTPMWSRYYNLFYTKRGKLQVNISQQLGEYGSFYLSGSQQTYWHTDQQDRLLQFGYNTQIKDLSLGVSWNYSKSRGQPDADQVFALNFSLPLNLLLSRSNDSYTRKKNYAWMTSNTSIDNEGHITQNLGLTETLLDDGNLSYSVQQGYNSEGKTANGSASMDYKGAFADARVGYNYSDNGSQQQLNYALSGSLVAHSQGITLGQSLGETNVLIAAPGAENTRVANSTGLKTDWRGYTVVPYATSYRENRIALDAASLKRNVDLENAVVNVVPTKGALVLAEFNAHAGARVLMKTSKQGIPLRFGAIATLDGIQTNSGIIDDDGSLYMSGLPAQGAITVRWGEAPDQICHISYQLTEQQINSAITRMDAICR

SEQ ID NO: 3083 - protein, 430 aa, Escherichia coli; identical to SEQ ID NO: 2617

SEQ ID NO: 3084 - protein, 365 aa, Escherichia coli
MKKLTVAISAVAASVLMAMSAQAAEIYNKDSNKLDLYGKVNAKHYFSSNDADDGDTTYARLGFKGETQINDQLTGFGQWEYEFKGNRAESQGSSKDKTRLAFAGLKFGDYGSIDYGRNYGVAYDIGAWTDVLPEFGGDTWTQTDVFMTGRTTGVATYRNNDFFGLVDGLNFAAQYQGKNDRSDFDNYTEGNGDGFGFSATYEYEGFGIGATYAKSDRTDTQVNAGKVLPEVFASGKNAEVWAAGLKYDANNIYLATTYSETQNMTVFADHFVANKAQNFEAVAQYQFDFGLRPSVAYLQSKGKDLGVWGDQDLVKYVDVGATYYFNKNMSTFVDYKINLLDKNDFTKALGVSTDDIVAVGLVYQF

SEQ ID NO: 3085 - protein, 226 aa, Escherichia coli
MIFAVLSLLVAGELRAGVVVGGTRFIFPADRESISILLTNTSQESWLINSKINRPTRWAGGEASTVPAPLLAAPPLILLKPGTTGTLRLLRTESDILPVDRETLFELSIASVPSGKVENQSVKVAMRSVFKLFWRPEGLPGDPLEAYQQLRWTRNSQGVQLTNPTPYYINLIQLSVNGKALSNAGVVPPKSQRQTSWCQAIAPCHVAWRAINDYGGLSAKKEQNLP

SEQ ID NO: 3086 - protein, 432 aa, Escherichia coli; identical to SEQ ID NO: 2026

SEQ ID NO: 3087 - protein, 191 aa, Escherichia coli; identical to SEQ ID NO: 2727

SEQ ID NO: 3088 - protein, 565 aa, Escherichia coli
MKSPAPSRPQKMALIPACIFLCFAALSVQAEETPVTPQPPDILLGPLFNDVQNAKLFPDQKTFADAVPNSDPLMILADYRMQQNQSGFDLRHFVNVNFTLPKEGEKYVPPEGQSLREHIDGLWPVLTRSTENTEKWDSLLPLPEPYVVPGGRFREVYYWDSYFTMLGLAESGHWDKVANMVANFAHEIDTYGHIPNGNRSYYLSRSQPPFFALMVELLAQHEGDAALKQYLPQMQKEYAYWMDGVENLQAGQQEKRVVKLQDGTLLNRYWDDRDTPRPESWVEDIATAKSNPNRPATEIYRDLRSAAASGWDFSSRWMDNPQQLNTLRTTSIVPVDLNSLMFKMEKILARASKAAGDNAMANQYETLANARQKGIEKYLWNDQQGWYADYDLKSHKVRNQLTAAALFPLYVNAAAKDRANKMATATKTHLLQPGGLNTTSVKSGQQWDAPNGWAPLQWVATEGLQNYGQKEVAMDISWHFLTNVQHTYDREKKLVEKYDVSTTGTGGGGGEYPLQDGFGWTNGVTLKMLDLICPKEQPCDNVPATRPTVKSATTQPSTKEAQPTP

SEQ ID NO: 3089 - protein, 213 aa, Escherichia coli; identical to SEQ ID NO: 2232

SEQ ID NO: 3090 - protein, 125 aa, Escherichia coli
MRYLNTKNLIAAGVLLACMSSIAWGAIIPDRTRIIMNESDKGEALKLTNQSKNLPYLAQTWIEDTKGNKSRDFIVTVPPMVRLNPSEQIQIRMISQEKIAQLPNDRETLFYFNVREIPPKTDKKM

SEQ ID NO: 3091 - protein, 565 aa, Escherichia coli
MKSPAPSRPQKMALIPACIFLCFAALSVQAEETPVTPQPPDILLGPLFNDVQNAKLFPDQKTFADAVPNSDPLMILADYRMQQNQSGFDLRHFVNVNFTLPKEGEKYVPPEGQSLREHIDGLWPVLTRSTENTEKWDSLLPLPEPYVVPGGRFREVYYWDSYFTMLGLAESGHWDKVADMVANFAHEIDTYGHIPNGNRSYYLSRSQPPFFALMVELLAQHEGDAALKQYLPQMQKEYAYWMDGVENLQAGQQEKRVVKLQDGTLLNRYWDDRDTPRPESWVEDIATAKSNPNRPATEIYRDLRSAAASGWDFSSRWMDNPHQLNTLRTTSIVPVDLNSLMFKMEKILARASKAAGDNAMANQYETLANARQKGIEKYLWNDQQGWYADYDLKSHKVRNQLTAAALFPLYVNAAAKDRANKMATATKTHLLQPGGLNTTSVKSGQQWDAPNGWAPLQWVATEGLQNYGQKEVAMDISWHFLTNVQHTYDREKKLVEKYDVSTTGTGGGGGEYPLQDGFDWTNGVTLKMLDLICPKEQPCDNVPATRPTVKSATTQPSTKEAQPTP

SEQ ID NO: 3092 - protein, 207 aa, Escherichia coli; identical to SEQ ID NO: 2211

SEQ ID NO: 3093 - protein, 236 aa, Escherichia coli
MQTTRTPYSISFMATVLLLLLFACHSTVANAAVALGATRVIYPANQKQVLLPVTNNDPASVYLIQSWIENSGDQKDTQFVITPPLFSMQGKKENTLRIINATNHQLPGDRESLFWVNVKAIPAMEKDQKNENTLQLAIISRIKMFYRPTNLAMAPEEAPAMLRFRRSGSKLTLINPTPYFITVTNMKAGNSNLPNTMVPPKGEVSVDIPHAATGDISFQTINDYGALTPRIKATMQ

SEQ ID NO: 3094 - protein, 386 aa, Escherichia coli
MVDDVPVAQVLQALAEQEKLNLVVSPDVSGTVSLHLTDVPWKQALQTVVKSAGLITRQEDNILSVHSIAWQNNNIARQEAEQARAQANLPLENRSITLQYADAGELAKAGEKLLSAKGSMTVDKRTNRLLLRDNKTALSALEQWVAQMDLPVGQVELSAHIVTINEKSLRELGVKWTLADAQHAGGVGQVTTLGSDLSVATATTHVGFNIGRINGRLLDLELSALEQKQQLDIIASPRLLASHLQPASIKQGSEIPYQVSSGESGATSVEFKEAVLGMEVTPTVLQKGRIRLKLHISQNVPGQVLQQADGEVLAIDKQEIETQVEVKSGETLALGGIFTRKNKSGQDSVPLLGDIPWFGQLFRHDGKEDERRELVVFITPRLVSSE

SEQ ID NO: 3095 - protein, 834 aa, Escherichia coli
MYKKLKLTTISELIKNIYCSLSVLIIGCASAYAVEFNKDLIEAEDRENVNLSQFETDGQLPVGKYSLNALINNKRTPIHLDLQWVLIDNQTAVCLTPEQLTLLGFTDEIIEVAQQNLIDGCYPIEKEKQITTYLDKGKMQLSISAPQAWLKYKDANWTPPELWDHGIAGAFLDYNLYASHYAPHQGDNSQNISSYGQAGVNLGAWRLRTDYQYDQSFNNGKSQANNLDFPRIYLFRPIPAINAKLTIGQYDTESSIFDSFHFSGVSLKSDENMLPPDLRGYAPQITGVAQTNAKVTVSQNNRIIYQENVPPGPFAITNLFNTLQGQLDVKVEEEDGQVTQWQVASNSIPYLTRKGQIRYTTAMGKPTSVGGDSLQQPFFWTGEFSWGWLNNVSLYGGSVLTNRDYQSLAAGVGFNLNSLGSLSFDVTRSDAQLHNQDKETGYSYRANYSKRFESTGSQLTFAGYRFSDKNFVTMNEYINDTNHYTNYQNEKESYIVTFNQYLESLRLNTYVSLARNTYWDASSNVNYSLSLSRDFDIGPLKNVSTSLTFSRINWEEDNQDQLYLNISIPWGTSRTLSYGMQRNQDNKISHTASWYDSSDRNNSWSVSASGDNDEFKDMKASLRASYQHNTENGRLYLSGTSQRDSYYSLNASWNGSFTATRHGAAFHDYSGSADSRFMIDADGAEDIPLNNKRAVTNRYGIGVIPSVSSYITTSLSVDTRNLPENVDIENSVITTTLTEGAIGYAKLDTRKGYQIMGVIRLADGSHPPLGISVKDKTSHKELGLVADGGFVYLNGIQDDSKLTLRWGDKSCFIQPPNSSNLTTGTVILPCISQN

SEQ ID NO: 3096 - protein, 111 aa, Escherichia coli
MKKQIEGMTMKKVLALVVAAAMGLSSAAFAAETATTPAPTATTTKAAPAKTTHHKKQHKAAPAQKAQAAKKHHKNTKAEQKAPEQKAQAAKKHAGKHSHQQPAKPAAQPAA

SEQ ID NO: 3097 - protein, 162 aa, Escherichia coli
MSGSAFAVTHHAFSSGAGRTSDGNGSHASTLKSPSYTKSVSWQHYPKSAENENKNVLQIAVRTRLKLFYRPKGLPGSNLEAMKQLRFQCQNNQIVVNNDSAYNLTFNQFSINGQKIERAGMVLAKGKLNINLPAGTGNAHEVKYSIINDFGVAGEMLTKPIN

SEQ ID NO: 3098 - protein, 115 aa, Escherichia coli
MKRISFAVLALLMTAQQCFAGGVALSTTRVIYDGGKKEASLTVENHNKNEEFLIQSWIDDVNGNKKTPFIITPPLFKLDPDKNNVLRIVNIEDTLPKDRESVYWINVKAIPAKSG

SEQ ID NO: 3099 - protein, 118 aa, Escherichia coli [sequence omitted]

SEQ ID NO: 3100 - protein, 243 aa, Escherichia coli; identical to SEQ ID NO: 2910

SEQ ID NO: 3101 - protein, 387 aa, Escherichia coli
MKRKVLAMLVPALLVAGAANAAEIYNKNGNKLDLYGKVDTRHTFSDNPGDDGDETIIELGFKGETQITDQLTGYGQALTKTKASDTEGSDNTYVKLAFAGLKFGEMGSFDYGRNYGVIYDVEAWTDMLPVFGGDSYTWTDNFMAGRANGVATYRNSDFFGLVEGLNFALQYQGNNEGSNAGEDQEGTKNGHEDVRFQNGDGFGLSTSYDFDFGLSLGAAYSNSDRTNSQVALGGYHYNEYSKFAGGDTAEAWAFGAKYDANNVYLAMMYAETRNMTPYGNVGIANKTQNFEAVAQYQFDFGLRPSLAYVYSKGKDLGGNDYNNNGHQEYVDQDLVNYVEIGATYYFNKNFSTYVDYKINLLDKDDDFYDNNGIATDDVVGVGLVYQF

SEQ ID NO: 3102 - protein, 266 aa, Escherichia coli
MAKSLFRALVALSFLAPLWLNAAPRVITLSPANTELAFAAGITPVGVSSYSDYPPQAQKIEQVSTWQGMNLERIVALKPDLVIAWRGGNAERQVDQLASLGIKVMWVDATSIEQIANALRQLAPWSPQPDKAEQAAQSLQDQYAQLKAQYADKPKKRVFLQFGINPPFTSGKESIQNQVLEVCGGENIFKDSRVPWPQVSREQVLARSPQAIVITGGPDQIPKIKQYWGEQLKIPVIPLTSDWFERASPRIILAAQQLCNALSQVD

SEQ ID NO: 3103 - protein, 351 aa, Escherichia coli
MKKSTLALVVMGIVASASVQAAEIYNKDGNKLDVYGKVKAMHYMSDNDSKDGDQSYIRFGFKGETQINDQLTGYGRWEAEFAGNKAESDTAQQKTRLAFAGLKYKDLGSFDYGRNLGALYDVEAWTDMFPEFGGDSSAQTDNFMTKRASGLATYRNTDFFGVIDGLNLTLQYQGKNENRDVKKQNGDGFGTSLTYDFGGSDFAISGAYTNSDRTNEQNLQSRGTGKRAESWATGLKYDANNIYLATFYSETRKMTPITGGFANKTQNFEAVAQYQFDFGLRPSLGYVLSKGKDIEGIGDEDLVNYIDVGATYYFNKNMSAFVDYKINQLDSDNKLNINNDDIVAVGMTYQF

SEQ ID NO: 3104 - protein, 641 aa, Escherichia coli
MLAVDDDGETMVVTASSVEQNLKDAPASISVITQEDLQRKPVQNLKDVLKEVPGVQLTNEGDNRKGVSIRGLDSSYTLILVDGKRVNSRNAVFRHNDFDLNWIPVDSIERIEVVRGPMSSLYGSDALGGVVNIITKKIGQKWSGTVTVDTTIQEHRDRGDTYNGQFFTSGPLIDGVLGMKAYGSLAKREKDDPQNSTTTDTGETPRIEGFSSRDGNVEFAWTPNQNHDFTAGYGFDRQDRDSDSLDKNRLERQNYSVSHNGRWDYGTSELKYYGEKVENKNPGNSSPITSESNAVDGKYTLPLTAINQFLTVGGEWRHDKLSDAVNLTGGTSSKTSASQYALFVEDEWRIFEPLALTTGVRMDDHETYGEHWSPRAYLVYNATDTVTVKGGWATAFKAPSLLQLSPDWTSNSCRGACKIVGSPDLKPETSESWELGLYYMGEEGWLEGVESSVTVFRNDVKDRISISRTSDVNAAPGYQNFVGFETGANGRRIPVFSYYNVNKARIQGVETELKIPFNDEWKLSINYTYNDGRDVSNGENKPLSDLPFHTANGTLDWKPLALEDWSFYVSGHYTGQKRADSATAKTPGGYTIWNTGAAWQVTKDVKLRAGVLNLGDKDLSRDDYSYNEDGRRYFMAVDYRF

SEQ ID NO: 3105 - protein, 367 aa, Escherichia coli
MKVKVLSLLVPALLVAGAANAAEVYNKDGNKLDLYGKVDGLHYFSDNKDVDGDQTYMRLGFKGETQVTDQLTGYGQWEYQIQGNSAENENNSWTRVAFAGLKFQDVGSFDYGRNYGVVYDVTSWTDVLPEFGGDTYGSDNFMQQRGNGFATYRNTDFFGLVDGLNFAVQYQGKNGSVSGEGMTNNGRDALRQNGDGVGGSITYDYEGFGIGAAVSSSKRTDAQNTAAYIGNGDRAETYTGGLKYDANNIYLAAQYTQTYNATRVGSLGWANKAQNFEAVAQYQFDFGLRPSVAYLQSKGKNLGTIAGRNYDDEDILKYVDVGATYYFNKNMSTYVDYKINLLDDNQFTRDAGINTDNIVALGLVYQF

SEQ ID NO: 3106 - protein, 200 aa, Escherichia coli; identical to SEQ ID NO: 1784

SEQ ID NO: 3107 - protein, 230 aa, Escherichia coli; identical to SEQ ID NO: 3019

SEQ ID NO: 3108 - protein, 746 aa, Escherichia coli
MNKKIHSLALLVNLGIYGVAQAQEPTDTPVSHDDTIVVTAAEQNLQAPGVSTITADEIRKNPVARDVSEIIRTMPGVNLTGNSTSGQRGNNRQIDIRGMGPENTLILIDGKPVSSRNSVRQGWRGERDTRGDTSWVPPEMIERIEVLRGPAAARYGNGAAGGVVNIITKKGSGEWHGSWDAYFNAPEHKEEGATKRTNFSLTGPLGDEFSFRLYGNLDKTQADAWDINQGHQSARAGTYATTLPAGREGVINKDINGVVRWDFAPLQSLELEAGYSRQGNLYAGDTQNTNSDAYTRSKYGDETNRLYRQNYALTWNGGWDNGVTTSNWVQYEHTRNSRIPEGLAGGTEGKFNEKATQDFVDIDLDDVMLHSEVNLPIDFLVNQTLTLGTEWNQQRMKDLSSNTQALTGANTGGAIDGVSATDRSPYSKAEIFSLFAENNMELTDSTIVTPGLRFDHHSIVGNNWSPALNISQGLGDDFTLKMGIARAYKAPSLYQTNPNYILYSKGQGCYASAGGCYLQGNDDLKAETSINKEIGLEFKRDGWLAGVTWFRNDYRNKIEAGYVAVGQNAVGTDLYQWDNVPKAVVEGLEGSLNVPVSETVMWTNNITYMLKSENKTTGDRLSIIPEYTLNSTLSWQAREDLSMQTTFTWYGKQQPKKYNYKGQPAVGPETKEISPYSIVGLSATWDVTKNVSLTGGVDNLFDKRLWRAGNAQTTGDLAGANYIAGAGAYTYNEPGRTWYMSVNTNF

SEQ ID NO: 3109 - protein, 250 aa, Escherichia coli; identical to SEQ ID NO: 3048

SEQ ID NO: 3110 - protein, 880 aa, Escherichia coli
MPDHSLFRLRILPWCIALAMSGSYSSVWAEDDIQFDSRFLELKGDTKIDLKRFSSQGYVEPGKYNLQVQLNKQPLAEEYDIYWYAGEDDASKSYACLTPELVAQFGLKEDVANNLQWSHDAKCLKSGQLEGMEIKADLSQSALVISLPQAYLEYTYPDWDPPSRWDDGISGIVADYSINAQTRHEENGGDDSNEISGNGTVGVNLGPWRMRADWQTNYQHTRSNDDDEFSGDETQKKWEWSRYYAWRALPSLKAKLALGEDYLRSDIFDGFNYVGGSVSTDDQMLPPNLRGYAPDISGVAHTTAKVTVSQMGRVIYETQVPAGPFRIQDLGDSVSGTLHIRIEEQNGQVQEYDISTASMPYLTRPGQVRYKIMMGRPQEWGHHVEGEFFSGAEASWGIANGWSLYGGALGDENYQSAALGVGRDLSTFGAVAFDVTHSHTKLDKDTAYGKGSLDGNSFRVSYSKDFDQLNSRVTFAGYRFSEENFMTMSEYLDASDSGMVRTGNDKEMYTATYNQNFRDAGVSVYLNYTRHTYWDREEQTNYNIMLSHYFNMGSIRNVSISMTGYRYEYDNQADKGMYISLSMPWGDNSTVSYNGNYGSGTDSSQVGYFSRVDDATHYQLNVGTSDKHTSVDGYYSHDGSLAQVDLSANYHEGQYTSAGLSLQGGATLTAHGGALHRTQNMGGTRLLIDADGVADVPVEGNGAAVYTNMFGKAVVSDVNNYYRNQAYIDLNKLPENAEATQSVVQATLTEGAIGYRKFAVISGQKAMAVLRLQDGSHPPFGAEVKNDNEQTVGLVDDDGNVYLAGVKPGEHMSVFWSGVAHCDINLPDPLPADLFNGLLLPCQHKGNVAPVVPDDIKPVIQEQTQQVTPTNPPVSVSANQ

SEQ ID NO: 3111 - protein, 784 aa, Escherichia coli; identical to SEQ ID NO: 2244

SEQ ID NO: 3112 - protein, 216 aa, Escherichia coli
MAMMVAGRAEAGVALGATRVIYPAGQKQVQLAVTNNDENSTYLIQSWVENADGVKDGRFIVTPPLFAMKGKKENTLRILDATNNQLPQDRESLFWMNVKAIPSMDKSKLTENTLQLAIISRIKLYYRPAKLALPPDQAAEKLRFRRSANSLTLINPTPYYLTVTELNAGTRVLENALVPPMGESTVKLPSDAGSNITYRTINDYGALTPKMTGVME

SEQ ID NO: 3113 - protein, 863 aa, Escherichia coli
MHIRKHRLAGFFVRLFVACAFAAQAPLSSAELYFNPRFLADDPQAVADLSRFENGQELPPGTYRVDIYLNNGYMATRDVTFNTGDSEQGIVPCLTRAQLASMGLNTASVAGMNLLADDACVPLTTMLQDATAHLDVGQQRLNLTIPQAFMSNRARGYIPPELWDPGINAGLLNYNFSGNSVQNRIGGNSHYAYLNLQSGLNIGAWRLRDNTTWSYNSSDRSSGSKNKWQHINTWLERDIIPLRSRLTLGDGYTQGDIFDGINFRGAQLASDDNMLPDSQRGFAPVIHGIARGTAQVTIKQNGYDIYNSTVPPGPFTINDIYAAGNSGDLQVTIKEADGSTQIFTVPYSSVPLLQREGHTRYSITAGEYRSGNAQQEKPRFFQSTLLHGLPAGWTIYGGTQLADRYRAFNFGIGKNMGALGALSVDMTQANSTLPDDSQHDGQSVRFLYNKSLNESGTNIQLVGYRYSTSGYFNFADTTYSRMNGYNIETQDGVIQVKPKFTDYYNLAYNKRGKLQLTVTQQLGRTSTLYLSGSHQTYWGTSNVDEQFQAGLNTAFEDINWTLSYSLTKNAWQKGRDQMLALNVNIPFSHWLRSDSKSQWRHASASYSMSHDLNGRMTNLAGVYGTLLEDNNLSYSVQTGYAGGGDGNSGSTGYATLNYRGGYGNANIGYSHSDDIKQLYYGVSGGVLAHANGVTLGQPLNETVVLVKAPGAKDAKVENQTGVRTDWRGYAVLPYATEYRENRVALDTNTLADNVDLDNAVANVVPTRGAIVRAEFKARVGIKLLMTLTHNNKPLPFGAMVTSESSQSSGIVADNGQVYLSGMPLAGKVQVKWGEEENAHCIANYQLPPESQQQLLTQLSAECR

SEQ ID NO: 3114 - protein, 760 aa, Escherichia coli
MENNRNFPARQFNSLTFFAGLCIGITPVAQALAAEGQTNADDTLVVEASTPSLYAPQQSADPKFSRPVADTTRTMTVISEQVIKDQGATNLTDALKNVPGVGAFFAGENGNSTTGDAIYMRGADTSNSIYIDGIRDIGSVSRDTFNTEQVEVIKGPSGTDYGRSAPTGSINMISKQPRNDSGIDASASIGSAWFRRGTLDVNQVIGDTTAVRLNVMGEKTHDAGRDKVKNERYGVAPSIAFGLGTANRLYLNYLHVTQHNTPDGGIPTIGLPGYSAPSAGTAALNHSGKVDTHNFYGTDSDYDDSTTDTATMRFEHDINDNTTIRNTTRWSRVKQDYLMTAIMGGASNITQPTSDVNSWTWSRTANTKDVSNKILTNQTNLTSTFYTGSIGHDVSTGVEFTRETQTNYGVNPVTLPAVNIYHPDSSIHPGGLTRNGANANGQTDTFAIYAFDTLQITRDFELNGGIRLDNYHTEYDSATACGGSGRGAITCPAGVAKGSPVTTVDTAKSGNLVNWKAGALYHLTENGNVYINYAVSQQPPGGNNFALAQSGSGNSANRTDFKPQKANTSEIGTKWQVLDKRLLLTAALFRTDIENEVEQNDDGTYSQYGKKRVEGYEISVAGNITPAWQVIGGYTQQKATIKNGKDVAQDGSSSLPYTPEHAFTLWSQYQATDDISVGAGARYIGSMHKGSDGAVGTPAFTEGYWVADAKLGYRVNRNLDFQLNVYNLFDTDYVASINKSGYRYHPGEPRTFLLTANMHF

SEQ ID NO: 3115 - protein, 224 aa, Escherichia coli
MKGLLSLLIFSMVLPAHAGIVIYGTRIIYPAENKEVMVQLMNQGNRSSLLQAWIDDGDTSLPPEKIQVPFMLTPPVAKIGANSGQQVKIKIMPNKLPTNKESIFYLNVLDIPPNSPEQEGKNALKFAMQNRIKLFYRPAGIAPVNKATFKKLLVNRSGNGLVIKNDSANWVTISDVKANNVKVNYETIMIAPLESQSVNVKSNNANNWYLTIIDDHGNYISDKI

SEQ ID NO: 3116 - protein, 517 aa, Escherichia coli
MKHKLQMMKMRWLSAAVMLTLYTSSSWAFSIDDVAKQAQSLAGKGYETPKSNLPSVFRDMKYADYQQIQFNHDKAYWNNLKTPFKLEFYHQGMYFDTPVKINEVTATAVKRIKYSPDYFTFGDVQHDKDTVKDLGFAGFKVLYPINSKDKNDEIVSMLGASYFRVIGAGQVYGLSARGLAIDTALPSGEEFPRFKEFWIERPKPTDKRLTIYALLDSPRATGAYKFVVMPGRDTVVDVQSKIYLRDKVGKLGVAPLTSMFLFGPNQPSPANNYRPELHDSNGLSIHAGNGEWIWRPLNNPKHLAVSSFSMENPQGFGLLQRGRDFSRFEDLDDRYDLRPSAWVTPKGEWGKGSVELVEIPTNDETNDNIVAYWTPDQLPEPGKEMNFKYTITFSRDEDKLHAPDNAWVQQTRRSTGDVKQSNLIRQPDGTIAFVVDFTGAEMKKLPEDTPVTAQTSIGDNGEIVESTVRYNPVTKGWRLVMRVKVKDAKKTTEMRAALVNADQTLSETWSYQLPANE

SEQ ID NO: 3117 - protein, 200 aa, Escherichia coli; identical to SEQ ID NO: 1793

SEQ ID NO: 3118 - protein, 834 aa, Escherichia coli
MYKKLKLTTISELIKNIYCSLSVIIIGCASAYAVEFNKDLIEAEDRENVNLSQFETDGQLPVGKYSLSTLINNKRTPIHLDLQWVLIDNQTAVCVTPEQLTLLGFTDEFIEKTQQNLIDGCYPIEKEKQITTYLDKGKMQLSISAPQAWLKYKDANWTPPELWNHGIAGAFLDYNLYASHYAPHQGDNSQNISSYGQAGVNLGAWRLRTDYQYDQSFNNGKSQATNLDFPRIYLFRPIPAMNAKLTIGQYDTESSIFDSFHFSGISLKSDENMLPPDLRGYAPQITGVAQTNAKVTVSQNNRIIYQENVPPGPFAITNLFNTLQGQLDVKVEEEDGRVTQWQVASNSIPYLTRKGQIRYTTAMGKPTSVGGDSLQQPFFWTGEFSWGWLNNVSLYGGSVLTNRDYQSLAAGVGFNLNSLGSLSFDVTRSDAQLHNQDKETGYSYRANYSKRFESTGSQLTFAGYRFSDKNFVTMNEYINDTNHYTNYQNEKESYIVTFNQYLESLRLNTYVSLARNTYWDASSNVNYSLSLSRDFDIGPLKNVSTSLTFSRINWEEDNQDQLYLNISIPWGTSRTLSYGMQRNQDNEISHTASWYDSSDRNNSWSVSASGDNDEFKDMKASLRASYQHNTENGRLYLSGTSQRDSYYSLNASWNGSFTATRHGAAFHDYSGSADSRFMIDADGTEDIPLNNKRAVTNRYGIGVIPSVSSYITTSLSVDTRNLPENVDIENSVITTTLTEGAIGYAKLDTRKGYQIIGVIRLADGSHPPLGISVKDETSHKELGLVADGGFVYLNGIQDDNKLALRWGDKSCFIQPPNSSNLTTGTAILPCISQN

SEQ ID NO: 3119 - protein, 231 aa, Escherichia coli; identical to SEQ ID NO: 3055

SEQ ID NO: 3120 - protein, 311 aa, Escherichia coli
MHYMSDNASKDGDQSYIRFGFKGETQINDQLTGYGRWEAEFAGNKAESDTAQQKTRLAFAGLKYKDLGSFDYGRNLGALYDVEAWTDMFPEFGGDSSAQTDNFMTKRASGLATYRNTDFFGVIDGLNLTLQYQGKNENRDVKKQNGDGFGTSLTYDFGGSDFAISGAYTNSDRTNEQNLQSRGTGKRAEAWATGLKYDANNIYLATFYSETRKMTPITGGFANKTQNFEAVAQYQFDFGLRPSLGYVLSKGKDIEGIGDEDLVNYIDVGATYYFNKNMSAFVDYKINQLDSDNKLNINNDDIVAVGMTYQF

SEQ ID NO: 3121 - protein, 430 aa, Escherichia coli; identical to SEQ ID NO: 2617

SEQ ID NO: 3122 - protein, 774 aa, Escherichia coli
MTPLRVFRKTTPLVNAIRLSLLPLAGLSFSAFAAQVNIAPGSLDKALNQYAAHSGFTLSVDASLTRGKQSNGLHGDYDVESGLQQLLDGSGLQVKPLGNNSWTLEPAPAPKEDALTVVGDWLGDARENDVFEHAGARDVIRREDFAKTGATTMREVLNRIPGVSAPENNGTGSHDLAMNFGIRGLSPRLASRSTVLMDGIPVPFAPYGQPQLSLAPVSLGNMDAIDVVRGGGAVRYGPQSVGGVVNFVTRAIPQDFGIEAGVEGQLSPTSSQNNPKETHNLMVGGTADNGFGTALLYSGTRGSDWREHSATRIDDLMLKSKYAPDEVHTFNSLLQYYDGEADMPGGLSRADYDADRWQSTRPYDRFWGRRKLASLGYQFQPDSQHKFNIQGFYTQTLRSGYLEQGKRITLSPRNYWVRGIEPRYSQIFMIGPSAHEVGVGYRYLNESTHEMRYYTATSSGQLPSGSSPYDRDTRSGTEAHAWYLDDKIDIGNWTITPGMRFEHIESYQNNAITGTHEEVSYNAPLPALNVLYHLTDSWNLYANTEGSFGTVQYSQIGKAVQSGNVEPEKARTWELGTRYDDGALTAEMGLFLINFNNQYDSNQTNDTVTARGKTRHTGLETQARYDLGTLTPTLDNVSIYASYAYVNAEIREKGDTYGNLVPFSPKHKGTLGVDYKPGNWTFNLNSDFQSSQFADNANTVKESADGSTGRIPGFMLWGARVAYDFGPQMADLNLAFGVKNIFDQDYFIRSYDDNNKGIYAGQPRTLYMQGSLKF

SEQ ID NO: 3123 - protein, 237 aa, Escherichia coli; identical to SEQ ID NO: 3022

SEQ ID NO: 3124 - protein, 871 aa, Escherichia coli
MHQVLILPRFARLTIALGLATAVFPVDAEYYFNPRFLSNDLAESVDLSAFTKGREAPPGTYRVDIYLNDEFMTSRDITFIADDNNADLIPCLSTDLLVSLGIKKSALLDNKEHSAEKHVPDNSACTPLQDRLADASTEFDVGQQHLSLSVPQIYVGRMARGYVSPELWEEGINAGLLNYSFNGNSINNRSNHNAGKSNYAYLNLQSGINIGSWRLRDNSTWSYNSGSSNSSNSNKWQHINTSAERDIIPLRSRLTVGDSYTDGDIFDSVNFRGLKINSTEAMLPDSQHGFAPVIHGIARGTAQVSVKQNGYDVYQTTVPPGPFTIDDINSAANGGDLQVTIKEADGSIQTLYVPYSSVPVLQRAGYTRYALAMGEYRSGNNLQSSPKFIQGSLMHGLEGNWTPYGGMQIAEDYQAFNLGIGKDLGLFGAFSFDITQANTTLADGTRHSGQSVKSVYSKSFYQTGTNIQVAGYRYSTQGFYNLSDSAYSRMSGYTVKPPTGDTNEQTQFIDYFNLFYSKRGQEQISISQQLGNYGTTFFSANRQSYWNTSRSDQQISFGLNVPFGDITTSLNYSYSNNIWQNDRDHLLAFTLNVPFSHWMRTDSQSAFRNSNASYSMSNDLKGGMTNLSGVYGTLLPDNNLNYSVQVGNTHGGNTSSGTSGYSSLNYRGAYGNTNVGYSRNGDSSQIYYGMSGGIIAHADGITFGQPLGDTMVLVKAPGADNVKIENQTGIHTDWRGYAILPFATEYRENRVALNANSLADNVELDETVVTVIPTHGAIARATFNAQIGGKVLMTLKYGNKSVPFGAIVTHGENKNGSIVAENGQVYLTGLPQSGKLQVSWGKDKNSNCIVEYKLPEVSPGTLLNQQTAICR

SEQ ID NO: 3125 - protein, 331 aa, Escherichia coli; identical to SEQ ID NO: 2700

SEQ ID NO: 3126 - protein, 331 aa, Escherichia coli; identical to SEQ ID NO: 2705

SEQ ID NO: 3127 - protein, 216 aa, Escherichia coli
MKSKLIILLMLVPFSSFSTENNFEINKTRVIYSDSTPSVQISNNKAYPLIVQSNIWDENNNKNHDFIATPPIFKMESESRNIIKIIKTNIKLPDSQESMRWLCIESMPPTEKSTKINRKEGRTDSINISIRGCIKLIYRPASVPSPVFNNIVEKLKWHKNGKYLVLKNNTPYYISFSEVFFDSDKVNNAKDILYVKPYSEKKIDISNRIIKKSNGQ

SEQ ID NO: 3128 - protein, 700 aa, Escherichia coli
MKIFSVRQTVLPALLVLSPVVFAADEQTMIVSAAPQVVSELDTPAAVSVVDGEEMRLATPRINLSESLTGVPGLQVQNRQNYAQDLQLSIRGFGSRSTYGIRGIRLYVDGIPATMPDGQGQTSNIDLSSVQNVEVLRGPFSALYGNASGGVMNVTTQTGQQPPTIEASSYYGSFGSWRYGLKATGATGDGTQPGDVDYTVSTTRFTTHGYRDHSGAQKNLANAKLGVRIDEASKLSLIFNSVDIKADDPGGLTKAEWKANPQQAPRAEQYDTRKTIKQTQAGLRYERSLSAQDDMSVMMYAGERETTQYQSIPMAPQLNPSHAGGVITLQRHYQGIDSRWTHRGELGVPVTFTTGLNYENMSENRKGYNNFRLNSGMPEYGQKGELRRDERNLMWNIDPYLQTQWQLSEKLSLDAGVRYSSVWFDSNDHYVTPGNGDDSGDASYHKWLPAGSLKYAMTDAWNIYLAAGRGFETPTINELSYRADGQSGMNFGLKPSTNDTIEIGSKTRIGDGLLSLALFQTDTDDEIVVDSSSGGRTTYKNAGKTRRQGAELAWDQRFAGDFRVNASWTWLDATYRSNVCNEQDCNGNRMPGIARNMGFASIGYVPEDGWYAGTEARYMGDIMADDENTAKAPSYTLVGLFTGYKYNYHNLTVDLFGRVDNLFDKEYVGSVIVNESNGRYYEPSPGRNYGVGMNIAWRFE

SEQ ID NO: 3129 - protein, 686 aa, Escherichia coli
MFWRDITLSVWRKKTTGLKTKKRLLPLVLAAALCSSPVWAEEATFTANFKDTDLKSFIETVGANLNKTIIMGPGVQGKVSIRTMTPLNERQYYQLFLNLLEAQGYAVVPMENDVLKVVKSSAAKVEPLPLVGEGSDNYAGDEMVTKVVPVRNVSVRELAPILRQMIDSAGSGNVVNYDPSNVIMLTGRASVVERLTEVIQRVDHAGNRTEEVIPLDNASASEIARVLESLTKNSGENQPATLKSQIVADERTNSVIVSGDPATRDKMRRLIRRLDSEMERSGNSQVFYLKYSKAEDLVDVLKQVSGTLTAAKEEAEGTVGSGREIVSIAASKHSNALIVTAPQDIMQSLQSVIEQLDIRRAQVHVEALIVEVAEGSNINFGVQWASKDAGLMQFANGTQIPIGTLGAAISQAKPQKGSTVISENGATTINPDTNGDLSTLAQLLSGFSGTAVGVVKGDWMALVQAVKNDSSSNVLSTPSITTLDNQEAFFMVGQDVPVLTGSTVGSNNSNPFNTVERKKVGIMLKVTPQINEGNAVQMVIEQEVSKVEGQTSLDVVFGERKLKTTVLANDGELIVLGGLMDDQAGESVAKVPLLGDIPLIGNLFKSTADKKEKRNLMVFIRPTILRDGMAADGVSQRKYNYMRAEQIYRDEQGLSLMPHTAQPVLPAQNQALPPEVRAFLNAGRTR

SEQ ID NO: 3130 - protein, 166 aa, Escherichia coli
MTPDNKKSADFIITPPLFVLNPANENLLRIMYIGAPLAKDRETLFFTSVRAVPSTTKRKEGNTLKIATQSVIKLFWRPKGLAYPLGEAPAKLRCTSSADMVTVSNPTPYFITLTDLKIGGKVVKNQMISPFDKYQFSLPKGAKNSSVTYRTINDYGAETPQLNCKS

SEQ ID NO: 3131 - protein, 426 aa, Escherichia coli
MKIRILMLTSLLTFIFPLSSFSAVKQKTPEQISSRVDMSMDNAPLPQVISLIWQRVFNRPFQLSPELAGDTRVVSFYLTQSLEPRSFFISYLKNMGISVSSRNGVDWIYIPAKKEYKEPVSVFTYRPKYRSVSYLSSMLTSVTQSGSFSNHVQTVDYSGSAASSASSASSGSATNSVSAATDAEVLVYSGTVADIRRVRDLLPRIDIPAEQVTVSGYVLEVQTTERNASGLQIIADLFKNRLGVSLGARSEGGNAFTLNVGGLNAFYSLIKTDSRFNVVSNPRLTVLSGSQSQFTVGQEVPVLDSVTYQGNSGSPVQSVTYRNSGAIFTVTPVVLDGVITLDISQQLSDFVKTTTGVNTSPTLTKREISTRVDVNDGDVLVLGGLASSKITKGRSGFSFLPGFTGSSEDSDKTDIIVVLQAHRVLR

SEQ ID NO: 3132 - protein, 249 aa, Escherichia coli
MRYLNTKNIIAAGVLLSCMSSIAWGAIIPDRTRIIMNESDKDEALKLTNQSKNLPYLAQTWIEDTKGNKSRDFIVTVPPMVRLNPSEQIQIRMITQEKIAQLPKDRETLFYFNVREIPPKTDKKNVMQVTMQHALKLFWRPKAIELEDDGVMTYEKVEIIRRNDGSIRFNNKMPYHVTLGYIGTNGVTMLPQTQSLMVTPFSYANTQFKNVPSTFQVGYINDFGGLSFYEINCPVVNNIYNISVANRDQ

SEQ ID NO: 3133 - protein, 747 aa, Escherichia coli; identical to SEQ ID NO: 2072

SEQ ID NO: 3134 - protein, 478 aa, Escherichia coli; identical to SEQ ID NO: 2404

SEQ ID NO: 3135 - protein, 361 aa, Escherichia coli
MKRNILAVIVPALLVAGTANAAEIYNKDGNKVDLYGKAVGLHYFSKGNGENSYGGNGDMTYARLGFKGETQINSDLTGYGQWEYNFQGNNSEGADAQTGNKTRLAFAGLKYADVGSFDYGRNYGVVYDALGYTDMLPEFGGDTAYSDDFFVGRVGGVATYRNSNFFGLVDGLNFAVQYLGKNERDTARRSNGDGVGGSISYEYEGFGIVGAYGAADRTNLQEAQPLGNGKKAEQWATGLKYDANNIYLAANYGETRNATPINNKFTNTSGFANKTQDVLLVAQYQFDFGLRPSIAYTKSKAKDVEGIGDVDLVNYFEVGATYYFNKNMSTYVDYIINQIDSDNKLGVGSDDTVAVGIVYQF

SEQ ID NO: 3136 - protein, 678 aa, Escherichia coli; identical to SEQ ID NO: 2231

SEQ ID NO: 3137 - protein, 161 aa, Escherichia coli; identical to SEQ ID NO: 2582

SEQ ID NO: 3138 - protein, 446 aa, Escherichia coli; identical to SEQ ID NO: 2176

SEQ ID NO: 3139 - protein, 232 aa, Escherichia coli; identical to SEQ ID NO: 2087

SEQ ID NO: 3140 - protein, 614 aa, Escherichia coli; identical to SEQ ID NO: 1888

SEQ ID NO: 3141 - protein, 221 aa, Escherichia coli
MKNYLWLVALLPLLSGCESQAILVKKDDAYFAPPKTEAPPPADGRAGGVFETGYNWSLTADRRAYRVGDILTVILEESTQSSKQAKTNFGKSNTVDIGAPTIFGHTKDKLSGSIDANRDFDGSATSQQQNSLRGEITVSVHAVQPNGILEIRGEKWLTLNQGDEYIRLSGLVRADDIQNDNSVSSQRIADARISYAGRGALSDANAAGWLTRLFNHPLFPI

SEQ ID NO: 3142 - protein, 203 aa, Escherichia coli; identical to SEQ ID NO: 2201

SEQ ID NO: 3143 - protein, 746 aa, Escherichia coli
MNKKIHSLALLVNLGIYGVAQAQEPTDTPVSHDDTIVVTAAEQNLQAPGVSTITADEIRKNPVARDVSEIIRTMPGVNLTGNSTSGQRGNNRQIDIRGMGPENTLILIDGKPVSSRNSVRQGWRGERDTRGDTSWVPPEMIERIEVLRGPAAARYGNGAAGGVVNIITKKGSGEWHGSWDAYFNAPEHKEEGATKRTNFSLTGPLGDEFSFRLYGNLDKTQADAWDINQGHQSARAGTYATTLPAGREGVINKDINGVVRWDFAPLQSLELEAGYSRQGNLYAGDTQNTNSDSYTRSKYGDETNRLYRQNYALTQNGGWDNGVTTSNWVQYEHTRNSRIPEGLAGGTEGKFNEKATQDFVDIDLDDVMLHSEVNLPIDFLVNQTLTLGTEWNQQRMKDLSSNTQALTGTNTGGAIDGVSTTDRSPYSKAEIFSLFAENNMELTDSTIVTPGLRFDHHSIVGNNWSPALNISQGLGDDFTLKMGIARAYKAPSLYQTNPNYILYSKGQGCYASAGGCYLQGNDDLKAETSINKEIGLEFKRDGWLAGVTWFRNDYRNKIEAGYVAVGQNAVGTDLYQWDNVPKAVVEGLEGSLNVPVSETVMWTNNITYMLKSENKTTGDRLSIIPEYTLNSTLSWQAREDLSMQTTFTWYGKQQPKKYNYKGQPAVGPETKEISPYSIVGLSATWDVTKNVSLTGGVDNLFDKRLWRAGNAQTTGDLAGANYIAGAGAYTYNEPGRTWYMSVNTHF

SEQ ID NO: 3144 - protein, 274 aa, Escherichia coli; identical to SEQ ID NO: 2309

SEQ ID NO: 3145 - protein, 193 aa, Escherichia coli; identical to SEQ ID NO: 2246

SEQ ID NO: 3146 - protein, 539 aa, Escherichia coli
MAAVCGTSGIASLFSQAAFAADSDIADGQTQRFDFSILQSMAHDLAQTAWRGAPRPLPDTLATMTPQAYNSIQYDAEKSLWHNVENRQLDAQFFHMGMGFRRRVRMFSVDPATHLAREIHFRPELFKYNDAGVDTKQLEGQSDLGFAGFRVFKAPELARRDVVSFLGASYFRAVDDTYQYGLSARGLAIDTYTDSKEEFPDFTAFWFDTVKPGATTFTVYALLDSASITGAYKFTIHCEKSQVIMDVENHLYARKDIKQLGIAPMTSMFSCGTNERRMCDTIHPQIHDSDRLSMWRGNGEWICRPLNNPQKLQFNAYTDNNPKGFGLLQLDRDFSHYQDIMGWYNKRPSLWVEPRNKWGKGTIGLMEIPTTGETLDNIVCFWQPEKAVKAGDEFAFQYRLYWSAQPPVHCPLARVMATRTGMGGFSEGWAPGEHYPEKWARRFAVDFVGGDLKAAAPKGIEPVITLSSGEAKQIEILYIEPIDGYRIQFDWYPTSDSTDPVDMRMYLRCQGDAISETWLYQYFPPAPDKRQYVDDRVMS

SEQ ID NO: 3147 - protein, 120 aa, Escherichia coli
MNTVLSIQGASAPVKKKSFFSKFTRLNMLRLARAVIPAAVLMMFFPQLAMAAQGQDLMASGNTTVKATFGKDSSVVKWVVLAEVLVGAVMYMMTKNVKFLAGFAIISVFIAVGMAVVGLK

SEQ ID NO: 3148 - protein, 232 aa, Escherichia coli; identical to SEQ ID NO: 2087

SEQ ID NO: 3149 - protein, 729 aa, Escherichia coli; identical to SEQ ID NO: 2948

SEQ ID NO: 3150 - protein, 862 aa, Escherichia coli
MSGSYSSVWAEDDIQFDSRFLELKGDTKIDLKRFSSQGYVEPGKYNLQVQLNKQPLAEEYHIYWYAGEDDVSKSYACLTPELVAQFGLKEDVAKNLQWSHDGKCLKPGQLEGVEIKADLSQSALVISLPQAYLEYTWPDWDPPSRWDDGISGIIADYSITAQTRHEENGGDDSNEISGNGTVGVNLGPWRMRADWQTNYQHTRSNDDDDEFGGDDTQKKWEWSRYYAWRALPSLKAKLALGEDYLNSDIFDGFNYVGGSVSTDDQMLPPNLRGYAPDISGVAHTTAKVTVSQMGRVIYETQVPAGPFRIQDLGDSVSGTLHIRIEEQNGQVQEYDISTASMPYLTRPGQVRYKIMMGRPQEWGHHVEGGFFSGAEASWGIANGWSLYGGALGDENYQSAALGVGRDLSTFGAVAFDVTHSHTKLDKDTAYGKGSLDGNSFRVSYSKDFDQLNSRVTFAGYRFSEENFMTMSEYLDASDSEMVRTGNDKEMYTATYNQNFRDAGVSVYLNYTRHTYWDREEQTNYNIMLSHYFNMGSIRNMSVSLTGYRYEYDNRADKGMYISLSMPWGDNSTVSYNGNYGSGTDSSQVGYFSRVDDATHYQLNIGTSDKHTSVDGYYSHDGSLAQVDLSANYHEGQYTSAGLSLQGGATLTTHGGALHRTQNMGGTRLLIDADGVADVPVEGNGAAVYTNMFGKAVVSDVNNYYRNQAYIDLNKLPENAEATQSVVQATLTEGAIGYRKFAVISGQKAMAVLRLQDGSHPPFGAEVKNDNEQTVGLVDDDGSVYLAGVKPGEHMSVFWSGVAHCDINLPDPLPADLFNGLLLPCQHKGNVAPVVPDDIKPVIQEQTQQVTPTDPPVSVSANQ

SEQ ID NO: 3151 - protein, 518 aa, Escherichia coli; identical to SEQ ID NO: 2349

SEQ ID NO: 3152 - protein, 246 aa, Escherichia coli; identical to SEQ ID NO: 1985

SEQ ID NO: 3153 - protein, 111 aa, Escherichia coli
MKKQIEGMTMKKVLALVVAAAMGLSSAAFAAETTTTPAPTATTTKAAPAKTTHHKKQHKAAPAQKAQAAKKHHKNTKAEQKAPEQKAQAAKKHAKKHSHQQPAKPAAQPAA

SEQ ID NO: 3154 - protein, 203 aa, Escherichia coli; identical to SEQ ID NO: 2009

SEQ ID NO: 3155 - protein, 224 aa, Escherichia coli
MKGLLSLLIFSMVLPAHAGIVIYGTRIIYPAENKEVMVQLMNQGNRSSLLQAWIDDGDTSLPPEKTQVPFMLTPPVAKIGANSGQQVKIKIMPNKLPTNKESIFYLNVLDIPPNSPEQEGKNALKFAMQNRIKLFYRPAGIAPVNKATFKKLLVNRSGNGLVIKNDSANWVTISDVKANNVKVNYETIMIAPLESQSVNVKSNNANNWHLTIIDDHGNYISDKI

SEQ ID NO: 3156 - protein, 863 aa, Escherichia coli
MHIRKHRLAGFFVRLFVACAFAAQAPLSSAELYFNPRFLADDPQAVADLSRFENGQELPPGTYRVDIYLNNGYMATRDVTFNTGDSEQGIVPCLTRAQLASMGLNTASVAGMNLLADDACVPLTTMVQDATAHLDVGQQRLNLTIPQAFMSNRARGYIPPELWDPGINAGLLNYNFSGNSVQNRIGGNSHYAYLNLQSGLNIGAWRLRDNTTWSYNSSDRSSGSKNKWQHINTWLERDIIPLRSRLTLGDGYTQGDIFDGINFRGAQLASDDNMLPDSQRGFAPVIHGIARGTAQVTIKQNGYDIYNSTVPPGPFTINDIYAAGNSGDLQVTIKEADGSTQIFTVPYSSVPLLQREGHTRYSITAGEYRSGNAQQEKPRFFQSTLLHGLPAGWTIYGGTQLADRYRAFNFGIGKNMGALGALSVDMTQANSTLPDDSQHDGQSVRFLYNKSLNESGTNIQLVGYRYSTSGYFNFADTTYSRMNGYNIETQDGVIQVKPKFTDYYNLAYNKRGKLQLTVTQQLGRTSTLYLSGSHQTYWGTSNVDEQFQAGLNTAFEDINWTLSYSLTKNAWQKGRDQMLALNVNIPFSHWLRSDSKSQWRHASASYSMSHDLNGRMTNLAGVYGTLLEDNNLSYSVQTGYAGGGDGNSGSTGYATLNYRGGYGNANIGYSHSDDIKQLYYGVSGGVLAHANGVTLGQPLNDTVVLVKAPGAKDAKVENQTGVRTDWRGYAVLPYATEYRENRVALDTNTLADNVDLDNAVANVVPTRGAIVRAEFKARVGIKLLMTLTHNNKPLPFGAMVTSESSQSSGIVADNGQVYLSGMPLAGKVQVKWGEEENAHCVANYQLPPESQQQLLTQLSAECR

SEQ ID NO: 3157 - protein, 838 aa, Escherichia coli
MPQRHHQGHKRTPKQLALIIKRCLPMVLTGSGMLCTTANAEEYYFDPIMLETTKSGMQTTDLSRFSKKYAQLPGTYQVDIWLNKKKVSQKKITFTANAEQLLQPQFTVEQLRELGIKVDEIPALAEKDDDSVINSLEQIIPGTAAEFDFNHQRLNLSIPQIALYRDARGYVSPSRWDDGIPTLFTNYSFTGSDNRYRQGNRSQRQYLNMQNGANFGPWRLRNYSTWTRNDQASSWNTISSYLQRDIKALKSQLLLGESATSGSIFSSYTFTGVQLASDDNMLPNSQRGFAPTVRGIANSSAIVTIRQNGYVIYQSNVPAGAFEINDLYPSSNSGDLEVTIEESDGTQRRFIQPYSSLPMMQRPGHLKYSATAGRYRADANSDSKEPEFAEATAIYGLNNTFTLYGGLLGSEDYYALGIGIGGTLGALGALSMDINRADTQFDNRHSFHGYQWRTQYIKDIPETNTNIAVSYYRYTNDGYFSFDEANTRNWDYNSRQKSEIQFNISQTIFDGVSLYASGSQQDYWGNNDKNRNISVGVSGQQWGIGYSLNYQYSRYTDQNNDRALSLNLSIPLERWLPRSRVSYQMTSQKDRPTQHEMRLDGSLLDDGRLSYSLEQSLDDDNNHNSSLNASYRSPYGTFSAGYSYGNDSSQYNYGVTGGVVIHPHGVTLSQYLGNAFALIDANGASGVRIQNYPGIATDPFGYAVVPYLTTYQENRLSVDTTQLPDNVDLEQTTQFVVPNRGAMVAARFNANIGYRVLVTVSDRNGKPLPFGALASNDETGQQSIVDEGGILYLSGISSKSQSWTVRWGNQEDQQCQFAFSTPDSEPTTSVLQGTAQCH

SEQ ID NO: 3158 - protein, 539 aa, Escherichia coli; identical to SEQ ID NO: 3050

SEQ ID NO: 3159 - protein, 243 aa, Escherichia coli
MTFMKGLPLLLLVASLCSHAALQPDRTRIVFNANDKATSLRVDNRSDKLPYLAYSWLENEKGEKSDDLLVALPPIQRLEPKATTQVRIVKQASTTKLPGDRETLFFYNMREIPPAPEKNSDHAVLQVAIQSRIKVFWRPTALRKKAGEKVELQLQVSQQGNQLTLKNPTAYYLTIAYLGRNEKGVLPGFKTVMVAPFSTVNTNTGNYSGSQFYLGYMDDYGALRMTTLNCSGQCHLQAVEAKK

SEQ ID NO: 3160 - protein, 274 aa, Escherichia coli
MNKTAIALLALLASSASLAATPWQKITQPVPGSAQSIGSFSNGCIVGADTLPIQSEHYQVMRTDQRRYFGHPDLVMFIQRLSSQVSNLGMGTVLIGDMGMPAGGRFNGGHASHQTGLDVDIFLQLPKTRWTSAQLLRPQALDLVSRDGKHVVPTLWKSEIFSLIKLAAQDKDVTRIFVNPAIKQQLCLDAGTDRDWLRKVRPWFQHRAHMHVRLRCPADSLECEDQPLPPPGDGCGAELQSWFAPPKPGTTKPEKKTPPPLPPSCQALLDEHVI

SEQ ID NO: 3161 - protein, 793 aa, Escherichia coli; identical to SEQ ID NO: 2768

SEQ ID NO: 3162 - protein, 446 aa, Escherichia coli [sequence omitted]

SEQ ID NO: 3163 - protein, 843 aa, Escherichia coli
MHWMHLPLYHYRAHFSFSLLALTIASSLPAYGGKFNPKFLENVQGIDQHIDLSVYDSPVGQQIPGKYRVSVFVNEEKMASRTLDFSTASEAKRKASGESLMPCLSRVQLEEMGVRVDSFPALKMSPPEACVAFDEIIPQATSRFDFNTQTLHLSFPQAAMMMTARGTVDPSRWDEGIPALLLDYSFSGSNGRNEGTGSSSDSTSDSYYLNLRSGLNVGPWRLRNNSIWNRTDGKNQWDNVGTSLNRAIIPLKSQITLGDTATPGEIFDSVQMRGALLASDDEMLPDSQRGFAPVVRGIAKSNAEVSIEQNGYVIYRTFVQPGAFEINDLYATSGSGDLTVIIKEADGSEQRFIQPFSAVAIFQREGYLKYSLAAGEYRAGNYDSDKPHFGQFTAMYGLPWGMTAYGGALLSADYNALALGLGKNFGTIGAVSVDVTQAKSQLRNNEKEEGQSYRFLYSKSFEGGTDLRLLGYKYSTSGYYTFQEATDVRSDADSDYRRYHKRSQIQGNITQQLGDYGSVYFNMTQQDYWNVDGKENSLSAGYHGHIGRVNYSVAYTWTRSPEWEEDDRLWSFSVSIPLGGAWSSYRMTTDQNGKTSQQASVSGTLLEDRNLSYNVQQGYTSNGVGYSGSVNMGYMGGSGNIDVGYNYSKDNQQVNYGVRGGVIVHSEGITLSQPLGESLAIVSAPGARGGHVVNSSGVEVDWMGNAVVPYLTPYRETIVELRSDTLGQNVELQEAFQKVVPTRGAVVRSRFDTRVGYRVLMSLKQANGNAVPFGATAALIDESKPASSIVGEEGQLYISGMPEEGELQVSWGNEQAQRCRVPFRLPENKDNAAIVMVNAVCEK

SEQ ID NO: 3164 - protein, 897 aa, Escherichia coli; identical to SEQ ID NO: 1908

SEQ ID NO: 3165 - protein, 224 aa, Escherichia coli
MTVSLTAILLSCSSAWAAGKGGIGLAATRLVYSEGEEQISLGVRNTSPDVPYLIQSWVMTPDNKKSADFIITPPLFVLNPANENLLRIMYIGAPLAKDRETLFFTSVRAVPSTTKREEGNTLKIATQSVIKLFWRPKGLAYPLGEAPAKLRCTSSADMVTVSNPTPYFITLTDLKIGGKVVKNQMISPFDKYQFSLPKGAKNSSVTYRTINDYGAETPQLNCKS

SEQ ID NO: 3166 - protein, 869 aa, Escherichia coli
MKIPTTTDIPQRYTWCLAGICYSSLAILPSFLSYAESYFNPAFLLENGTSVADLSRFERGNHQPARVYRVDLWRNDEFIGSQDIVFESTTENTGDKSGGLMPCFNQVLLERIGLNSSAFPELAQQQNNKCINLLKAVPDATINFDFAAMRLNITIPQITLLSSAHGYIPPEEWDEGIPALLLNYNFTGNRGNGNDSYFFSELSGINIGPWRLRNNGSWNYFRGNGYHSEQWNNIGTWVQRAIIPLKSELVMGDGNTGSDIFDGVGFRGVRLYSSDNMYPDSQQGFAPTVRGIARTAAQLTIRQNGFIIYQSYVSPGAFEITDLHPTSSNGDLDVTIDERDGNQQNYTIPYSTVPILQREGRFKFDLTAGDFRSGNSQQSSPFFFQGTALGGLPQEFTAYGGTQLSANYTAFLLGLGRNLGNWGAVSLDVTHARSQLADDSRHEGDSIRFLYAKSMNTFGTNFQLMGYRYSTQGFYTLDDVAYRRMEGYEYDYDYDGEHRDELIIVNYHNLRFSRKDRLQLNISQSLNDFGSLYISGTHQKYWNTSDSDTWYQVGYTSSWVGISYSLSFSWNESVGIPDNERIVGLNVSVPFNVLTKRRYTRENALDRAYASFNANRNSNGQNSWLAGVGGTLLEGHNLSYHVSQGDTSNNGYTGSATANWQATYGTLGVGYNYDRDQHDVNWQLSGGVVGHENGITLSQPLGDTNVLIKAPGAGGVRIENQTGILTDWRGYAVMPYATVYRYNRIALDTNTMGNSIDVEKNISSVVPTQGALVRANFDTRIGVRALITVTQGGKPVPFGSLVRENSTGITSMVGDDGQVYLSGAPLSGELLVQWGDGANSRCIAHYVLPKQSLQQAVTVISAVCTHPGS

SEQ ID NO: 3167 - protein, 170 aa, Escherichia coli [sequence omitted]

SEQ ID NO: 3168 - protein, 208 aa, Escherichia coli; identical to SEQ ID NO: 1949

SEQ ID NO: 3169 - protein, 170 aa, Escherichia coli [sequence omitted]

SEQ ID NO: 3170 - protein, 208 aa, Escherichia coli; identical to SEQ ID NO: 1949

SEQ ID NO: 3171 - protein, 368 aa, Escherichia coli
MNKTITALAIMMASFAANASVLPETPVPFKSGTGAIDNDTVYIGLGSAGTAWYKLDTQAKDKKWKALAAFPGGPRDQATSAFIDGNLYVFGGIGKNSEGLTQVFNDVHKYNPKTNSWVKLMSHAPMGMAGHVTFVHNGKAYVTGGVNQNIFNGYFEDLNEAGKDSTAIDKINAHYFDKKAEDYFFNKFLLSFDPSTQQWSYAGESPWYGTAGAAVVNKGDKTWLINGEAKPGLRTDAVFELDFTGNNLKWNKLAPVSSPDGVAGGFAGISNDSLIFAGGAGFKGSRENYQNGKNYAHEGLKKSYSTDIHLWHNGKWDKSGELSQGRAYGVSLPWNNSLLIIGGETAGGKAVTDSVLISVKDNKVTVQN

SEQ ID NO: 3172 - protein, 816 aa, Escherichia coli
MNIYRLSFVSCLVVAMPCALAVEFNLNVLDKSMRDRIDISLLKEKGVIAPGEYFVSVAVNNNQISNGQKINWHKNDDKTIPCINDLLVDKFGLKPEVRQSLPLINQCVDFSSRPEMLFNFDQANQQLNITIPQAWLAWHSENWTPPSTWKEGVAGVLMDYNLFASSYRPQDGSSSTNLNAYGTAGINTGAWRLRSDYQLNQTDSDDNHEQSGEISRTYLFRPLPQLGSKLTLGETDFSSNIFDGFSYTGAALASDDRMLPWELRGYAPQISGIAQTNATVTISQSGRVIYQKKVPPGPFIIDDLNQSVQGTLDVKVTEEDGRVNNFQVSAASTPFLTRQGQVRYKLAAGQPRPSMSHQTENETFFSNEVSWGMLSNTSLYGGLLLSGDDYHSAAIGIGQNMLWLGALSFDVTWASSHFDTQQDERGLSYRFNYSKQVDATNSTISLAAYRFSDRHFHSYANYLDHKYNDSDAQDEKQTISLSVGQPITPLNLNLYANLLHQTWWNADASTTANITAGFNVDIGDWRDISISTSFNTTHYEDKDRDNQIYLSISLPFGNGGRVGYDMQNSSHSTTHRMSWNDTLDERNSWGMSAGLQSDRPDNGAQVSGNYQHLSSAGEWDISGTYAANDYSSVSSSWSGSFTATQYGAAFHRRSSTNEPRLMVSTDGVADIPVQGNLDYTNHFGIAVVPVISSYQPSTVAVNMNDLPDGVTVAENVIKETWIEGAIGYKSLASRSGKDVNVIIRNASGQFPPLGADIRQDDSGISVGMVGEKGHAWLSGVAENQKFTVVWGDSQHCSLHLPEHMEDTANRLILPCH

SEQ ID NO: 3173 - protein, 869 aa, Escherichia coli
MKIPTTTDIPQRYTWCLAGICYSSLAILPSFLSYAESYFNPAFLLENGTSVADLSRFERGNHQPAGVYRVDLWRNDEFIGSQDIVFESTTENTGDKSGGLMPCFNQVLLERIGLNSSAFPELAQQQNNKCINLLKAVPDATINFDFAAMRLNITIPQIALLSSAHGYIPPEEWDEGIPALLLNYNFTGNRGNGNDSYFFSELSGINIGPWRLRNNGSWNYFRGNGYHSEQWNNIGTWVQRAIIPLKSELVMGDGNTGSDIFDGVGFRGVRLYSSDNMYPDSQQGFAPTVRGIARTAAQLTIRQNGFIIYQSYVSPGAFEITDLHPTSSNGDLDVTIDERDGNQQNYTIPYSTVPILQREGRFKFDLTAGDFRSGNSQQSSPFFFQGTVLGGLPQEFTAYGGTQLSANYTAFLLGLGRNLGNWGAVSLDVTHARSQLADDSRHEGDSIRFLYAKSMNTFGTNFQLMGYRYSTQGFYTLDDVAYRRMEGYEYDYDYDGEHRDEPIIVNYHNLRFSRKDRLQLNISQSLNDFGSLYISGTHQKYWNTSDSDTWYQVGYTSSWVGISYSLSFSWNESVGIPDNERIVGLNVSVPFNVLTKRRYTRENALDRAYASFNANRNSNGQNSWLAGVGGTLLEGHNLSYHVSQGDTSNNGYTGSATANWQAAYGTLGVGYNYDRDQHDVNWQLSGGVVGHENGITLSQPLGDTNVLIKAPGAGGVRIENQTGILTDWRGYAVMPYATVYRYNRIALDTNTMGNSIDVEKNISSVVPTQGALVRANFDTRIGVRALITVTQGGKPVPFGSLVRENSTGITSMVGDDGQVYLSGAPLSGELLVQWGDGANSRCIAHYVLPKQSLQQAVTVISAVCTHPGS

SEQ ID NO: 3174 - protein, 193 aa, Escherichia coli; identical to SEQ ID NO: 2246

SEQ ID NO: 3175 - protein, 851 aa, Escherichia coli
MPSFIGGLVVFVSAAFNAQAETWFDPAFFKDDPSMVADLSRFEKGRKITPGVYRVDIVLNQTIVDTRNVNFVEITPEKGIAACLTTESLDAMGVNTDAFPAFKQLDKQACVPLAEIIPDASVTFNVNKLRLEISVPQIAIKSNARGYVPPERWDEGINALLLGYSFSGANSIHSSADSDSGDSYFLNLNSGVNLGPWRLRNNSTWSRSSGQTAEWKNLSSYLQRAVIPLKGELTVGDDYTAGDFFDSVSFRGVQLASDDNMLPDSLKGFAPVVRGIAKSNAQITIKQNGYTIYQTYVSPGAFEISDLYSTSSSGDLLVEIKEADGSVNSYSVPFSSVPLLQRQGRIKYAVTLAKYRTNSNEQQESKFAQATLQWGGPWGTTWYGGGQYAEYYRAAMFGLGFNLGDFGAISFDATQAKSTLADQSEHKGQSYRFLYAKTLNHLGTNFQLMGYRYSTSGFYTLSDTMYKHMDGYEFNDGDDEDTPMWSRYYNLFYTKRGKLQVNISQQLGEYGSFYLSGSQQTYWHTDQQDRLLQFGYNTQIKDLSLGISWNYSKSRGQPDADQVFALNFSLPLNLLLPRSNDSYTRKKNYAWMTSNTSIDNEGHTTQNLGLTETLLDDGNLSYSVQQGYNSEGKTANGSASMDYKGAFADARVGYNYSDNGSQQQLNYALSGSLVAHSQGITLGQSLGETNVLIAAPGAENTRVANSTGLKTDWRGYTVVPYATSYRENRIALDAASLKRNVDLENAVVNVVPTKGALVLAEFNAHAGARVLMKTSKQGIPLRFGAIATLDGVQANSGIIDDDGSLYMAGLPAKGTISVRWGEAPDQICHINYELTEQQINSAITRMDAICR

SEQ ID NO: 3176 - protein, 213 aa, Escherichia coli; identical to SEQ ID NO: 2232

SEQ ID NO: 3177 - protein, 368 aa, Escherichia coli
MNKTITALAIMMASFAANASVLPETPVPFKSSTGAIDNDTVYIGLGSAGTAWYKLDTQAKDKKWTALAAFPGGPRDQATSAFIDGNLYVFGGIGKNSEGLTQVFNDVHKYNPKTNSWVKLMSHAPMGMAGHVTFVHNGKAYVTGGVNQNIFNGYFEDLNEAGKDSTAIDKINAHYFDKKAEDYFFNKFLLSFDPSTQQWSYAGESPWYGTAGAAVVNKGDKTWLINGEAKPGLRTDAVFELDFTGNNLKWNKLAPVSSPDGVAGGFAGISNDSLIFAGGAGFKGSRENYQNGKNYAHEGLKKSYSTDIHLWHNGKWDKSGELSQGRAYGVSLPWNNSLLIIGGESAGGKAVTDSVLISVKDNKVTVQN

SEQ ID NO: 3178 - protein, 760 aa, Escherichia coli; identical to SEQ ID NO: 2080

SEQ ID NO: 3179 - protein, 728 aa, Escherichia coli
MLSTQFNRDNQYQAITKPSLLAGCIALALLPSAAFAAPATEETVIVEGSATAPDDGENDYSVTSTSAGTKMQMTQRDIPQSVTIVSQQRMEDQQLQTLGEVMENTLGISKSQADSDRALYYSRGFQIDNYMVDGIPTYFESRWNLGDALSDMALFERVEVVRGATGLMTGTGNPSAAINMVRKHATSREFKGDVSAEYGSWNKERYVADLQSPLTEDGKIRARIVGGYQNNDSWLDRYNSEKTFFSGIVDADLGDLTTLSAGYEYQRIDVNSPTWGLPRWNTDGSSNSYDRARSTAPDWAYNDKEINKVFMTLKQQFADTWQATLNATHSEVEFDSKMMYVDAYVNKADGMLVGPYSNYGPGFDYVGGTGWNSGKRKVDALDLFADGSYELFGRQHNLMFGGSYSKQNNRYFSSWANIFPDEIGSFYNFNGNFPQTDWSPQSLAQDDTTHMKSLYAATRVTLADPLHLILGARYTNWRVDTLTYSMEKNHTTPYAGLVFDINDNWSTYASYTSIFQPQNDRDSSGKYLAPITGNNYELGLKSDWMNSRLTTTLAIFRIEQDNVAQSTGTPIPGSNGETAYKAVDGTVSKGVEFELNGAITDNWQLTFGATRYIAEDNEGNAVNPNLPRTTVKMFTSYRLPVMPELTVGGGVNWQNRVYTDTVTPYSTFRAEQGSYALVDLFTRYQVTKNFSLQGNVNNLFDKTYDTNVEGSIVYGTPRNFSITGTYQF

SEQ ID NO: 3180 - protein, 700 aa, Escherichia coli; identical to SEQ ID NO: 2784

SEQ ID NO: 3181 - protein, 650 aa, Escherichia coli; identical to SEQ ID NO: 2146

SEQ ID NO: 3182 - protein, 162 aa, Escherichia coli; identical to SEQ ID NO: 1973

SEQ ID NO: 3183 - protein, 191 aa, Escherichia coli; identical to SEQ ID NO: 2727

SEQ ID NO: 3184 - protein, 130 aa, Escherichia coli
MLSPESLCYGEKHEKRGAFLGLLLVSACASVFAANNETSKSVTFPKCEGLDAAGIAASVKRDYQQNRVARWADDQKIVGQADPVAWVSLQDIQGKDDKWSVPLTVRGKSADIHYQVSVDCKAGMAEYQRR

SEQ ID NO: 3185 - protein, 203 aa, Escherichia coli; identical to SEQ ID NO: 2201

SEQ ID NO: 3186 - protein, 784 aa, Escherichia coli; identical to SEQ ID NO: 2244

SEQ ID NO: 3187 - protein, 678 aa, Escherichia coli
MVPSTFSRLKAARCLPVVLAALIFAGCGTHTPDQSTAYMQGTAQADSAFYLQQMQQSSDDTRINWQLLAIRALVKEGKTGQAVELFNQLPQELNDSQRREKTLLAVEIKLAQKDFAGAQNLLAKITPADLEQNQQARYWQAKIDASQGRPSIDLLRALIAQEPLLGAKEKQQNIDATWQALSSMTQEQANTLVINADENILQGWLDLQRVWFDNRNDPDMMKAGIADWQKRYPNNPGAKMLPTQLVNVKAFKPASTNKIALLLPLNGQAAVFGRTIQQGFEAAKNIGTQPVAAQVAAAPAADVAEQPQPQTVDGVASPAQASVSDLTGEQPAAQPAPVSTPAATTTAVSAPANPSAELKIYDTSSQPLSQILSQVQQDGASIVVGPLLKNNVEELLKSNTPLNVLALNQPENIENRVNICYFALSPEDEARDAARHIRDQGKQAPLVLIPRSSLGDRVANAFAQEWQKLGGGTVLQQKFGSTSELRAGVNGGSGIALTGTPITPRATTDSGMTTNNPTLQTTPTDDQFTNNGGRVDAVYIVATPGEIAFIKPMIAMRNGSQSGATLYASSRSAQGTAGPDFRLEMEGLQYSEIPMLAGGNLPLMQQALSAVNNDYSLARMYAMGVDAWSLANHFSQMRQIQGFEINGNTGSLTANPDCVINRKLSWLQYQQGQVVPAS

SEQ ID NO: 3188 - protein, 230 aa, Escherichia coli
MMTKIKLLMLIIFYLIISASAHAAGGIALGATRIIYPADAKQTAVWIRNSHTNERFLVNSWIENSSGVKEKSFIITPPLFVSEPKSENTLRIIYTDPPLAADRESLFWMNVKTIPSVDKNALNGRNVLQLAILSRMKLFLRPIQLQELPAEAPDTLKFSRSGNYINVHNPSPFYVTLVNLQVGSQKLGNAMAAPRVNSQIPLPSGVQGKLKFQTVNDYGSVTPVREVNLN

SEQ ID NO: 3189 - protein, 242 aa, Escherichia coli; identical to SEQ ID NO: 2697

SEQ ID NO: 3190 - protein, 199 aa, Escherichia coli
MIYDASRKEAALPVANKGAETPYLLQSWVDNIDGKSRAPFIITPPLFRLEAGDDSSLRIIKTADNLPENKESLFYINVRAIPAKKKSDDVNANELTLVFKTRIKMFYRPAHLKGRVNDAWKSLEFKRSDHSLNIYNPTEYYVVFAGLAVDKTDLTSKIEYIAPGEHKQLPLPASGGKNVKWAAINDYGGSSGTETRPLQ

SEQ ID NO: 3191 - protein, 237 aa, Escherichia coli; identical to SEQ ID NO: 1814

SEQ ID NO: 3192 - protein, 367 aa, Escherichia coli; identical to SEQ ID NO: 2433

SEQ ID NO: 3193 - protein, 614 aa, Escherichia coli; identical to SEQ ID NO: 1888

SEQ ID NO: 3194 - protein, 187 aa, Escherichia coli
MGLFLINFNNQYDSNQTNDTVTARGKTRHTGLETQARYDLGTLTPTLDNVSIYASYAYVNAEIREKGDTYGNLVPFSPKHKGTLGVDYKPGNWTFNLNSDFQSSQFADNANTVKESADGSTGRIPGFMLWGARVAYDFGPQMADLNLAFGVKNIFDQDYFIRSYDDNNKGIYAGQPRTLYMQGSLKF

SEQ ID NO: 3195 - protein, 193 aa, Escherichia coli; identical to SEQ ID NO: 2246

SEQ ID NO: 3196 - protein, 355 aa, Escherichia coli
MAISAVAASVLMAMSAQAAEIYNKDSNKLDLYGKVNAKHYFSSNDADDGDTTYARLGFKGETQINDQLTGFGQWEYEFKGNRAESQGSSKDKTRLAFAGLKFGDYGSIDYGRNYGVAYDIGAWTDVLPEFGGDTWTQTDVFMTGRTTGVATYRNNDFFGLVDGLNFAAQYQGKNDRTDVTEANGDGFGFSTTYEYEGFGVGATYAKSDRTNNQVIYGNNSLNASGQNAEVWAAGLKYDANNIYLATTYSETQNMTVFGNNHIANKAQNFEVVAQYQFDFGLRPSVAYLQSKGKDLGAWGDQDLVEYIDVGATYYFNKNMSTFVDYKINLIDKSDFTKASGVATDDIVAVGMVYQF

SEQ ID NO: 3197 - protein, 760 aa, Escherichia coli; identical to SEQ ID NO: 2080

SEQ ID NO: 3198 - protein, 224 aa, Escherichia coli
MTVSLTAILLSCSSAWAAGKGGIGLAATRLVYSEGEEQISLGVRNTSPDVPYLIQSWVMTPDNKKSADFIITPPLFVLNPANENLLRIMYIGAPLAKDRETLFFTSVRAVPSTTKRKEGNTLKIATKSVIKLFWRPKGLAYPLGEAPAKLRCTSSADMVTVSNPTPYFITLTDLKIGGKVVKNQMISPFDKYQFSLPKGAKNSSVTYRTINDYGAETPQLNCKS

SEQ ID NO: 3199 - protein, 518 aa, Escherichia coli; identical to SEQ ID NO: 2349

SEQ ID NO: 3200 - protein, 232 aa, Escherichia coli; identical to SEQ ID NO: 2087

SEQ ID NO: 3201 - protein, 359 aa, Escherichia coli; identical to SEQ ID NO: 2329

SEQ ID NO: 3202 - protein, 203 aa, Escherichia coli; identical to SEQ ID NO: 2015

SEQ ID NO: 3203 - protein, 565 aa, Escherichia coli; identical to SEQ ID NO: 3088

SEQ ID NO: 3204 - protein, 231 aa, Escherichia coli; identical to SEQ ID NO: 2794

SEQ ID NO: 3205 - protein, 678 aa, Escherichia coli; identical to SEQ ID NO: 2231

SEQ ID NO: 3206 - protein, 203 aa, Escherichia coli; identical to SEQ ID NO: 2201

SEQ ID NO: 3207 - protein, 834 aa, Escherichia coli
MYKKLKLTTISELIKNIYCSLSVLIIGCASAYAVEFNKDLIEAEDRENVNLSQFETDGQLPVGKYSLNALINNKRTPIHLDLQWVLIDNQTAVCLTPEQLTLLGFTDEIIEEAQQNLIDGCYPIEKEKQITTYLDKGKMQLSISAPQAWLKYKDANWTPPELWDHGIAGAFLDYNLYASHYAPHQGDNSQNISSYGQAGVNLGAWRLRTDYQYDQSFNNGKSQANNLDFPRIYLFRPIPAINAKLTIGQYDTESSIFDSFHFSGVSLKSDENMLPPDLRGYAPQITGVAQTNAKVTVSQNNRIIYQENVPPGPFAITNLFNTLQGQLDVKVEEEDGQVTQWQVASNSIPYLTRKGQIRYTTAMGKPTSVGGDSLQQPFFWTGEFSWGWLNNVSLYGGSVLTNRDYQSLAAGVGFNLNSLGSLSFDVTRSDAQLHNQDKETGYSYRANYSKRFESTGSQLTFAGYRFSDKNFVTMNEYINDTNHYTNYQNEKESYIVTFNQYLESLRLNTYVSLARNTYWDASSNVNYSFSLSRDFDIGPLKNVSTSLTFSRINWEEDNQDQLYLNISIPWGTSRTLSYGMQRNQDNKISHTASWYDSSDRNNSWSVSASGDNDEFKDMKASLRASYQHNTENGRLYLSGTSQRDNYYSLNASWNGSFTATRHGAAFHDYSGSADSRFMIDADGAEDIPLNNKRAVTNRYGIGVIPSVSSYITTSLSVDTRNLPENVDIENSVITTTLTEGAIGYAKLDTRKGYQIMGVIRLADGSHPPLGISVKDKTSHKELGLVADGGFVYLNGIQDDSKLTLRWGDKSCFIQPPNSSNLTTGTVILPCISQN

SEQ ID NO: 3208 - protein, 869 aa, Escherichia coli; identical to SEQ ID NO: 3012

SEQ ID NO: 3209 - protein, 207 aa, Escherichia coli; identical to SEQ ID NO: 2211

SEQ ID NO: 3210 - protein, 838 aa, Escherichia coli; identical to SEQ ID NO: 3041

SEQ ID NO: 3211 - protein, 161 aa, Escherichia coli; identical to SEQ ID NO: 2582

SEQ ID NO: 3212 - protein, 881 aa, Escherichia coli; identical to SEQ ID NO: 2762

SEQ ID NO: 3213 - protein, 375 aa, Escherichia coli
MQLKQRVYNENGKRVDAVVMMDGNVGQQYSTGWFGDNAGGENYMQFSDMYVTTKGFLPFAPEADFWVGKHGAPKIEIQMLDWKTQRTDAAAGVGLENWKVGPGKIDIALVREDVDDYDRSLQNKQQINTNTIDLRYKDIPLWDKATLMVSGRYVTANESASEKDNQDNNGYYDWKDTWMFGTSLTQKFDKGGFNEFSFLVANNSIASNFGRYAGASPFTTFNGRYYGDHTGGTAVRLTSQGEAYIGDHFIVANAIVYSFGNDIYSYETGAHSDFESIRAVVRPAYIWDQYNQTGVELGYFTQQNKDANSNKFNESGYKTTLFHTFKVNTSMLTSRPEIRFYATYIKALENELDGFTFEDNKDDQFAVGAQAEIWW

SEQ ID NO: 3214 - protein, 729 aa, Escherichia coli
MLSTQFNRDNQYQAITKPSLLAGCIALALLPSAAFAAPATEETVIVEGSATAPDDGENDYSVTSTSAGTKMQMTQRDIPQSVTIVSQQRMEDQQLQTLGEVMENTLGISKSQADSDCALYYSRGFQIDNYMVDGIPTYFESRWNLGDALSDMALFERVEVVRGATGLMTGTGNPSAAINMVRKHATSREFKGDVSAEYGSWNKERYVADLQSPLTEDGKIRARIVGGYQNNDSWLDRYNSEKTFFSGIVDADLGDLTTLSAGYEYQRIDVNSPTWGGLPRWNTDGSSNSYDRARSTAPDWAYNDKEINKVFMTLKQQFADTWQATLNATHSEVEFDSKMMYVDAYVNKADGMLVGPYSNYGPGFDYVGGTGWNSGKRKVDALDLFADGSYELFGRQHNLMFGGSYSKQNNRYFSSWANIFPDEIGSFYNFNGNFPQTDWSPQSLAQDDTTHMKSLYAATRVTLADPLHLILGARYTNWRVDTLTYSMEKNHTTPYAGLVFDINDNWSTYASYTSIFQPQNDRDSSGKYLAPITGNNYELGLKSDWMNSRLTTTLAIFRIEQDNVAQSTGTPIPGSNGETAYKAVDGTVSKGVEFELNGAITDNWQLTFGATRYIAEDNEGNAVNPNLPRTTVKMFTSYRLPVMPELTVGGGVNWQNRVYTDTVTPYGTFRAEQGSYALVDLFTRYQVTKNFSLQGNVNNLFDKTYDTNVEGSIVYGTPRNFSITGTYQF

SEQ ID NO: 3215 - protein, 646 aa, Escherichia coli
MRLATPRINLSESLTGVPGLQVQNRQNYAQDLQLSIRGFGSRSTYGIRGIRLYVDGIPATMPDGQGQTSNIDLSSVQNVEVLRGPFSALYGNASGGVMNVTTQTGQQPPTIEASSYYGSFGSWRYGLKATGATGDGTQPGDVDYTVSTTRFTTHGYRDHSGTQKNLANAKLGVRIDEASKLSLIFNSVDIKADDPGGLTKAEWKANPQQAPRAEQYDTRKTIKQTQAGLRYERSLSSRDDMSVMMYAGERETTQYQSIPMAPQLNPSHAGGVITLQRHYQGIDSRWTHRGELGVPVTFTTGLNYENMSENCKGYNNFRLNSGMPEYGQKGELRRDERNLMWNIDPYLQTQWQLSEKLSLDAGVRYSSVWFDSNDHYVTPGNGDDSGDASYHKWLPAGSLKYAMTDAWNIYLAAGRGFETPTINELSYRADGQSGMNLGLKPSTNDTIEIGSKTRIGDGLLSLALFQTDTDDEIVVDSSSGGRTTYKNAGKTRRQGAELAWDQRFAGDFRVNASWTWLDATYRSNVCNEQDCNGNRMPGIARNMGFASIGYVPEDGWYAGTEARYMGDIMADDENTAKAPSYTLVGLFTGYKYNYHNLTVDLFGRVDNLFDKEYVGSVIVNESNGRYYEPSPGRNYGVGMNIAWRFE

SEQ ID NO: 3216 - protein, 650 aa, Escherichia coli
MKGLNKITCCLLAALLMPCAGHAENEQYGANFNNADIHQFVEIVGQHLGKTILIDPSVQGTISVRSNDTFSQQEYYQFFLSILDLYGYSVITLDNGFLKVVRSANVKTSPGMIADSSRPGVGDELVTRIVPLENVPARDLASLLRQMMDAGSVGNVVHYEPSNVLILTGRASTINKLIEVIKRVDVIGTEKQQIIHLEYASAEDLAEILNQLISESHGKSQMPALLSAKIVADKRTNSLIISGPEKARQRITSLLKSLDVEESEEGNTRVYYLKYAKATNLVEVLTGVSEKLKDEKGNARKPSSSGAMDNVAITADEQTNSLVITADQSVQEKLATVIARLDIRRAQVLVEAIIVEVQDGNGLNLGVQWANKNVGAQQFTNTGLPIFNAAQGVADYKKNGGITSANPAWDMFSAYNGMAAGFFNGDWGVLLTALASNNKNDILATPSIVTLDNKLASFNVGQDVPVLSGSQTTSGDNVFNTVERKTVGTKLKVTPQVNEGDAVLLEIEQEVSSVDSSSNSTLGPTFNTRTIQNAVLVKTGETVVLGGLLDDFSKEQVSKVPLLGDIPLVGQLFRYTSTERAKRNLMVFIRPTIIRDDDVYRSLSKEKYTRYRQEQQQRIDGKSKALVGSEDLPVLDENTFNSHAPAPSSR

SEQ ID NO: 3217 - protein, 118 aa, Escherichia coli [sequence omitted]

SEQ ID NO: 3218 - protein, 784 aa, Escherichia coli; identical to SEQ ID NO: 2244

SEQ ID NO: 3219 - protein, 170 aa, Escherichia coli [sequence omitted]

SEQ ID NO: 3220 - protein, 395 aa, Escherichia coli
MKRKVLAMLVPALLVAGAANAAEVYNKDGNKLDLYGKVAGLHYFSDDASSDGDMSYARIGFKGETQIADQFTGYGQWEFNIGANGPESDKGNTATRLAFAGFGFGQNGTFDYGRNYSVVYDVEAWTDMLPEFGGDTYAGADNFMNGRANSVATYRNNGFFGQVDGLNFALQYQGNNEKSGLFDQEGSGNGNGRKLAKENGDGYGMSTSYDFDFGLSLGAAYSNSDRTDNQVHKGTHNTRYGDRFDATAGGETAEAWTVGAKYDANNVYLAAMYAETRNMTGYGDADAIANKTQNFEVVAQYQFDFGLRPSIAYLQSKGKDLGGLNGDNFDSQGNHHYANKDLVKYVEVGATYYFNKNMSTYVDYKINLLDNDDDFYKENGIATDDIVAVGLVYQF

SEQ ID NO: 3221 - protein, 208 aa, Escherichia coli; identical to SEQ ID NO: 1949

SEQ ID NO: 3222 - protein, 230 aa, Escherichia coli
MAFSSSSIADIVISGTRVIYKSDQKSVNVRLENKGNNPLLVQSWLDTGDDNAEPGSITVPFTATPPVSRIDAKRGQTIKLMYTASTSLPKDRESVFWFNVLEVPPKPDAEKVANQSLLQLAFRTRIKLFYRPDGLKGNPSEAPLALKWFWSGSEGKASLRVTNPTPYYVSFSSGDLEASGKRYPIDVKMIAPFSDEVMKVNGLNGKANSAKVHFYAINDFGGAIEGNARL

SEQ ID NO: 3223 - protein, 351 aa, Escherichia coli; identical to SEQ ID NO: 2519

SEQ ID NO: 3224 - protein, 237 aa, Escherichia coli; identical to SEQ ID NO: 1814

SEQ ID NO: 3225 - protein, 242 aa, Escherichia coli
MTFIKGLPLMLLTISLGCNAVVQPDRTRIVFNANDKATSLRIENQSDKLPYLAYSWIENEKGEKSDALLVALPPIQRLEPKATSQVRVVKQASTTQLPGDRETLFFYNMREIPPAPDKSSDHAILQVAIQSRIKLFWRPAALRKKAGEKVELQLQVSQQGNQLTLKNPTAYYLTIAYLGRNEKGVLPGFKTVMVAPFSTVNTNTGSYSGSQFYLGYMDDYGALRMTTLNCSGQCRLQAVEAK

SEQ ID NO: 3226 - protein, 699 aa, Escherichia coli
MSASRSNRTVAEMAQTTWVIENAELEQQIQGGKELKDALAQLIPGLDVSSQSRTNYGMNMRGRPLVVLIDGVRLNSSRSDSRQLDSVDPFNIDHIEVISGATALYGGGSTGGLINIVTKKGQPETMMEFEAGTKSGFNSSKDHDERIAGAVSGGNDHISGRLSVAYQKFGGWFGGNGDATLLDNTQTGLQHSNRLDIMGTGTLNIDESRQLQLITQYYKSQGDDNYGLNLGKGFSAISGSSTPYVSKGLNSDRIPGTERHLISLQYSDSDFLRQELVGQVYYRDESLRFYPFPTVNANKQATAFSSSQQDTDQYGMKLTLNSQLMDGWQITWGLDAEHERFTSNQMFFDLAQASASGGLNNHKIYTTGRYPSYDITNLAAFLQSSYDINDIFTVSGGVRYQYTENRVDDFIDYTQQQKIAAGKAISADAIPGGSVDYDNFLFNAGLLMHITERQQAWFNFSQGVALPDPGKYYGRGIYGAAVNGHLPLTKSVNVSDSKLEGVKVDSYELGWRFTGDNLRTQIAAYYSLSNKSVERNKDLTISVKDDRRRIYGVEGAVDYLIPDTDWSTGVNFNVLKTESKVNGQWQKYDVKESSPSKATAYISWAPEPWSLRVQSTTSFDVSDAEGNDINGYTTVDFISSWLLPVGTLSFSVENLFDRDYTTVWGQRAPLYYSPGYGPASLYDYKGRGRTFGLNYSVLF

SEQ ID NO: 3227 - protein, 738 aa, Escherichia coli
MPGEYSLIVSVNGEKKGNIATRFDENGDICLDQAFLQQAGLKIPSEEKNGCYDYILSYPGTTITPLPNQEALDIIVSPQAIIPIGLDLTNAATGGTAALLNYSLMSSRAEFSNGSSDYSQAALEGGININDWMLRSHQFLTQTNGTFSNQNSSTYLQRTFTDLKTLMRAGEVNLNNSVLEGASIYGIEIAPDNALQTSGSGVQVTGIANTSQARVEIRQQGVLIHSILVPAGAFTIPDVPVRNGNSDLNVTVVETDGSSHNYIVPSTLFNQHVESFQGYRFAIGRVDDDYDESPWVISASSGWNLTRWSAMNGGVIVAENYQAASIRSSLVPLPDLTVSSQISTSQDTKDSLQGQKYRLDANYNLPFSLGLTTSLTRSDRHYRELSEAIDDDYTDPTKSTYALGLNWSNSILGGFNISGYKTYSYDGDNDSSNLNINWNKAFKHATVSVNWQHQLSASENNEDDGDLFYVNISIPFGRSNTATLYTRHDDHKTHYGTGVMGVVSDEMSYYVNAERDHDERETSLNGSISSNLHYTQVSLAAGASGSDSRTYNGTMSGGIAVHDQGVTFSPWTINDTFAIAKMDNNIAGVRITSQAGPVWTDFRGNAVIPSIQPWRTSGVEIDTASLPKNVDIGNGTKMIKQGRGAVGKVGFSAITQRRALLNITLSDGKKLPRGVAIEDSEGNYLTTSVDDGVVFLNNIKPDMVLDIKDEQQSCRIHLTFPEDAPKDVFYETATGECQ

SEQ ID NO: 3228 - protein, 210 aa, Escherichia coli
MSRYALITALAMFLAGCVGQREPAPVEEVKPAPEQPAEPQQPVPTVPSVPTIPQQPGPIEHEDQTAPPAPHIRHYDWNGAMQPMVSKMLGADGVTAGSVLLVDSVNNRTNGSLNAAEATETLRNALANNGKFTLVSAQQLSMAKQQLGLSPQDSLGTRSKAIGIARNVGAHYVLYSSASGNVNAPTLQMQLMLVQTGEIIWSGKGAVSQQ

SEQ ID NO: 3229 - protein, 361 aa, Escherichia coli; identical to SEQ ID NO: 3061

SEQ ID NO: 3230 - protein, 747 aa, Escherichia coli; identical to SEQ ID NO: 2072

SEQ ID NO: 3231 - protein, 669 aa, Escherichia coli
MIVSASGYEKKLTNAAASVSVISQEELQSSQYHDLAEALRSVEGVDVESGTGKTGGLEISIRGMPASYTLILIDGVRQGGSSDVTPNGFSAMNTGFMPPLAAIERIEVIRGPMSTLYGSDAMGGVVNIITRKNADKWLSSVNAGLNLQESNKWGNSSQFNFWSSGPLVDDSVSLQVRGSTQQRQGSSVTSLSDTAATRIPYPTESQNYNLGARLDWKASEQDVLWFDMDTTRQRYDNRDGQLGSLTGGYDRTLRYERNKISAGYDHTFTFGTWKSYLNWNETENKGRELVRSVLKRDKWGLAGQPRELKESNLILNSLLLTPLGESHLVTVGGEFQSSSMKDGVVLASTGETFRQKSWSVFAEDEWHLTDALALTAGSRYEHHEQFGGHFSPRAYLVWDVADAWTLKGGVTTGYKAPRMGQLHKGISGVSGQGKTNLLGNPDLKPEESVSYEAGVYYDNPAGLNANVTGFMTDFSNKIVSYSINDNTNSYVNSGKARLHGVEFAGTLPLWSEDVTLSLNYTWTRSEQRDGDNKGAPLSYTPEHMVNAKLNWQITEEVASWLGGRYRGKTPRFTQNYSSLSAVQKKVYDEKGEYLKAWTVVDAGLSWKMTDALTLNAAVNNLLNKDYSDVSLYSAGKSTLYAGDYFQTGSSTTGYVIPERNYWMSLNYQF

SEQ ID NO: 3232 - protein, 432 aa, Escherichia coli; identical to SEQ ID NO: 2026

SEQ ID NO: 3233 - protein, 696 aa, Escherichia coli
MQLSISAPQAWLKYKDANWTPPELWNHGIAGAFLDYNLYASHYAPHQGDNSQNISSYGQAGVNLGAWRLRTDYQYDQSFNNGKSQATNLDFPRIYLFRPIPAMNAKLTIGQYDTESSIFDSFHFSGISLKSDENMLPPDLRGYAPQITGVAQTNAKVTVSQNNRIIYQENVPPGPFAITNLFNTLQGQLDVKVEEEDGRVTQWQVASNSIPYLTRKGQIRYTTAMGKPTSVGGDSLQQPFFWTGEFSWGWLNNVSLYGGSVLTNRDYQSLAAGVGFNLNSLGSLSFDVTRSDAQLHNQDKETGYSYRANYSKRFESTGSQLTFAGYRFSDKNFVTMNEYINDTNHYTNYQNEKESYIVTFNQYLESLRLNTYVSLARNTYWDASSNVNYSLSLSRDFDIGPLKNVSTSLTFSRINWEEDNQDQLYLNISIPWGTSRTLSYGMQRNQDNEISHTASWYDSSDRNNSWSVSASGDNDEFKDMKASLRASYQHNTENGRLYLSGTSQRDSYYSLNASWNGSFTATRHGAAFHDYSGSADSRFMIDADGTEDIPLNNKRAVTNRYGIGVIPSVSSYITTSLSVDTRNLPENVDIENSVITTTLTEGAIGYAKLDTRKGYQIIGVIRLADGSHPPLGISVKDETSHKELGLVADGGFVYLNGIQDDNKLALRWGDKSCFIQPPNSSNLTTGTAILPCISQN

SEQ ID NO: 3234 - protein, 856 aa, Escherichia coli
MAGFFVRLFVACAFAAQAPLSSAELYFNPRFLADDPQAVADLSRFENGQELPPGTYRVDIYLNNGYMATRDVTFNTGDSEQGIVPCLTRAQLASMGLNTASVAGMNLLADDACVPLTTMVQDATAHLDVGQQRLNLTIPQAFMSNRARGYIPPELWDPGINAGLLNYNFSGNSVQNRIGGNSHYAYLNLQSGLNIGAWRLRDNTTWSYNSSDRSSGSKNKWQHINTWLERDIIPLRSRLTLGDGYTQGDIFDGINFRGAQLASDDNMLPDSQRGFAPVIHGIARGTAQVTIKQNGYDIYNSTVPPGPFTINDIYAAGNSGDLQVTIKEADGSTQIFTVPYSSVPLLQREGHTRYSITAGEYRSGNAQQEKPRFFQSTLLHGLPAGWTIYGGTQLADRYRAFNFGIGKNMGALGALSVDMTQANSTLPDDSQHDGQSVRFLYNKSLNESGTNIQLVGYRYSTSGYFNFADTTYSRMNGYNIETQDGVIQVKPKFTDYYNLAYNKRGKLQLTVTQQLGRTSTLYLSGSHQTYWGTSNVDEQFQAGLNTAFEDINWTLSYSLTKNAWQKGRDQMLALNVNIPFSHWLRSDSKSQWRHASASYSMSHDLNGRMTNLAGVYGTLLEDNNLSYSVQTGYAGGGDGNSGSTGYATLNYRGGYGNANIGYSHSDDIKQLYYGVSGGVLAHANGVTLGQPLNDTVVLVKAPGAKDAKVENQTGVRTDWRGYAVLPYATEYRENRVALDTNTLADNVDLDNAVANVVPTRGAIVRAEFKARVGIKLLMTLTHNNKPLPFGAMVTSESSQSSGIVADNGQVYLSGMPLAGKVQVKWGEEENAHCVANYQLPPESQQQLLTQLSAECR

SEQ ID NO: 3235 - protein, 897 aa, Escherichia coli; identical to SEQ ID NO: 1908

SEQ ID NO: 3236 - protein, 125 aa, Escherichia coli
MRYLNTKNIIAAGVLLSCMSSIAWGAIIPDRTRIIMNESDKGEALKLTNQSKNLPYLAQTWIEDTKGNKSRDFIVTVPPMVRLNPSEQIQIRMITQEKIAQLPKDRETLFYFNVREIPPKTDKKM

SEQ ID NO: 3237 - protein, 377 aa, Escherichia coli
MRGYGYDNRTNYDAYYSPGSPLLDTRKLYSQSWDAGLRYNGELIKSQLITSYSHSKDYNYDPHYGRYDSSATLDEMKQYTVQWANNVIVGHGSIGAGVDWQKQTTTPGTGYVEDGYDQRNTGIYLTGLQQVGDFTFEGAARSDDNSQFGRHGTWQTSAGWEFIEGYRFIASYGTSYKAPNLGQLYGFYGNPNLDPEKSKQWEGAFEGLTAGVNWRISGYRNDVSDLIDYDDHTLKYYNEGKARIKGVEATANFDTGPLTHTVSYDYVDARNAITDTPLLRRAKQQVKYQLDWQLYDFDWGITYQYLGTRYDKDYSSYPYQTVKMGGVSLWDLAVAYPVTSHLTVRGKIANLFDKDYETVYGYQTAGREYTLSGSYTF

SEQ ID NO: 3238 - protein, 815 aa, Escherichia coli; identical to SEQ ID NO: 2698

SEQ ID NO: 3239 - protein, 224 aa, Escherichia coli; identical to SEQ ID NO: 3115

SEQ ID NO: 3240 - protein, 128 aa, Escherichia coli
MDRETLFELSIASVPSGKVENQSVKVAMRSVFKLFWRPEGLPGDPLEAYQQLRWTRNSQGVQLTNPTPYYINLIQVSVNGKALSNVGVVPPKSQRQTSWCQAIAPCHVAWRAINDYGGLSAKKEQNLP

SEQ ID NO: 3241 - protein, 865 aa, Escherichia coli; identical to SEQ ID NO: 2167

SEQ ID NO: 3242 - protein, 161 aa, Escherichia coli; identical to SEQ ID NO: 2582

SEQ ID NO: 3243 - protein, 331 aa, Escherichia coli; identical to SEQ ID NO: 2705

SEQ ID NO: 3244 - protein, 184 aa, Escherichia coli
MAVGQNAVGTDLYQWDNVPKAVVEGLEGSLNVPVSETVMWTNNITYMLKSENKTTGDRLSIIPEYTLNSTLSWQAREDLSMQTTFTWYGKQQPKKYNYKGQPAVGPETKEISPYSIVGLSATWDVTKNVSLTGGVDNLFDKRLWRAGNAQTTGDLAGANYIAGAGAYTYNEPGRTWYMSVNTHF

SEQ ID NO: 3245 - protein, 111 aa, Escherichia coli; identical to SEQ ID NO: 3153

SEQ ID NO: 3246 - protein, 162 aa, Escherichia coli; identical to SEQ ID NO: 1973

SEQ ID NO: 3247 - protein, 224 aa, Escherichia coli
MLAGILMFMAMMVAGRAEAGVALGATRVIYPAGQKQVQLAVTNNDENSTYLIQSWVENADGVKDGRFIVTPPLFAMKGKKENTLRILDATNNQLPQDRESLFWMNVKAIPSMDKSKLTENTLQLAIISRIKLYYRPAKLALPPDQAAEKLRFRRSANSLTLINPTPYYLTVTELNAGTRVLENALVPPMGESTVKLPSDAGSNITYRTINDYGALTPKMTGVME

SEQ ID NO: 3248 - protein, 591 aa, Escherichia coli
MPSFIGGLVVFVSAAFNAQAETWFDPAFFKDDPSMVADLSRFEKGRKITPGVYRVDIVLNQTIVDTRNVNFVEITPEKGIAACLTTESLDAMGVNTDAFPAFKQLDKQACVPLAEIIPDASVTFNVNKLRLEISVPQIAIKSNARGYVPPERWDEGINALLLGYSFSGANSIHSSADSDSGDSYFLNLNSGVNLGPWRLRNNSTWSRSSGQTAEWKNLSSYLQRAVIPLKGELTVGDDYTAGDFFDSVSFRGVQLASDDNMLPDSLKGFAPVVRGIAKSNAQITIKQNGYTIYQTYVSPGAFEISDLYSTSSSGDLLVEIKEADGSVNSYSVPFSSVPLLQRQGRIKYAVTLAKYRTNSNEQQESKFAQATLQWGGPWGTTWYGGGQYAEYYRAAMFGLGFNLGDFGAISFDATQAKSTLADQSEHKGQSYRFLYAKTLNHLGTNFQLMGYRYSTSGFYTLSDTMYKHMDGYEFNDGDDEDTPMWSRYYNLFYTKRGKLQVNISQQLGEYGSFYLSGSQQTYWHTDQQDRLLQFGYNTQIKDLSLGISWNYSKSRGQPDADQVFALNFSLPLNLLLPRSNDSYTRKKITPG

SEQ ID NO: 3249 - protein, 266 aa, Escherichia coli; identical to SEQ ID NO: 1894

SEQ ID NO: 3250 - protein, 673 aa, Escherichia coli; identical to SEQ ID NO: 2919

SEQ ID NO: 3251 - protein, 430 aa, Escherichia coli; identical to SEQ ID NO: 2617

SEQ ID NO: 3252 - protein, 266 aa, Escherichia coli; identical to SEQ ID NO: 1894

SEQ ID NO: 3253 - protein, 368 aa, Escherichia coli
MNKTITALAIMMASFAANASVLPETLVPFKSGTGAIDNDTVYIGLGSAGTAWYKLDTQAKDKKWKALAAFPGGPRDQATSAFIDGNLYVFGGIGKNSEGLTQVFNDVHKYNPKTNSWVKLMSHAPMGMAGHVTFVHNGKAYVTGGVNQNIFNGYFEDLNEAGKDSTAIDKINAHYFDKKAEDYFFNKFLLSFDPSTQQWSYAGESPWYGTAGAAVVNKGDKTWLINGEAKPGLRTDAVFELDFTGNNLKWNKLAPVSSPDGVAGGFAGISNDSLIFAGGAGFKGSRENYQNGKNYAHEGLKKSYSTDIHLWHNGKWDKSGELSQGRAYGVSLPWNNSLLIIGGETAGGKAVTDSVLISVKDNKVTVQN

SEQ ID NO: 3254 - protein, 250 aa, Escherichia coli; identical to SEQ ID NO: 2761

SEQ ID NO: 3255 - protein, 367 aa, Escherichia coli
MKVKVLSLLVPALLVAGAANAAEVYNKDGNKLDLYGKVDGLHYFSDNKDVDGDQTYMRLGFKGETQVTDQLTGYGQWEYQIQGNSAENENNSWTRVAFAGLKFQDVGSFDYGRNYGVVYDVTSWTDVLPEFGGDTYGSDNFMQQRGNGFATYRNTDFFGLVDGLNFAVQYQGKNGNPSGEDFTSGVTNNGRDALRQNGDGVGGSITYDYEGFGIGGAISSSKRTDAQNTAAYIGNGDRAETYTGGLKYDANNIYLAAQYTQTYNATRVGSLGWANKAQNFEAVAQYQFDFGLRPSLAYLQSKGKNLGRGYDDEDILKYVDVGATYYFNKNMSTYVDYKINLLDDNQFTRDAGINTDNIVALGLVYQF

SEQ ID NO: 3256 - protein, 826 aa, Escherichia coli
MLRMTPLASAIVALLLGIEAYAAEETFDTHFMIGGMKDQQVANIRLDDNQPLPGQYDIDIYVNKQWRGKYEIIVKDNPQETCLSIEVIKRLGINSDNFASGKQCLTFEQLVQGGSYTWDIGVFRLDFSVPQAWVEELESGYVPPENWERGINAFYTSYYVSQYYSDYKASGNSKSTYVRFNSGLNLLGWQLHSDASFSKTNNNPGVWKSNTLYLERGFAQLLGTLRVGDMYTSSDIFDSVRFSGVRLFRDMQMLPNSKQNFTPRVQGIAQSNALVTIEQNGFVVYQKEVPPGPFAITDLQLAGGGADLDVSVKEADGSVTTYLVPYAAVPNMLQPGVSKYDFAAGRSHIEGASKQSDFVQAGYQYGFNNLLTLYGGSMVANNYYAFTLGTGWNTRIGAISVDATKSHSKQDNGDVFDGQSYQIAYNKFVSQTSTRFGLAAWRYSSRDYRTFNDHVWANNKDNYRRDENDVYDIADYYQNDFGRKNSFSANMSQSLPEGWGSVSLSTLWRDYWGRSGSSKDYQLSYSNNWRRISYILAASQAYDENHHEEKRFNIFISIPFDWGDDVTTPRRQIYMSNSTTFDDQGFASNNTGLSGTVGSRDQFNYGVNLSYQNQGNETTAGANLTWNAPVATVNGSYSQSSTYRQAGASVSGGIVAWSGGVNLANRLSETFAVMNAPGIKDAYVNGQKYRTTNRNGVVVYDGMTPYRENHLMLDVSQSDSEAELRGNRKIAAPYRGAVVLVNFDTDQRKPWFIKELRADGQPLMFGYEVNDIHGHNIGVVGQGSQLFIRTNEVPPSVNVAIDKQQGLSCTITFGKEIDESRNYICQ

SEQ ID NO: 3257 - protein, 207 aa, Escherichia coli; identical to SEQ ID NO: 2211

SEQ ID NO: 3258 - protein, 519 aa, Escherichia coli
MTVKISGVLKDGTGKPVQNCTIQLKAKRNSTTVVANTVASENPDEAGRYSMDVEYGQYSVILLVEGFPPSHAGTITVYEDSQPGTLNDFLGAMTEDDARPEALRRFELMVEEVVRNAEEAKKNAGEAETSARNAGISASQAEESAENADTSAGDASESARQAAESAASAKQSEEASSSSASAAAQKASESLQSATDAELSKKTAESAAGNAVRDATTATEKARESAESAQSAEQSRIAAEEAVNRIPTVVGPPGPKGEPGPAGPQGPKGDKGERGDTGPAGATGERGPAGDAGPAGPQGPKGDRGETGLTGNAGPQGAKGDTGAAGPAGAQGPKGDKGDPGVAGPAGPAGAPGPKGDKGDPGVAGPAGPAGPQGPKGDTGAPGQGTELLTTANTWTQAQTFNGGINGNLTVTGNGSFNDIQIRSDKRNKRNLVKLDNALDRLEALTGYLYEIQYSADGWQTSVGLIAQDAQKALPELVTEDADVISGEKRLRLNYNGIIALLVEGFKTLRHEIKELREK

SEQ ID NO: 3259 - protein, 539 aa, Escherichia coli; identical to SEQ ID NO: 3146

SEQ ID NO: 3260 - protein, 374 aa, Escherichia coli
MTVALSAVAAAVIFAAGAQAAEVYNKDSNKLDLYGRVTALHYFSSDKGNDGDRTYARLGFKGETQINDQLTGFGQWEYQFSGNKTESDGAAGNKTRLAFAGLKFGDFGSIDYGRNYGIAYDVGAYTDVLPEFGGDGWTQTDNFMTARTSGVATYRNTDFFGLVDGLNFAAQYQGKNERDDLQEANGDGYGFSASYEYEGFGIVAAYTNADRTNNQVKGLNGTQTVNGTQTVVDSGSVAKGKHAEMWGTGLKYDANNIYLATIYSETQNMTTFGDKGVADKAQNFEAVLQYQFDFGLRPSLAFLQSRAQDIIVGGKNYGNQDLVKYIDVGTTYYFNKNMSTYVDYKINLIDESQFTQDAGVATDNIVAVGMTYQF

SEQ ID NO: 3261 - protein, 445 aa, Escherichia coli
MITLRKLPLAVAVAAGVMSAQAMAVDFHGYARSGIGWTGSGGEQQCFQTTGAQSKYRLGNECETYAELKLGQEVWKEGDKSFYFDTNVAYSVAQQNDWEATDPAFREANVQGKNLIEWLPGSTIWAGKRFYQRHDVHMIDFYYWDISGPGAGLENIDVGFGKLSLAATRSSEAGGSSSFASNNIYDYTNETANDVFDVRLAQMEINPGGTLELGVDYGRANLRDNYRLVDGASKDGWLFTAEHTQSVLKGFNKFVVQYATDSMTSQGKGLSQGSGVAFDNEKFAYNINNNGHMLRILDHGAISMGDNWDMMYVGMYQDINWDNDNGTKWWTVGIRPMYKWTPIMSTVMEIGYDNVESQRTGDKNNQYKITLAQQWQAGDSIWSRPAIRVFATYAKWDEKWGYDYTGNADNNANFGKAVPADFNGGSFGRGDSDEWTFGAQMEIWW

SEQ ID NO: 3262 - protein, 517 aa, Escherichia coli
MKHKLQMMKMRWLSAAVMLTLYTSSSWAFSIDDVAKQAQSLAGKGYETPKSNLPSVFRDMKYADYQQILFNHDKAYWNNLKTPFKLEFYHQGMYFDTPVKINEVTATAVKRIKYSPDYFTFGDVQHDKDTVKDLGFAGFKVLYPINSKDKNDEIVSMLGASYFRVIGAGQVYGLSARGLAIDTALPSGEEFPRFKEFWIERPKPTDKRLTIYALLDSPRATGAYKFVVMPGRDTVVDVQSKIYLRDKVGKLGVAPLTSMFLFGPNQPSPANNYRPELHDSNGLSIHAGNGEWIWRPLNNPKHLAVSSFSMENPQGFGLLQRGRDFSRFEDLDDRYDLRPSAWVTPKGEWGKGSVELVEIPTNDETNDNIVAYWTPDQLPEPGKEMNFKYTITFSRDEDKLHAPDNAWVQQTRRSTGDVKQSNLIRQPDGTIAFVVDFTGAEMKKLPEDTPVTAQTSIGDNGEIVESTVRYNPVTKGWRLVMRVKVKDAKKTTEMRAALVNADQTLSETWSYQLPANE

SEQ ID NO: 3263 - protein, 548 aa, Escherichia coli
MNKKIHSLALLVNLGIYGVAQAQEPTDTPVSHDDTIVVTAAEQNLQAPGVSTITADEIRKNPVARDVSEIIRTMPGVNLTGNSTSGQRGNNRQIDIRGMGPENTLILIDGKPVSSRNSVRQGWRGERDTRGDTSWVPPEMIERIEVLRGPAAARYGNGAAGGVVNIITKKGSGEWHGSWDAYFNAPEHKEEGATKRTNFSLTGPLGDEFSFRLYGNLDKTQADAWDINQGHQSARAGTYATTLPAGREGVINKDINGVVRWDFAPLQSLELEAGYSRQGNLYAGDTQNTNSDSYTRSKYGDETNRLYRQNYALTWNGGWDNGVTTSNWVQYEHTRNSRIPEGLAGGTEGKFNEKATQDFVDIDLDDVMLHSEVNLPIDFLVNQTLTLGTEWNQQRMKDLSSNTQALTGTNTGGAIDGVSTTDRSPYSKAEIFSLFAENNMELTDSTIVTPGLRFDHHSIVGNNWSPALNISQGLGDDFTLKMGIARAYKAPSLYQTNPNYILYSKGQGCYASAGGCYLQGNDDLKAETSINKEIGLEFKRDGWLAGVT

SEQ ID NO: 3264 - protein, 341 aa, Escherichia coli
MPLTAINQFLTVGGEWRHDKLSDAVNLTGGTSSKTSASQYALFVEDEWRIFEPLALTTGVRMDDHETYGEHWSPRAYLVYNATDTVTVKGGWATAFKAPSLLQLSPDWTSNSCRGACKIVGSPDLKPETSESWELGLYYMGEEGWLEGVESSVTVFRNDVKDRISISRTSDVNAAPGYQNFVGFETGANGRRIPVFSYYNVNKARIQGVETELKIPFNDEWKLSINYTYNDGRDVSNGENKPLSDLPFHTANGTLDWKPLALEDWSFYVSGHYTGQKRADSATAKTPGGYTIWNTGAAWQVTKDVKLRAGVLNLGDKDLSRDDYSYNEDGRRYFMAVDYRF

SEQ ID NO: 3265 - protein, 721 aa, Escherichia coli
MDEIPALAEKDDDSVINSLEQIIPGTAAEFDFNHQQLNLSIPQIALYRDARGYVSPSRWDDGIPTLFTNYSFTGSDNRYRQGNRSQRQYLNMQNGANFGPWRLRNYSTWTRNDQTSSWNTISSYLQRDIKALKSQLLLGESATSGSIFSSYTFTGVQLASDDNMLPNSQRGFAPTVRGIANSSAIVTIRQNGYVIYQSNVSAGAFEINDLYPSSNSGDLEVTIEESDGTQRRFIQPYSSLPMMQRPGHLKYSATAGRYRADANSDSKEPEFAEATAIYGLNNTFTLYGGLLGSEDYYALGIGIGGTLGALGALSMDINRADTQFDNQHSFHGYQWRTQYIKDIPETNTNIAVSYYRYTNDGYFSFNEANTRNWDYNSRQKSEIQFNISQTIFDGVSLYASGSQQDYWGNNDKNRNISVGVSGQQWGVGYSLNYQYSRYTDQNNDRALSLNLSIPLERWLPRSRVSYQMTSQKDRPTQHEMRLDGSLLDDGRLSYSLEQSLDDDNNHNSSLNASYRSPYGTFSAGYSYGNDSSQYNYGVTGGVVIHPHGVTLSQYLGNAFALIDANGASGVRIQNYPGIATDPFGYAVVPYLTTYQENRLSVDTTQLPDNVDLEQTTQFVVPNRGAMVAARFNANIGYRVLVTVSDRNGKPLPFGALASNDDTGQQSIVDEGGILYLSGISSKSQSWTVRWGNQADQQCQFAFSTPDSEPTTSVLQGTAQCH

SEQ ID NO: 3266 - protein, 823 aa, Escherichia coli
MTPLASAIVALLFGIEAYAAEETFDTHFMIGGMKDQQVANIRLDDNQPLPGQYDIDIYVNKQWRGKYEIIVKDNPQETCLSREVIKRLGINSDNFASGKQCLTFEQLVQGGSYTWDIGVFRLDFSVPQAWVEELESGYVPPENWERGINAFYTSYYVSQYYSDYKASGNSKSTYVRFNSGLNLLGWQLHSDASFSKTNNNPGVWKSNTLYLERGFAQLLGTLRVGDMYTSSDIFDSVRFRGVRLFRDMQMLPNSKQNFTPRVQGIAQSNALVTIEQNGFVVYQKEVPPGPFAITDLQLAGGGADLDVSVKEADGSVTTYLVPYAAVPNMLQPGVSKYDFAAGRSHIEGASKHSDFVQAGYQYGFNNLLTLYGGSMVANNYYAFTLGTGWNTRIGAISVDATKSHSKQDNGDVFDGQSYQIAYNKFVSQTSTRFGLAAWRYSSRDYRTFNDHVWANNKDNYRRDENDVYDIADYYQNDFGRKNSFSANMSQSLPEGWGSVSLSTLWRDYWGRSGSSKDYQLSYSNNLRRISYTLAASQAYDENHHEEKRFNIFISIPFDWGDDVSTPRRQIYMSNSTTFDDQGFASNNTGLSGTVGSRDQFNYGVNLSHQHQGNETTAGANLTWNAPVATVNGSYSQSSTYRQAGASVSGGIVAWSGGVNLANRLSETFAVMNAPGIKDAYVNGQKYRTTNRNGVVVYDGMTPYRENHLMLDVSQSDSEAELRGNRKIAAPYRGAVVLVNFDTDQRKPWFIKALRADGQPLMFGYEVNDIHGHNIGVVGQGSQLFIRTNEIPPSVNVAIDKQKGLSCTITFGKEIDESRNYICQ

SEQ ID NO: 3267 - protein, 386 aa, Escherichia coli; identical to SEQ ID NO: 3072

SEQ ID NO: 3268 - protein, 224 aa, Escherichia coli; identical to SEQ ID NO: 3035

SEQ ID NO: 3269 - protein, 170 aa, Escherichia coli [sequence omitted]

SEQ ID NO: 3270 - protein, 249 aa, Escherichia coli; identical to SEQ ID NO: 3028

SEQ ID NO: 3271 - protein, 774 aa, Escherichia coli; identical to SEQ ID NO: 3018

SEQ ID NO: 3272 - protein, 230 aa, Escherichia coli; identical to SEQ ID NO: 3019

SEQ ID NO: 3273 - protein, 430 aa, Escherichia coli; identical to SEQ ID NO: 2617

SEQ ID NO: 3274 - protein, 231 aa, Escherichia coli; identical to SEQ ID NO: 3055

SEQ ID NO: 3275 - protein, 203 aa, Escherichia coli; identical to SEQ ID NO: 2201

SEQ ID NO: 3276 - protein, 233 aa, Escherichia coli
MKTCITKGIVTVSLTAILLSCSSAWAAGKGGIGLAATRLVYSEGEEQISLGVRNTSPDVPYLIQSWVMTPDNKKSADFIITPPLFVLNPANENLLRIMYIGAPLAKDRETLFFTSVRAVPSTTKREEGNTLKIATQSVIKLFWRPKGLAYPLGEAPAKLRCTSSADMVTVSNPTPYFITLTDLKIGGKVVKNQMISPFDKYQFSLPKGAKNSSVTYRTINDYGAETPQLNCKS

SEQ ID NO: 3277 - protein, 229 aa, Escherichia coli
MALLIFAVLSLLVAGELRAGVVVGGTRFIFPADRESISILLTNTSQESWLINSKINRPTRWAGGEASTVPAPLLAAPPLILLKPGTTGTLRLLRTESDILPVDRETLFELSIASVPSGKVENQSVKVAMRSVFKLFWRPEGLPGDPLEAYQQLRWTRNSQGVQLTNPTPYYINLIQLSVNGKALSNAGVVPPKSQRQTSWCQAIAPCHVAWRAINDYGGLSAKKEQNLP

SEQ ID NO: 3278 - protein, 367 aa, Escherichia coli; identical to SEQ ID NO: 3016

SEQ ID NO: 3279 - protein, 250 aa, Escherichia coli; identical to SEQ ID NO: 3048

SEQ ID NO: 3280 - protein, 747 aa, Escherichia coli; identical to SEQ ID NO: 2072

SEQ ID NO: 3281 - protein, 565 aa, Escherichia coli; identical to SEQ ID NO: 2669

SEQ ID NO: 3282 - protein, 243 aa, Escherichia coli; identical to SEQ ID NO: 2910

SEQ ID NO: 3283 - protein, 232 aa, Escherichia coli; identical to SEQ ID NO: 2087

SEQ ID NO: 3284 - protein, 551 aa, Escherichia coli; identical to SEQ ID NO: 2446

SEQ ID NO: 3285 - protein, 700 aa, Escherichia coli; identical to SEQ ID NO: 3047

SEQ ID NO: 3286 - protein, 236 aa, Escherichia coli
MQTTRTPYSISFMATVLLLLLFACHSTVANAAVALGATRVIYPANQKQVLLPVTNNDPASVYLIQSWIENAGDQKDTQFVITPPLFSMQGKKENTLRIINATNHQLPGDRESLFWVNVKAIPAMEKDQKNENTLQLAIISRIKMFYRPTNLAMAPEEAPAMLRFRRSGSKLTLINPTPYFITVTNMKAGNSNLPNTMVPPKGEVSVDITHAATGDISFQTINDYGALTPRIKATMQ

SEQ ID NO: 3287 - protein, 432 aa, Escherichia coli; identical to SEQ ID NO: 2026

SEQ ID NO: 3288 - protein, 274 aa, Escherichia coli; identical to SEQ ID NO: 2303

SEQ ID NO: 3289 - protein, 359 aa, Escherichia coli; identical to SEQ ID NO: 2328

SEQ ID NO: 3290 - protein, 731 aa, Escherichia coli
MRKKYMPRALGPLLLVVLSPAVAQQNDDNEIIVSASRSNRTVAEMAQTTWVIENAELEQQIQGGKELKDALAQLIPGLDVSSQSRTNYGMNMRGRPLVVLIDGVRLNSSRSDSRQLDSVDPFNIDHIEVISGATALYGGGSTGGLINIVTKKGQPETMMEFEAGTKSGFNSSKDHDERIAGAVSGGNDHISGRLSVAYQKFGGWFDGNGDATLLDNTQTGLQHSNRLDIMGTGTLNIDESRQLQLITQYYKSQGDDNYGLNLGKGFSAISGSSTPYVSKGLNSDRIPGTERHLISLQYSDSDFLGQELVGQVYYRDESLRYYPFPTVNANKQATAFSSSQQDTDQYGMKLTLNSQLMDGWQITWGLDAEHERFTSNQMFFDLAQASASGGLNNHKIYTTGRYPSYDITNLAAFLQSSYDINDIFTVSGGVRYQYTENRVDDFIDYTQQQKIAAGKAISADAIPGGSVDYDNFLFNAGLLMHITERQQAWFNFSQGVALPDPGKYYGRGIYGAAVNGHLSLTKSVNVSDSKLEGVKVDSYELGWRFTGDNLRTQIAAYYSLSNKSVERNKDLTISVKDDRRRIYGVEGAVDYLIPDTDWSTGVNFNVLKTESKVNGQWQKYDVKESSPSKATAYINWAPEPWSLRVQSTTSFDVSDAEGNDINGYTTVDFISSWQLPVGTLSFSVENLFDRDYTTVWGQRAPLYYSPGYGPASLYDYKGRGRTFGLNYSVLF

SEQ ID NO: 3291 - protein, 686 aa, Escherichia coli; identical to SEQ ID NO: 3015

SEQ ID NO: 3292 - protein, 478 aa, Escherichia coli; identical to SEQ ID NO: 2404

SEQ ID NO: 3293 - protein, 237 aa, Escherichia coli; identical to SEQ ID NO: 3022

SEQ ID NO: 3294 - protein, 208 aa, Escherichia coli; identical to SEQ ID NO: 1949

SEQ ID NO: 3295 - protein, 673 aa, Escherichia coli
MKMTRLYPLALGGLLLPAIANAQTSQQDESTLVVTASKQSSRSASANNVSSTVVSAPELSDAGVTASDKLPRVLPGLNIENSGNMLFSTISLRGVSSAQDFYNPAVTLYVDGVPQLSTNTIQALTDVQSVELLRGPQGTLYGKSAQGGIINIVTQQPDSTPRGYIEGGVSSSDSYRSKFNLSGPIEDGLLYGSVTLLRQVDDGDMINPATGSDDLGGTRASIGNVKLRLAPDDQPWEMGFAASRECTRATQDAYVGWNDIKGRKLSISDGSPDPYMRRCTDSQTLSGKYTTDDWVFNLISAWQQQHYSRTFPSGSLIVNMPQRWNQDVQELRAATLGDARTVDMVFGLYRQNTREKLNSAYDMPTMPYLSSTGYTTAETLAAYSDLTWHLTDRFDIGGGVRFSHDKSSTQYHGSMLGNPFGDQGKSNDDQVLGQLSAGYMLTDDWRVYTRVAQGYKPSGYNIVPTAGLDAKPFVAEKSINYELGTRYETADVTLQAATFYTHTKDMQLYSGPVGMQTLSNAGKADATGVELEAKWRFAPGWSWDINGNVIRSEFTNDSELYHGNRVPFVPRYGAGSSVNGVIDTRYGALMPRLAVNLVGPHYFDGDNQLRQGTYATLDSSLGWQATERMNISVYVDNLFDRRYRTYGYMNGSSAVAQVNMGRTVGINTRIDFF

SEQ ID NO: 3296 - protein, 678 aa, Escherichia coli; identical to SEQ ID NO: 3014

SEQ ID NO: 3297 - protein, 118 aa, Escherichia coli [sequence omitted]

SEQ ID NO: 3298 - protein, 203 aa, Escherichia coli; identical to SEQ ID NO: 2009

SEQ ID NO: 3299 - protein, 331 aa, Escherichia coli; identical to SEQ ID NO: 2700

SEQ ID NO: 3300 - protein, 463 aa, Escherichia coli
MKAYGSLAKREKDDPQNSTTTDTGETPRIEGFSSRDGNVEFAWTPNQNHDFTAGYGFDRQDRDSDSLDKNRLERQNYSVSHNGRWDYGTSELKYYGEKVENKNPGNSSPITSESNTVDGKYTLPLTAINQFLTVGGEWRHDKLSDAVNLTGGTSSKTSASQYALFVEDEWRIFEPLALTTGVRMDDHETYGEHWSPRAYLVYNATDTVTVKGGWATAFKAPSLLQLSPDWTSNSCRGACKIVGSPDLKPETSESWELGLYYMGEEGWLEGVESSVTVFRNDVKDRISISRTSDVNAAPGYQNFVGFETGANGRRIPVFSYYNVNKARIQGVETELKIPFNDEWKLSINYTYNDGRDVSNGENKPLSDLPFHTANGTLDWKPLALEDWSFYVSGHYTGQKRADSATAKTPGGYTIWNTGAAWQVTKDVKLRAGVLNLGDKDLSRDDYSYNEDGRRYFMAVDYRF

SEQ ID NO: 3301 - protein, 614 aa, Escherichia coli
MIKKASLLTACSVTAFSAWAQDTSPDTLVVTANRFEQPRSTVLAPTTVVTRQDIDRWQSTSVNDVLRRLPGVDITQNGGSGQLSSIFIRGTNASHVLVLIDGVRLNLAGVSGSADLSQFPIALVQRVEYIRGPRSAVYGSDAIGGVVNIITTRDEPGTEISAGWGSNSYQNYDVSTQQQLGDKTRVTLLGDYAHTHGYDVVAYGNTGTQAQTDNDGFLSKTLYGALEHNFTDAWSGFVRGYGYDNRTNYDAYYSPGSPLLDTRKLYSQSWDAGLRYNGELIKSQLITSYSHSKDYNYDPHYGRYDSSATLDEMKQYTVQWANNVIVGHGSIGAGVDWQKQTTTPGTGYVENGYDQRNTGIYLTGLQQVGDFTFEGAARSDDNSQFGRHGTWQTSAGWEFIEGYRFIASYGTSYKAPNLGQLYGFYGNPNLDPEKSKQWEGAFEGLTAGVNWRISGYRNDVSDLIDYDDHTLKYYNEGKARIKGVEATANFDTGPLTHTVSYDYVDARNAITDTPLLRRAKQQVKYQLDWQLYDFDWGITYQYLGTRYDKDYSSYPYQTVKMGGVSLWDLAVAYPVTSHLTVRGKIANLFDKDYETVYGYQTAGREYTLSGSYTF

SEQ ID NO: 3302 - protein, 228 aa, Escherichia coli; identical to SEQ ID NO: 3034

SEQ ID NO: 3303 - protein, 236 aa, Escherichia coli
MKIRRIVSTIAIALSVFTFAHAQSFENVENNAKVFSLHLGATRMLYKPNSSGETLAVINEHNYPILVQANVLSEDQKNIAPFIITPPLFRLDALQSSRLRIVKTEGAFPIDRESLQWICVKAIPPKYEDKWAKEEVSGKKSDEATMNIQVSVSSCIKLFVRPADVKGQPDDVAGKIKWQKVGNKLKGVNPTPFYMDIAELRVGEKEITETHYIAPFSSYEYPMPVNGGGRPMESGD

SEQ ID NO: 3304 - protein, 162 aa, Escherichia coli; identical to SEQ ID NO: 1965

SEQ ID NO: 3305 - protein, 746 aa, Escherichia coli; identical to SEQ ID NO: 3031

SEQ ID NO: 3306 - protein, 729 aa, Escherichia coli; identical to SEQ ID NO: 3052

SEQ ID NO: 3307 - protein, 518 aa, Escherichia coli; identical to SEQ ID NO: 2349

SEQ ID NO: 3308 - protein, 200 aa, Escherichia coli; identical to SEQ ID NO: 1784

SEQ ID NO: 3309 - protein, 89 aa, Escherichia coli; identical to SEQ ID NO: 2810

SEQ ID NO: 3310 - protein, 142 aa, Escherichia coli
MGDNWDMMYVGMYQDINWDNDNGTKWWTVGIRPMYKWTPIMSTVMEIGYDNVESQRTGDKNNQYKITLAQQWQAGDSIWSRPAIRVFATYAKWDEKWGYDYNGDSKVNPNYGKAVTADFNGGSFGRGDSDEWTFGAQMEIWW

SEQ ID NO: 3311 - protein, 360 aa, Escherichia coli; identical to SEQ ID NO: 3032

SEQ ID NO: 3312 - protein, 362 aa, Escherichia coli; identical to SEQ ID NO: 2434

SEQ ID NO: 3313 - protein, 213 aa, Escherichia coli; identical to SEQ ID NO: 2232

SEQ ID NO: 3314 - protein, 696 aa, Escherichia coli
MRITTLASVVIPCLGFSASSIAAAEDVMIVSASGYEKKLTNAAASVSVISQEELQSSQYHDLAEALRSVEGVDVESGTGKTGGLEISIRGMPASYTLILIDGVRQGGGSDVTPNGFSAMNTGFMPPLAAIERIEVIRGPMSTLYGSDAMGGVVNIITRKNADKWLSSVNAGLNLQESNKWGNSSQFNFWSSGPLVDDSVSLQVRGSTQQRQGSSVTSLSDTAATRIPYPTESQNYNLGARLDWKASEQDVLWFDMDTTRQRYDNRDGQLGSLTGGYDRTLRYERNKISAGYDHTFTFGTWKSYLNWNETENKGRELVRSVLKRDKWGLAGQPRELKESNLILNSLLLTPLGESHLVTVGGEFQSSSMKDGVVLASTGETFRQKSWSVFAEDEWHLTDALALTAGSRYEHHEQFGGHFSPRAYLVWDVADAWTLKGGVTTGYKAPRMGQLHKGISGVSGQGKTNLLGNPDLKPEESVSYEAGVYYDNPAGLNANVTGFMTDFSNKIVSYSINDNTNSYVNSGKARLHGVEFAGTLPLWSEDVTLSLNYTWTRSEQRDGDNKGAPLSYTPEHMVNAKLNWQITEEVASWLGARYRGKTPRFTQNYSSLSAVQKKVYDEKGEYLKAWTVVDAGLSWKMTDALTLNAAVNNLLNKDYSDVSLYSAGKSTLYAGDYFQTGSSTTGYVIPERNYWMSLNYQF

SEQ ID NO: 3315 - protein, 111 aa, Escherichia coli; identical to SEQ ID NO: 3096

SEQ ID NO: 3316 - protein, 351 aa, Escherichia coli; identical to SEQ ID NO: 3010

SEQ ID NO: 3317 - protein, 193 aa, Escherichia coli; identical to SEQ ID NO: 2246

SEQ ID NO: 3318 - protein, 828 aa, Escherichia coli; identical to SEQ ID NO: 2380

SEQ ID NO: 3319 - protein, 246 aa, Escherichia coli; identical to SEQ ID NO: 3021

SEQ ID NO: 3320 - protein, 784 aa, Escherichia coli; identical to SEQ ID NO: 2244

SEQ ID NO: 3321 - protein, 309 aa, Escherichia coli
MITLRKLPLAVAVAAGVMSAQAMAVDFHGYARSGIGWTGSGGEQQCFQTTGAQSKYRLGNECETYAELKLGQEVWKEGDKSFYFDTNVAYSVAQQNDWEATDPAFREANVQGKNLIEWLPGSTIWAGKRFYQRHDVHMIDFYYWDISGPGAGLENIDVGFGKLSLAATRSSEAGGSSSFASNNIYDYTNETANDVFDVRLAQMEINPGGTLELGVDYGRANLRDNYRLVDGASKDGWLFTAEHTQSVLKGFNKFVVQYATDSMTSQGKGLSQGSGVAFDNEKFAYNINNNGHMLRILDTVRSPWATTGT

SEQ ID NO: 3322 - protein, 511 aa, Escherichia coli; identical to SEQ ID NO: 2457

SEQ ID NO: 3323 - protein, 412 aa, Escherichia coli
MKQWIAALLLMLIPGVQAAKPQKVTLMVDDVPVAQVLQALAEQEKLNLVVSPDVSGTVSLHLTDVPWKQALQTVVKSAGLITRQEGNILSVHSIAWQNDNIARQEAEQARAQANLPLENRSITLQYADAGELAKAGEKLLSAKGSMTVDKRTNRLLLRDNKTALSALEQWVAQMDLPVGQVELSAHIVTINEKSLRELGVKWTLADAQHAGGVGQVTTLGSDLSVATATTHVGFNIGRINGRLLDLELSALEQKQQLDIIASPRLLASHLQPASIKQGSEIPYQVSSGESGATSVEFKEAVLGMEVTPTVLQKGRIRLKLHISQNVPGQVLQQADGEVLAIDKQEIETQVEVKSGETLALGGIFTRKNKSGQDSVPLLGDIPWFGQLFRHDGKEDERRELVVFITPRLVSSE

SEQ ID NO: 3324 - protein, 760 aa, Escherichia coli; identical to SEQ ID NO: 3026

SEQ ID NO: 3325 - protein, 266 aa, Escherichia coli; identical to SEQ ID NO: 3102

SEQ ID NO: 3326 - protein, 869 aa, Escherichia coli
MKIPTTTDIPQRYTWCLAGICYSSLAILPSFLSYAESYFNPAFLLENGTSVADLSRFERGNHQPAGVYRVDLWRNDEFIGSQDIVFESTTENTGDKSGGLMPCFNQVLLERIGLNSSAFPELAQQQNNKCINLLKAVPDATINFDFAAMRLNITIPQIALLSSAHGYIPPEEWDEGIPALLLNYNFTGNRGNGNDSYFFSELSGINIGPWRLRNNGSWNYFRGNGYHSEQWNNIGTWVQRAIIPLKSELVMGDGNTGSDIFDGVGFRGVRLYSSDNMYPDSQQGFAPTVRGIARTAAQLTIRQNGFIIYQSYVSPGAFEITDLHPTSSNGDLDVTIDEHDGNQQNYTIPYSTVPILQREGRFKFDLTAGDFRSGNSQQSSPFFFQGTALGGLPQEFTAYGGTQLSANYTAFLLGLGRNLGNWGAVSLDVTHARSQLADDSRHEGDSIRFLYAKSMNTFGTNFQLMGYRYSTQGFYTLDDVAYRRMEGYEYDYDYDGEHRDEPIIVNYHNLRFSRKDRLQLNISQSLNDFGSLYISGTHQKYWNTSDSDTWYQVGYTSSWVGISYSLSFSWNESVGIPDNERIVGLNVSVPFNVLTKRRYTWENALDRAYASFNANRNSNGQNSWLAGVGGTLLEGHNLSYHVSQGDTSNNGYTGSATANWQAAYGTLGVGYNYDRDQHDVNWQLSGGVVGHENGITLSQPLGDTNVLIKAPGAGGVRIENQTGILTDWRGYAVMPYATVYRYNRIALDTNTMGNSIDVEKNISSVVPTQGALVRANFDTRIGVRALITVTQGGKPVPFGSLVRENSTGITSMVGDDGQVYLSGAPLSGELLVQWGNGANSRCIAHYVLPKQSLQQAVTVISAVCTHPGS

SEQ ID NO: 3327 - protein, 161 aa, Escherichia coli; identical to SEQ ID NO: 2582

SEQ ID NO: 3328 - protein, 219 aa, Escherichia coli
MSLNFTVIVWLRLSIGGVYVLAFCRSSLKSKKYFIILLALAAIAGLGTHAAWSSNGLPRIDNKTLARLAQQHPVVVLFRHAERCDRSTNQCLSDKTGITVKGTQDARELGNAFSADIPDFDLYSSNTVRTIQSATWFSAGKKLTVDKRLLQCGNEIYSAIKDLQSKAPDKNIVIFTHNHCLTYIAKNKRDATFKPDYLDGLVMHVEKGKVYLDGEFVNH

SEQ ID NO: 3329 - protein, 825 aa, Escherichia coli
MGQNASNIDLSRYSEGNPAIPGMYDVSVYVNDQPIINQSITFIEIEGKKNAQACITLKNLLQFHINSPDINNEKAVLLARDETLGNCLNLTEIIPQASVRYDVNEQRLDIDVPQAWVMKNYQNYVDPSLWENGINAAMLSYNLNGYHSETPGRRNDSIYAAFNGGMNLGAWRLRASGNYNWMTDSGSNYDFKNRYIQRDIASLRSQLILGESYTTGETFDSVSIRGIRLYSDSRMLPPTLASFAPIIHGVANTNAKVTITQGGYKIYETTVPPGAFVIDDLSPSGYGSDLIVTVEESDGSKRTFSQPFSSVVQMLRPGVGRWDISGGQVLKDDIQDEPNLFQASYYYGLNNYLTGYTGIQITDNNYTAGLLGLGLNTSVGAFSFDVTHSNVRIPDDKTYQGQSYRVSWNKLFEETSTSLNIAAYRYSTQNYLGLNDALTLIDEVKHPEQDLEPKSMRNYSRMKNQVTVSINQPLKFEKKDYGSFYLSGSWSDYWASGQNRSNYSIGYSNSASWGSYSVSAQRSWNEDGDTDDSVYLSFTIPIEKLLGTEQRTSGFQSIDTQMSSDFKGNNQLNVSSSGYSDNARVSYSVNTGYTMNKASKDLSYVGGYASYESPWGSLAGSVSANSDNSRQVSLSTDGGFVLHSGGLTFSNDSFSDSDTLAVVQAPGAQGARINYGNSTIDRWGYGVTSALSPYHENRIALDINDLENDVELKSTSAVAVPRQGSVVFADFETVQGQSAIMNITRSDGKNIPFAADIYDEQGNVIGNVGQGGQAFVRGIEQQGNISIKWLEESKPVSCLAHYQQSSEAEKIAQSIILNGIRCQIQ

SEQ ID NO: 3330 - protein, 368 aa, Escherichia coli
MNKTITALAIMMASFAANASVLPETPVPFKSGTGAIDNDTVYIGLGSAGTAWYKLDTQAKDKKWIALAAFPDGARDQATSAFIDGNLYVFGGIGKNSEGLTQVFNDVHKYNPKTNSWVKLMSHAPMGMAGHVTFVHNGKAYVTGGVNQNIFNGYFEDLNEAGKDSTAIDKINAHYFDKKAEDYFFNKFLLSFDPSTQQWSYAGESPWYGTAGAAVVNKGDKTWLINGEAKPGLRTDAVFELDFTGNNLKWNKLAPVSSPDGVAGGFAGMSNDSLIFAGGAGFKGSRENYQNGKNYAHEGLKKSYSADIHLWHNGKWDKSGELSQGRAYGVSLPWNNSLLIIGGETAGGKAVTDSVLISVKDNKVTVQN

SEQ ID NO: 3331 - protein, 878 aa, Escherichia coli
MPDHSLFRLRALPWCVAVAISGCHINAWADEDIQFDSRFLELKGDTKIDLKRFSSQGYVEPGKYSLQVEVNKQPLPGEYDIYWYATENDANKTYACLSPDLVALLGFKEDIAKNLQWVHDGKCLKPGQFDGLEMRADLSQSALLISLPQAYLEYSDVDWDPPSRWDDGISGLIADYSINAQTRHEENGGDDSNDISGNGTVGVNLGPWRLRADWQSDYQHTRSNDEETEDSTERNWDWSRYYAWRALPSLKAKLALGEDYLDSDIFDGFNYIGGSISTDDQMLPPNLRGYAPDISGVAHTAAKVTVSQAGRIIYETQVPAGPFRIQDLADFSSGTLHVRIEEVNGQVQEYDISTASMPFLTRPGQVRYKIMMGRPQEWGHHVQGGFFSGGEASWGIANGWSLYGGALGDENYQSAALGIGRDLSVFGAMAFDITHSHTRLDDSTAYGKSTLDGNSFRVSYSKDFDELNSRVTFAGYRFSEENYMTMSEYLDANDSAMVRSGNDKEMYTATYNQNFRDAGVSVYLNYTRHTYWDRDEQTNYNVMLSHYFNMGGIRNMSISLTGYRYEYDDSADKGVYISLSMPWGDSSVVSYNGNYGSGSDSSQVGYFSRIDDASHYQINVGNSENHSSVDGYYSRDGSMAHVDLSANYHEGQYTSAGLSLQGGATLTAHGGALHRTQNMGGTRLLIDADGVADVPVEGNGAAVYTNMFGKAVVADVNNYYRNQATIDLTKLPEDAEATQSVVQATLTEGAIGYRQFAVISGQKAMAVLRMSDGSYPPFGAEVRNEHDQQVGLVDDDGNVYLAGVKAGEHMRVSWNGEPHCEISLPDPLPADLFNGLLLPCKQQGAVMPAAPAEIKPMIQEQTQQVTPGAEPMAISANQ

SEQ ID NO: 3332 - protein, 368 aa, Escherichia coli
MNKTITALAIMMASFAANASVLPETPVPFKSGTGAIDNDTVYIGLGSAGTAWYKLDTQAKDKKWTALAAFPGGPRDQATSAFIDGDLYVFGGIGKNSKGLTQVFNDVHKYNPKTNSWVKLMSHAPMGMAGHVTFVHNGKAYVTGGVNQNIFNGYFEDLNEAGKDSTAIDKINAHYFDKKAEDYFFNKFLLSFDPSTQQWSYAGESPWYGTAGAAVVNKGDKTWLINGEAKPGLRTDAVFELDFTGDNLKWNRLAPVSSPDGVAGGFAGISNDSLIFAGGAGFKGSRENYQNGKNYAHEGLKKSYSTDIHLWHNGKWDKSGELSQGRAYGVSLPWNNSLLIIGGESAGGKAVTDSVLISVKDNKVTVQN

SEQ ID NO: 3333 - protein, 721 aa, Escherichia coli
MDEIPALAEKDDDSVINSLEQIIPGTAAEFDFNHQRLNLSIPQIALYRDARGYVSPSRWDDGIPTLFTNYSFTGSDNRYRQGNRSQRQYLNMQNGANFGPWRLRNYSTWTRNDQTSSWNTISSYLQRDIKALKSQLLLGESATSGSIFSSYTFTGVQLASDDNMLPNSQRGFAPTVRGIANSSAIVTIRQNGYVIYQSNVPAGAFEINDLYPSSNSGDLEVTIEESDGTQRRFIQPYSSLPMMQRPGHLKYSATAGRYRADANSDSKEPEFAEATAIYGLNNTFTLYGGLLGSEDYYALGIGIGGTLGALGALSMDINRADTQFDNRHSFHGYQWRTQYIKDIPETNTNIAVSYYRYTNDGYFSFDEANTRNWDYNSRQKSEIQFNISQTIFDGVSLYASGSQQDYWGNNDKNRNISVGVSGQQWGIGYSLNYQYSRYTDQNNDRALSLNLSIPLERWLPRSRVSYQMTSQKDRPTQHEMRLDGSLLDDGRLSYSLEQSLDDDNNHNSSLNASYRSPYGTFSAGYSYGNDSSQYNYGVTGGVVIHPHGVTLSQYLGNAFALIDANGASGVRIQNYPGIATDPFGYAVVPYLTTYQENRLSVDTTQLPDNVDLEQTTQFVVPNRGAMVAARFNANIGYRVLVTVSDRNGKPLPFGALASNDETGQQSIVDEGGILYLSGISSKSQSWTVRWGNQADQQCQFAFSTPDSEPTTSVLQGTAQCH

SEQ ID NO: 3334 - protein, 207 aa, Escherichia coli
MPLPDFRLIRLLPLAALVLTACSVTTPKGPGKSPDSPQWRQHQQDVRNLNQYQTRGAFAYISDQQKVYARFFWQQTGQDRYRLLLTNPLGSTELELNAQPGNVQLVDNKGQRYTADDAEEMIGKLTGMPIPLNSLRQWILGLPGDATDYKLDDQYRLSEITYSQNGKNWKVVYGGYDTKTQPAMPSNMELTDGGQRIKLKMDNWIVK

SEQ ID NO: 3335 - protein, 840 aa, Escherichia coli
MNNKNTFTGDKLSYAIKNALSGVVFSLLFVLPVRAVEFNADMIDVEDRANIDLSRFEKKGYITPAKYLVRVQINKNMLPQALMLEWAKADNESGSLLCLTKENLTNFGLNTDFIESLQTIAGSECLDLSQRQELTIRLDKATMILSLSIPQAWLKYQATNWTPPEFWDDGIAGFILDYNIYASQYSPQQGDSTQNVSSYGTLGFNLGAWRLRSDYQYNQNFADGRSVSHSGEFARTYLFRPIPSWSSKFTMGQYDLSSNLYDTFHFTGASLESDESMLPPDLQGYAPQITGIAQTNAKVTVAQNGRVLYQTTVAPGPFTITDLGQSFQGQLDVTVEEEDGRTNTFQVGSASIPYLTRKGQVRYKTSLGKPTSVGHNDINNPFFWTAEASWGWLNNVSLYGGGMFTADDYQAITTGIGFNLNQFGSLSFDVTGADASLQQQNSDNLRGYSYRFNYAKHFESTGSQITFAGYRFSDKDYVSMNEYLNSRNGDESIDNEKESYVISLNQYFESLELNSYVNVTRNTYWDSPANTNYSISVSKNFDIGDFKGISASLAVSRIRWDDDEENQYYFSFSLPLQQSRNLSYSMQRTGGSNTSQMVSWYDSSDRNNIWNISASATDDNIRDGEPTLRGSYQHNSPWGRLNFTGSVQPNQYNSVTAGWYGSITATRHGVALHDYSYGDNARMMVDTDGIPGVEINSNRTVTNGLGIAVIPSLSNYTTSMLRVNNNVLPEGVDVENSVIRTTLTQGAIGYAKLNATTGYQIVGVIRQENGRFPPLGVNVTDKSTGKDVGLVAEDGFVYLSGIQENSTLHLTWGNNSCEITPPNQSNINESAIILPCKTVN

SEQ ID NO: 3336 - protein, 826 aa, Escherichia coli
MLRMTPLASAIVALLLGIEAYAAEETFDTHFMIGGMKDQQVANIRLDDNQPLPGQYEIDIYVNKQWRGKYEVIVKDNHEETCLEREIIKRLGINTDNFASGKQCLTFEQLVHGGSYTWDIGVFRLDFSVPQAWVEELESGYVPPENWERGINAFYTSYYVSQYYSDYKASGNSKSTYVRFNSGLNLLGWQLHSDASLSKTNSNPGVWKSNTLYLERGFAQLLGTLRVGDMYTSSDIFDSVRFSGVRLFRDMQMLPNSKQNFTPRVQGIAQSNALVTIEQNGFVVYQKEVPPGPFAITDLQLAGGGADLDVSVKEADGSVTTYLVPYAAVPNMLQPGVSKYDFAAGRSHIEGASKQSDFVQAGYQYGFNNLLTLYGGSMVANNYYAFTLGTGWNTRIGAISVDATKSHSKQDNGDVFDGQSYQIAYNKFVSQTSTRFGLAAWRYSSRDYRTFNDHVWANNKDNYRRDENDIYDIADYYQNDFGRKNSFSANMSQSLPEGWGSVSLSTLWRDYWGRSGSSKDYQLSYSNNLRRISYTLAASQAYDENHHEEKRFNIFISIPFDWGDDVTTPRRQIYMSNSTTFDDQGFASNNTGLSGTVGSRDQFNYGVNLSHQHQGNETTAGANLTWNAPVATVNGSYSQSSTYRQAGASLSGGIVAWSGGVNLANRLSETFAVMNAPGIKDAYVNGQKYRTTNRNGVVVYDGMTPYRENHLMLDVSQSDSEAELRGNRNIAAPFRGAVVLVNFDTDQRKPWFIKALRTDGQPLTFGYEVNDIHGHNIGVVGQGSQLFIRTNEVPPSVNVAIDKQQGLSCTITFGKEIDESRNYICQ

SEQ ID NO: 3337 - protein, 819 aa, Escherichia coli
MDTVNIYRLSLVSCLVVAMPCALAVEFNLNVLDKSMRDRIDISLLKEKGVIAPGEYFVSVAVNNNQISNGQKINWHKNDDKTIPCINDLLVDKFGLKPEVRQSLPLINQCVDFSSRPEMLFNFDQANQQLNITIPQAWLAWHSENWTPPSTWKEGVAGVLMDYNLFASSYRPQDGSSSTNLNAYGTAGINTGAWRLRSDYQLNQTDSDDNHEQSGEISRTYLFRPLPQLGSKLTLGETDFSSNIFDGFSYTGAALASDDRMLPWELRGYAPQISGIAQTNATVTISQSGRVIYQKKVPPGPFIIDDLNQSVQGTLDVKVTEEDGRVNNFQVSAASTPFLTRQGQVRYKLAAGQPRPSMSHQTENETFFSNEVSWGMLSNTSLYGGLLLSGDDYHSAAIGIGQNMLWLGALSFDVTWASSHFDTQQDERGLSYRFNYSKQVDATNSTISLAAYRFSDRHFHSYANYLDHKYNDSDAQDEKQTISLSVGQPITPLNLNLYANLLHQTWWNADASTTANITAGFNVDIGDWRDISISTSFNTTHYEDKDRDNQIYLSISLPFGNGGRVGYDMQNSSHSTTHRMSWNDTLDERNSWGMSAGLQSDRPDNGAQVSGNYQHLSSAGEWDISGTYAANDYSSVSSSWSGSFTATQYGAAFHRRSSTNEPRLMVSTDGVADIPVQGNLDYTNHFGIAVVPLISSYQPSTVAVNMNDLPDGVTVAENVIKETWIEGAIGYKSLASRSGKDVNVIIRNASGQFPPLGADIRQDDSGISVGMVGEEGHAWLSGVAENQNFTVVWGDSQHCSLHLPEHMEDTANRLILPCH

SEQ ID NO: 3338 - protein, 266 aa, Escherichia coli
MAKSLFRALVALSFLAPLWLNAAPRVITLSPANTELAFAAGITPVGVSSYSDYPPQAQKIEQVSTWQGMNLERIVALKPDLVIAWRGGNAERQVDQLASLGIKVMWVDATSIEQIANALRQLAPWSPQPDKAEQAAQSLLDQYAQLKAQYADKPKKRVFLQFGINPPFTSGKESIQNQVLEVCGGENIFKDSRVPWPQVSREQVLARAPQAIVITGGPDQIPKIKQYWGEQLKIPVIPLTSDWFERASPRIILAAQQLCNALSQVD

SEQ ID NO: 3339 - protein, 851 aa, Escherichia coli
MPSFIGGLVVFVSAVFTAQAEIWFDPAFFKDDPSMVADLSRFEKGQKITPGVYRVDIVLNQTIVDTRNVNFVEITPEKGIAACLTTENLDAMGMNTDAFPAFKQLDKQACAPLAEIIPDASVTFNVNKLRLEISVPQIAIKSNARGYVPPERWDEGINALLLGYSFSGANSIHSSTDSDSTDSYFLNLNSGVNLGPWRLRNYSTWSRSSGQTAEWKNLSSYLQRAVIPLKGELTVGDDYTAGDFFDSVSFRGVQLASDDNMLPDSLKGFAPLVRGIAKSNAQITIKQNGYTIYQTYVSPGAFEISDLYSTSSSGDLLVEIKESDGSVNSYSVPFSSVPLLQRQGRIKYAVTLAKYRTNSNDQQESKFAQATLQWGGPWGTTWYGGGQYAEYYRAAMFGLGFNLGDFGAISFDATQAKSTLADQSEHKGQSYRFLYAKTLNHLGTNFQLMGYRYSTSGFYTLSDTMYKHMDGYEFNDGDDEDMPLWSRYYNLFYTKRGKLQVNISQQLGEYGSFYLSGSQQTYWHTDQQDRLLQFGFNTQIKDLSLGVSWNYSKSRGQPDADQVFALNFSLPLNLLLPRSNDSYTRKKNYAWMTSNTSIDNEGHTTQNLGLTETLLDDGNLSYSVQQGYNSEGKTANGSASMDYKGAFADARVGYNYSDNGSQQQLNYALSGSLVAHSQGITLGQSLGETNVLIAAPGAENTRVANSTGLKTDWRGYTVVPYATSYRENRIVLDAASLKRNVDLENAVVNVVPTKGALVLAEFNAHAGARVLMKTLKQGIPLPFGAIATLDGIQTNSGIIDDDGSLYMSGLPAQGAITVRWGEAPDQICHISYELTEQQINAAITRMNAICR

SEQ ID NO: 3340 - protein, 397 aa, Escherichia coli
MKRKVLAMLVPALLVAGAANAAEVYNKDGNKLDFYGKVAGLHYFSDNSGADGDMSYARIGFKGETQIADQFTGYGQWEYNLQANGTEGDGDNSATRLAFAGLGFGQNGTFDYGRNYGVVYDIEAWTDMLPEFGGDTYAGADNFMNGRTNGVATYRNNGFFGQVDGLNFALQYQDNNESGGPFGQEGSGSGDGRSLSKENGDGFGMSTSYDFDFGLSLGAAYSNSDRSDRQVGVGLNDRNHSNRNAGGETAEAWTVGAKYDANNVYLAAMYAETRNMTPYGGGEFDNGESRSAIANKTQNFEVVAQYQFDFGLRPSIAYLQSKGKDLGGWAHDGNGDPRYTNKDLVKYVEVGATYYFNKNMSTYVDYKINLLDNDDDFYEANGIATDDIVAVGLVYQF

SEQ ID NO: 3341 - protein, 614 aa, Escherichia coli
MIKKASLLTACSVTAFSAWAQDTSPDTLVVTANRFEQPRSTVLAPTTVVTRQDIDRWQSTSVNDVLRRLPGVDITQNGGSGQLSSIFIRGTNASHVLVLIDGVRLNLAGVSGSADLSQFPIALVQRVEYIRGPRSAVYGSDAIGGVVNIITTRDQPGTEISAGWGSNSYQNYDVSTQQQLGDKTRVTLLGDYAHTHGYDVVAYGNTGTQAQPDNDGFLSKTLYGALEHNFTDVWSGFVRGYGYDNRTNYDAYYSPGSPLLDTRKLYSQSWDAGLRYNGELIKSQLITSYSHSKDYNYDPHYGRYDSSATLDEMKQYTVQWANNVIVGHGSIGAGVDWQKQTTTPGTGYVEDGYDQRNTGIYLTGLQQVGDFTFEGAARSDDNSQFGRHGTWQTSAGWEFIEGYRFIASYGTSYKAPNLGQLYGFYGNPNLEPEKSKQWEGAFEGLTAGVNWRISGYRNDVSDLIDYDDHTLKYYNEGKARIKGVEAIANFDTGPLTHTVSYDYVDAHNAITDTPLLRRAKQQVKYQLDWQLYDFDWGITYQYLGTRYDKDYSSWPYQTVKMGGVSLWDLAVAYPVTSHLTVRGKIANLFDKDYETVYGYQTAGREYTLSGSYTF

SEQ ID NO: 3342 - protein, 432 aa, Escherichia coli; identical to SEQ ID NO: 2026

SEQ ID NO: 3343 - protein, 367 aa, Escherichia coli
MKVKVLSLLVPALLVAGAANAAEVYNKDGNKLDLYGKVDGLHYFSDDKSVDGDQTYMRLGFKGETQVTDQLTGYGQWEYQIQGNSAENENNSWTRVAFAGLKFQDVGSFDYGRNYGVVYDVTSWTDVLPEFGGDTYGSDNFMQQRGNGFATYRNTDFFGLVDGLNFAVQYQGKNGSVSGEGMTNNGREALRQNGDGVGGSITYDYEGFGIGGAISSSKRTDDQNSPLYIGNGDRAETYTGGLKYDANNIYLAAQYTQTYNATRVGSLGWANKAQNFEAVAQYQFDFGLRPSLAYLQSKGKNLGVINGRNYDDEDILKYVDVGATYYFNKNMSTYVDYKINLLDDNQFTRDAGINTDNIVALGLVYQF

SEQ ID NO: 3344 - protein, 224 aa, Escherichia coli
MLAGILMIMAMMAAGRAEAGVALGATRVIYPAGQKQVQLAVTNNDENSTYLIQSWVENADGVKDGRFIVTPPLFAMKGKKENTLRILDATNNQLPQDRESLFWMNVKAIPSMDKSKLTENTLQLAIISRIKLYYRPAKLALPPDQAAEKLRFRRSANSLTLINPTPYYLTVTELNAGTRVLENALVPPMGESTVKLPSDAGSNITYRTINDYGALTPKMTGVMV

SEQ ID NO: 3345 - protein, 878 aa, Escherichia coli
MSYLNLRLYQRNTQCLHIRKPRLAGFFVRLSVACVFATQAPLSSAELYFNPRFLADDPQAVADLSRFENGQELPPGTYRVDIYLNNGYMATRDVTFNTGDSEQGIVPCLTRAQLASMGLNTASVSGMNLLADDACVPLTTMIHDATAHLDVGQQRLNLTIPQAFMSNRARGYIPPELWDPGINAGLLNYNFSGNSVQNRIGGNSHYAYLNLQSGLNIGAWRLRDNTTWSYNSSDSSSGSKNKWQHINTWLERDIIPLRSRLTLGDGYTQGDIFDGINFRGAQLASDDNMLPDSQRGFAPVIHGIARGTAQVTIKQNGYDIYNSTVPPGPFTINDIYAAGNSGDLQVTIKEADGSTQIFTVPYSSVPLLQREGHTRYSITAGEYRSGNAQQDKPRFFQSTLLHGLPAGWTIYGGTQLADRYRAFNFGIGKNMGALGALSVDMTQANSTLPDDSQHDGQSVRFLYNKSLNESGTNFQLVGYRYSTSGYFNFADTTYSRMSGYNIETQDGVIQVKPKFTDYYNLAYNKRGKLQLTVTQQLGRTSTLYLSGSHQTYWGTSNVDEQFQAGLNTAFEDINWTLSYSLTKNAWQKGRDQMLALNINIPFSHWLRSDSKSQWRHASASYSMSHDLNGRMTNLAGVYGTLLEDNNLSYSVQTGYAGGGDGNSGSTGYAALNYRGGYGNANIGYSHSDDIKQLYYGISGGVLAHANGVTLGQPLNDTVVLVKAPGAKDAKVENQTGVRTDWRGYAVLPYATEYRENRVALDTNTLADNVDLDNAVANVVPTRGAIVRAEFKARVGIKLLMTLTHNNKPLPFGAMVTSESSQSSGIVADNGQVYLSGMPLAGKVQVKWGEEENAHCVANYQLPPESQQQLLTQLSAECR

SEQ ID NO: 3346 - protein, 518 aa, Escherichia coli
MKKLKINYLFIGILALLLAVALWPSIPWFGKADNRIAAIQARGELRVSTIHTPLTYNEINGKPFGLDYELAKQFAEYLGVKLKVTVRQNISQLFDDLDNGNADLLAAGLVYNSERVKNYQPGPTYYSVSQQLVYKVGQYRPRTLGNLTAEQLTIAPGHVVVNDLQTLKETKFPELSWKVDDKKGSAELMEDVIEGKLDYTIADSVAISLFQRVHPELAVALDITDEQPVTWFSRLDGDNTLSAALLDFFNEMNEDGTLARIEEKYLGHGDDFDYVDTRTFLRAVDTVLPQLKPLFEKYAEEIDWRLLAAIAYQESHWDAQATSPTGVRGMMMLTKNTAQSLGITDRTDAEQSISGGVRYLQDMMSKVPESVPENERIWFALAAYNMGYAHMLDARALTAKTKGNPDSWADVKQRLPLLSQKPYYSKLTYGYARGHEAYAYVENIRKYQISLVGYLQEKEKQATEAAIQLAQDYPAVSPTELGKEKFPFLSFLSQSSSNYLTHSPSLLFSRKGSEEKQN

SEQ ID NO: 3347 - protein, 363 aa, Escherichia coli
MKVKVLSLLVPALLVAGAANAAEVYNKDGNKLDLYGKVDGLHYFSDNKDVDGDQTYMRLGFKGETQVTDQLTGYGQWEYQIQGNSAENENNSWTRVAFAGLKFQDVGSFDYGRNYGVVYDVTSWTDVLPEFGGDTYGSDNFMQQRGNGFATYRNTDFFGLVDGLNFAVQYQGKNGSVSGEGMTNNGREALRQNGDGVGGSITYDYEGFGIGAAVSSSKRTDDQNSPLYIGNGDRAETYTGGLKYDANNIYLAAQYTQTYNATRVGSLGWANKAQNFEAVAQYQFDFGLRPSLAYLQSKGKNLGRGYDDEDILKYVDVGATYYFNKNMSTYVDYKINLLDDNQFTRDAGINTDNIVALGLVYQF

SEQ ID NO: 3348 - protein, 230 aa, Escherichia coli
MAFSSSSIADIVISGTRVIYKSDQKSVNVRLENKGNNPLLVQSWLDTGDDNAEPGSITVPFTATPPVSRIDAKRGQTIKLMYTASTSLPKDRESVFWFNVLEVPPKPDAEKVANQSLLQLAFRTRIKLFYRPDGLKGNPSEAPLALKWFWSGSEGKASLRVTNPTPYYVSFSSGDLEASGKRYPIDVKMIAPFSDEVMKVTGLNGKASSAKVHFYAINDFGGAIEGNASL

SEQ ID NO: 3349 - protein, 207 aa, Escherichia coli; identical to SEQ ID NO: 2211

SEQ ID NO: 3350 - protein, 432 aa, Escherichia coli; identical to SEQ ID NO: 2026

SEQ ID NO: 3351 - protein, 505 aa, Escherichia coli
MKKQISGNFDLTEPYALIERLSAQMGLIWYDDGKAIYIYDSSEMRNALINLRKVSTNEFNNFLKKSGLYNSRYEIKGGGNGTFYVSGPPVYVDLVVNAAKLMEQNSDGIEIGRNKVGIIHLVNTFVNDRTYELRGEKIVIPGMAKVLSTLLNNNIKQSTGVNVLSEISSRQQLKNVSRMPPFPGAEEDDDLQVEKIISTAGAPETDDIQIIAYPDTNSLLVKGTVSQVDFIEKLVATLDIPKRHIELSLWIIDIDKTDLEQLGADWSGTIKIGSSLSASFNNSGSISTLDGTQFIATIQALAQKRRAAVVARPVVLTQENIPAIFDNNRTFYTKLVGERTAELDEVTYGTMISVLPRFASRNQIELLLNIEDGNEINSDKTNVDDLPQVGRTLISTIARVPQGKSLLIGGYTRDTNTYESRKIPILGSIPFIGKLFGYEGTNANNIVRVFLIEPREIDERMMNNANEAAVDARAITQQMAKNKEINDELLQKWIKTYLNREVVGG

SEQ ID NO: 3352 - protein, 869 aa, Escherichia coli
MKIPTTTDIPQRYTWCLAGICYSSLAILPSFLSYAESYFNPAFLLENGTSVADLSRFERGNHQPAGVYRVDLWRNDEFIGSQDIVFESTTVNTGDKSGGLMPCFNQALLERIGLNSSAFPELAQQQNNKCINLLKAVPDATINFDFAAMRLNITIPQIALLSSAHGYIPPEEWDEGIPALLLNYNFTGNRGNGNDSYFFSELSGINIGPWRLRNNGSWNYFRGNGYHSEQWNNIGTWVQRAIIPLKSELVMGDGNTGSDIFDGVGFRGVRLYSSDNMYPDSQQGFAPTVRGIARTAAQLTIRQNGFIIYQSYVSPGAFEITDLHPTSSNGDLDVTIDERDGNQQNYTIPYSTVPILQREGRFKFDLTAGDFRSGNSQQSSPFFFQGTALGGLPQEFTAYGGTQLSANYTAFLLGLGRNLGNWGAVSLDVTHARSQLADDSRHEGDSIRFLYAKSMNTFGTNFQLMGYRYSTQGFYTLDDVAYRRMEGYEYDYDYDGEHRDEPIIVNYHNLRFSRKDRLQLNISQSLNDFGSLYISGTHQKYWNTSDSDTWYQVGYTSSWVGISYSLSFSWNESVGIPDNERIVGLNVSVPFNVLTKRRYTRENALDRAYASFNANRNSNGQNSWLAGVGGTLLEGHNLSYHVSQGDTSNNGYTGSATANWQAAYGTLGVGYNYDRDQHDVNWQLSGGVVGHENGITLSQPLGDTNVLIKAPGAGGVRIENQTGILTDWRGYAVMPYATVYRYNRIALDTNTMGNSIDVEKNISSVVPTQGALVRANFDTRIGVRALITVTQGGKPVPFGSLVRENSTGITSMVGDDGQVYLSGAPLSGELLVQWGDGANSRCIAHYVLPKQSLQQAVTVISAVCTHPGS

SEQ ID NO: 3353 - protein, 365 aa, Escherichia coli; identical to SEQ ID NO: 3084

SEQ ID NO: 3354 - protein, 360 aa, Escherichia coli
MMKKYLALALIAPLLISCSTTKKGDTYNEAWVKDTNGFDILMGQFAHNIENIWGFKEVVIAGPKDYVKYTDQYQTRSHINFDDGTITIETIAGTEPAAHLRRAIIKTLLMGDDPSSVDLYSDVDDITISKEPFLYGQVVDNTGQPIRWEGRASNFADYLLKNRLKSRSNGLRIIYSVTINMVPNHLDKRAHKYLGMVRQASRKYGVDESLILAIMQTESSFNPYAVSRSDALGLMQVVQHTAGKDVFRSQGKSGTPSRSFLFDPASNIDTGTAYLAMLNNVYLGGIDNPTSRRYAVITAYNGGAGSVLRVFSNDKIQAANIINTMTPGDVYQTLTTRHPSAESRRYLYKVNTAQKSYRRR

SEQ ID NO: 3355 - protein, 351 aa, Escherichia coli
MSGSYSSVWAEDDIQFDSRFLELKGDTKIDLKRFSSQGYVEPGKYNLQVQLNKQPLAEEYDIYWYAGEDDASKSYACLTPELVAQFGLKEDVAKNLQWSHDAKCLKSGQLEGMEIKADLSQSALVISLPQAYLEYTYPDWDPPSRWDDGISGIVADYSINAQTRHEENGGDDSNEISGNGTVGVNLGPWRMRADWQTNYQHTRSNDDDEFSGDETQKKWEWSRYYAWRALPSLKAKLALGEDYLRSDIFDGFNYVGGSVSTDDQMLPPNLRGYAPDISGVAHTTAKVTVSQMGRVIYETQVPAGPFRIQDLGDSVSGTLHIRIEEQNGQVQEYDISTASMPYLTRPGQVRY

SEQ ID NO: 3356 - protein, 221 aa, Escherichia coli
MKNYLWLVALLPLLSGCESQAILVKKDDAYFAPPKTEAPPPADGRAGGLFETGYNWSLTADRRAYRVGDILTVILEESTQSSKQAKTNFGKSNSVDITAPTVFGHTKNNLSGSIDANRDFDGSATSQQQNSLRGEITVSVHAVQPNGILEIRGEKWLTLNQGDEYIRLSGLVRADDIQNDNSVSSQRIADARISYAGRGALSDANAAGWLTRLFNHPLFPI

SEQ ID NO: 3357 - protein, 361 aa, Escherichia coli
MKRNILAVIVPALLVAGTANAAEIYNKDGNKVDLYGKAVGLHYFSKGNGENSYGGNGDMTYARLGFKGETQINSDLTGYGQWEYNFQGNNSEGADAQTGNKTRLAFAGLKYADVGSFDYGRNYGVVYDALGYTDMLPEFGGDTAYSDDFFVGRVGGVATYRNSNFFGLVDGLNFAVQYLGKNERDTARRSNGDGVGGSISYEYEGFGIVGAYGAADRTNLQEAQPLGNGKKAEQWATGLKYDANNIYLAANYGETRNATPITNKFTNISGFANKTQDVLLVAQYQFDFGLRPSIAYTKSKAKDVEGIGDVDLVNYFEVGATYYFNKNMSTYVDYIINQIDSDNKLGVGSDDTVAVGIVYQF

SEQ ID NO: 3358 - protein, 224 aa, Escherichia coli
MTVSLTAILLSCSSAWAAGKGGIGLAATRLVYSEGEEQISLGVRNTSPDVSYLIQSWVMTPVNKKSADFIITPPLFVLNPANENLLRIMYIGAPLAKDRETLFFTSVRAVPSTTKREEGNTLKIATQSVIKLFWRPKGLAYPLAEAPAKLRCTSSADIVTVSNPTPYFITLTDLKIGGKVVKNQMISPFDKYQFPLPKGAQNSRVTYRTINDYGAETPQLNCKS

SEQ ID NO: 3359 - protein, 539 aa, Escherichia coli; identical to SEQ ID NO: 3050

SEQ ID NO: 3360 - protein, 366 aa, Escherichia coli
MKLKIVAVVVTGLLAANVAHAAEVYNKDGNKLDLYGKVTALRYFTDDKRDDGDKTYARLGFKGETQINDQMIGFGHWEYDFKGYNDEANGSRGNKTRLAYAGLKISEFGSLDYGRNYGVGYDIGSWTDMLPEFGGDTWSQKDVFMTYRTTGVATYRNYDFFGLIEGLNFAAQYQGKNERTDNAHLYGADYTRANGDGFGISSTYVYDGFGIGAVYTKSDRTNAQERAAANPLNASGKNAELWATGIKYDANNIYFAANYAETLNMTTYGDGYISNKAQSFEVVAQYQFDFGLRPSLAYLKSKGRDLGRYGDQDMIEYIDVGATYFFNKNMSTYVDYKINLIDESDFTRAVDIRTDNIVATGITYQF

SEQ ID NO: 3361 - protein, 203 aa, Escherichia coli; identical to SEQ ID NO: 2009

SEQ ID NO: 3362 - protein, 565 aa, Escherichia coli
MKATAPPRPQKIALIPACVLLCFAALAVQAEETPVTPQPPDILLGPLFNDVQNAKLFPDQKTFADAVPNSDPLMILADYRMQQNQSGFDLRHFVNVNFTLPKEGEKYVPPEGQSLREHIDGLWPVLTRSTENTEKWDSLLPLPEPYVVPGGRFREVYYWDSYFTMLGLAESGHWDKVADMVANFAHEIDTYGHIPNGNRSYYLSRSQPPFFALMVELLAQHEGDAALKQYLPQMQKEYAYWMDGVENLQAGQQEKRVVKLQDGTLLNRYWDDRDTPRPESWVEDIATAKSNPNRPATEIYRDLRSAAASGWDFSSRWMDNPQQLNTLRTTSIVPVDLNSLMFKMEKILARASKAAGDNAMANQYETLANARQKGIEKYLWNDQQGWYADYDLKSHKVRNQLTAAALFPLYVNAAAKDRANKMATATKTHLLQPGGLNTTSVKSGQQWDAPNGWAPLQWVATEGLQNYGQKEVAMDISWHFLTNVQHTYDREKKLVEKYDVSTTGTGGGGGEYPLQDGFGWTNGVTLKMLDLICPKEQPCDNVPATRPLSESTTQPLKQKEAEPTP

SEQ ID NO: 3363 - protein, 233 aa, Escherichia coli
MKTCITKGIVTVSLTAILLSCSSAWAAGKGGIGLAATRLVYSEGEEQISLGVRNTSPDVPYLIQSWVMTPDNKKSADFIITPPLFVLNPANENLLRIMYIGAPLAKDRETLFFTSVRAVPSTTKREEGNTLKIATQSVIKLFWRPKGLAYPLGEAPAKLSCTSSADMVTVSNPTPYFITLTDLKIGGKVVKNQMISPFDKYQFSLPKGAKNSSVTYRTINDYGAETPQLNCKS

SEQ ID NO: 3364 - protein, 746 aa, Escherichia coli
MNKKIHSLALLVNLGIYGVAQAQEPTDTPVSHDDTIVVTAAEQNLQAPGVSTITADEIRKNPVARDVSEIIRTMPGVNLTGNSTSGQRGNNRQIDIRGMGPENTLILIDGKPVSSRNSVRQGWRGERDTRGDTSWVPPEMIERIEVLRGPAAARYGNGAAGGVVNIITQKGSGEWHGSWDAYFNAPEHKEEGATKRTNFSLTGPLGDEFSFRLYGNLDKTQADAWDINQGHQSARAGTYATTLPAGREGVINKDINGVVRWDFAPLQSLELEAGYSRQGNLYAGDTQNTNSDAYTRSKYGDETNRLYRQNYALTWNGGWDNGVTTSNWVQYEHTRNSRIPEGLAGGTEGKFNEKATQDFVDIDLDDVMLHSEVNLPIDFLVNQTLTLGTEWNQQRMKDLSSNTQALTGANTGGAIDGVSATDRSPYSKAEIFSLFAENNMELTDSTIVTPGLRFDHHSIVGNNWSPALNISQGLGDDFTLKMGIARAYKAPSLYQTNPNYILYSKGQGCYASAGGCYLQGNDDLKAETSINKEIGLEFKRDGWLAGVTWFRNDYRNKIEAGYVAVGQNAVGTDLYQWDNVPKAVVEGLEGSLNVPVSETVMWTNNITYMLKSENKTTGDRLSIIPEYTLNSTLSWQAREDLSMQTTFTWYGKQQPKKYNYKGQPAVGPETKEISPYSIVGLSATWDVTKNVSLTGGVDNLFDKRLWRAGNAQTTGDLAGANYIAGAGAYTYNEPGRTWYMSVNTHF

SEQ ID NO: 3365 - protein, 241 aa, Escherichia coli
MSNKNVNVRKSQEITFCLLAGILIFMAMMVAGRAEAGVALGATRVIYPAGQKQVQLAVTNNDENSTYLIQSWVENADGVKDGRFIVTPPLFAMKGKRENTLRILDATNNQLPQDRESLFWMNVKAIPSMDKSKLTENTLQLAIISRIKLYYRPAKLALPPDQAAEKLRFRRSANSLTLINPTPYYLTVTELNAGARVLENALVPPMGESTVKLPSDAGSNITYRTINDYGALTPKMTGVME

SEQ ID NO: 3366 - protein, 856 aa, Escherichia coli
MAGFFVRLFVACAFAAQAPLSSAELYFNPRFLADDPQAVADLSRFENGQELPPGTYRVDIYLNNGYMATRDVTFNTGDSEQGIVPCLTRAQLASMGLNTASVSGMNLLADDACVPLTSMIHDATAHLDVGQQRLNLTIPQAFMSNRARGYIPPELWDPGINAGLLNYNFSGNSVQNRIGGNSHYAYLNLQSGLNIGAWRLRDNTTWSYNSSDRSSGSKNKWQHINTWLERDIIPLRSRLTLGDGYTQGDIFDGINFRGVQLASDDNMLPDSQRGFAPVIHGIARGTAQVTIKQNGYDIYNSTVPPGPFTINDIYAAGNSGDLQVTIKEADGSTQIFTVPYSSVPLLQREGHTRYSITAGEYRSGNAQQEKPRFFQSTLLHGLPAGWTIYGGTQLADRYRAFNFGIGKNMGALGALSVDMTQANSTLPDDSQHDGQSVRFLYNKSLNESGTNIQLVGYRYSTSGYFNFADTTYSRMNGYNIETQDGVIQVKPKFTDYYNLAYNKRGKLQLTVTQQLGRSSTLYLSGSHQTYWGTSNVDEQFQAGLNTAFEDINWTLSYSLTKNAWQKGRDQMLALNVNIPFSHWLRSDSKSQWRHASASYSMSHDLNGRMTNLAGVYGTLLEDNNLSYSVQTGYAGGGDGNSGSTGYATLNYRGGYGNANIGYSHSDDIKQLYYGVSGGVLAHANGVTLGQPLNDTVVLVKAPGAKDAKVENQTGVRTDWRGYAVLPYATEYRENRVALDTNTLADNVDLDNAVANVVPTRGAIVRAEFKARVGIKLLMTLTHNNKPLPFGAMVTSESSQSSGIVADNGQVYLSGMPLAGKVQVKWGEEENAHCIANYQLPPESQQQLLTQLSAECR

SEQ ID NO: 3367 - protein, 831 aa, Escherichia coli
MQELPMLRMTPLASAIVALLLGIEAYAAEETFDTHFMIGGMKDQQVANIRLDDNQPLPGQYDIDIYVNKQWRGKYEIIVKDNPQETCLSIEVIKRLGINSDNFASGKQCLTFEQLVQGGSYTWDIGVFRLDFSVPQAWVEELESGYVPPENWERGINAFYTSYYVSQYYSDYKASGNSKSTYVRFNSGLNLLGWQLHSDASFSKTNNNPGVWKSNTLYLERGFAQLLGTLRVGDMYTSSDIFDSVRFSGVRLFRDMQMLPNSKQNFTPRVQGIAQSNALVTIEQNGFVVYQKEVPPGPFAITDLQLAGGGADLDVSVKEADGSVTTYLVPYAAVPNMLQPGVSKYDFAAGRSHIEGASKQSDFVQAGYQYGFNNLLTLYGGSMVANNYYAFTLGTGWNTRFGAISVDATKSHSKQDNGDVFDGQSYQIAYNKFVSQTSTRFGLAAWRYSSRDYRTFNDHVWANNKDNYRRDENDVYDIADYYQNDFGRKNSFSANMSQSLPEGWGSVSLSTLWRDYWGRSGSSKDYQLSYSNNWRRISYILAASQAYDENHHEEKRFNIFISIPFDWGDDVTTPRRQIYMSNSTTFDDQGFASNNTGLSGTVGSRDQFNYGVNLSYQNQGNETTAGANLTWNAPVATVNGSYSQSSTYRQAGASVSGGIVAWSGGVNLANRLSETFAVMNAPGIKDAYVNGQKYRTTNRNGVVVYDGMTPYRENHLMLDVSQSDSEAELRGNRKIAAPYRGAVVLVNFDTDQRKPWFIKALRADGQPLMFGYEVNDIHGHNIGVVGQGSQLFIRTNEVPPSVNVAIDKQQGLSCTITFGKEIDESRNYICQ

SEQ ID NO: 3368 - protein, 213 aa, Escherichia coli
MVLPAHAGIVIYGTRIIYPAENKEVMVQLMNQGNRSSLLQAWIDDGDTSLPPEKIQVPFMLTPPVAKIGANSGQQVKIKIMPNKLPTNKESIFYLNVLDIPPNSPEQEGKNALKFAMQNRIKLFYRPAGIAPVNKATFKKLLVNRSGNGLVIKNDSANWVTISDVKANNVKVNYETIMIAPLESQSVNVKSNNANNWYLTIIDDHGNYISDKI

SEQ ID NO: 3369 - protein, 700 aa, Escherichia coli; identical to SEQ ID NO: 3128

SEQ ID NO: 3370 - protein, 111 aa, Escherichia coli
MKKQIEGMTMKKVLGLVVAAAMGLSSAAFAAETATTPAPTATTTKAAPAKTTHHKKQHKAAPAQKAQAAKKHHKNTKAEQKAPEQKAQAAKKHAGKHSHQQPAKPAAQPAA

SEQ ID NO: 3371 - protein, 834 aa, Escherichia coli; identical to SEQ ID NO: 3095

SEQ ID NO: 3372 - protein, 828 aa, Escherichia coli; identical to SEQ ID NO: 2388

SEQ ID NO: 3373 - protein, 169 aa, Escherichia coli
MKKESKKMKTILPAVLFAAFATTSAWAAESVQPLEKIAPYPQAEKGMKRQVIQLTPQEDESTLKVELLIGQTLEVDCNLHRLGGKLESKTLEGWGYDYYVFDKVSSPVSTMMACPDGKKEKKFVTAYLGDAGMLRYNSKLPIVVYTPDNVDVKYRVWKAEEKIDNAVVR

SEQ ID NO: 3374 - protein, 518 aa, Escherichia coli; identical to SEQ ID NO: 2350

SEQ ID NO: 3375 - protein, 208 aa, Escherichia coli; identical to SEQ ID NO: 1949

SEQ ID NO: 3376 - protein, 353 aa, Escherichia coli
MKMKKSTLALVVMGIVASASVQAAEIYNKDGNKLDVYGKVKAMHYMSDNASKDGDQSYIRFGFKGETQINDQLTGYGRWEAEFAGNKAESDTAQQKTRLAFAGLKYKDLGSFDYGRNLGALYDVEAWTDMFPEFGGDSSAQTDNFMTKRASGLATYRNTDFFGVIDGLNLTLQYQGKNENRDVKKQNGDGFGTSLTYDFGGSDFAISGAYTNSDRTNEQNLQSRGTGKRAEAWATGLKYDANNIYLATFYSETRKMTPITGGFANKTQNFEAVAQYQFDFGLRPSLGYVLSKGKDIEGIGDEDLVNYIDVGATYYFNKNMSAFVDYKINQLDSDNKLNINNDDIVAVGMTYQF

SEQ ID NO: 3377 - protein, 541 aa, Escherichia coli
MAMAAVCGTSGIASLFSQAAFAADSDIADGQTQRFDFSILQSMAHDLAQTAWRGAPRPLPDTLATMTPQAYNSIQYDAEKSLWHNVENRQLDAQFFHMGMGFRRRVRMFSVDPATHLAREIHFRPELFKYNDAGVDTKQLEGQSDLGFAGFRVFKAPELARRDVVSFLGASYFRAVDDTYQYGLSARGLAIDTYTDSKEEFPDFTAFWFDTVKPGATTFTVYALLDSASITGAYKFTIHCEKSQVIMDVENHLYARKDIKQLGIAPMTSMFSCGTNERRMCDTIHPQIHDSDRLSMWRGNGEWICRPLNNPQKLQFNAYTDNNPKGFGLLQLDRDFSHYQDIMGWYNKRPSLWVEPRNKWGKGTIGLMEIPTTGETLDNIVCFWQPEKAVKAGDEFAFQYRLYWSAQPPVHCPLARVMATRTGMGGFPEGWAPGEHYPEKWARRFAVDFVGGDLKAAAPKGIEPVITLSSGEAKQIEILYIEPIDGYRIQFDWYPTSDSTDPVDMRMYLRCQGDAISETWLYQYFPPAPDKRQYVDDRVMS

SEQ ID NO: 3378 - protein, 235 aa, Escherichia coli
MIAMQKNAAHTYAISSLLVLSLTGCAWIPSTPLVQGATSAQPVPGPTPVANGSIFQSAQPINYGYQPLFEDRRPRNIGDTLTIVLQENVSASKSSSANASRDGKTNFGFDTVPRYLQGLFGNARADVEASGGNTFNGKGGANASNTFNGTLTVTVDQVLVNGNLHVVGEKQIAINQGTEFIRFSGVVNPRTISGSNTVPSTQVADARIEYVGNGYINEAQNMGWLQRFFLNLSPM

SEQ ID NO: 3379 - protein, 883 aa, Escherichia coli
MTAFRAAFKAYRMHQVLILPRFARLTIALGLATAVFPVDAEYYFNPRFLSNDLAESVDLSAFTKGREAPPGTYRVDIYLNDEFMTSRDITFIADDNNADLIPCLSTDLLVSLGIKKSALLDNKEHSAEKHVPDNSACTPLQDRLADASTEFDVGQQHLSLSVPQIYVGRMARGYVSPELWEEGINAGLLNYSFNGNSINNRSNHNAGKSNYAYLNLQSGINIGSWRLRDNSTWSYNSGSSNSSNSNKWQHINTSAERDIIPLRSRLTVGDSYTDGDIFDSVNFRGLKINSTEAMLPDSQHGFAPVIHGIARGTAQVSVKQNGYDVYQTTVPPGPFTIDDINSAANGGDLQVTIKEADGSIQTLYVPYSSVPVLQRAGYTRYALAMGEYRSGNNLQSSPKFIQGSLMHGLEGNWTPYGGMQIAEDYQAFNLGIGKDLGLFGAFSFDITQANTTLADGTRHSGQSVKSVYSKSFYQTGTNIQVAGYRYSTQGFYNLSDSAYSRMSGYTVKPPTGDTNEQTQFIDYFNLFYSKRGQEQISISQQLGNYGTTFFSASRQSYWNTSRSDQQISFGLNVPFGDITTSLNYSYSNNIWQNDRDHLLAFTLNVPFSHWMRTDSQSAFRNSNASYSMSNDLKGGMTNLSGVYGTLLPDNNLNYSVQVGNTHGGNTSSGTSGYSSLNYRGAYGNTNVGYSRNGDSSQIYYGMSGGIIAHADGITFGQPLGDTMVLVKAPGADNVKIENQTGIHTDWRGYAILPFATEYRENRVALNANSLADNVELDETVVTVIPTHGAIARATFNAQIGGKVLMTLKYGNKSVPFGAIVTHGENKNGSIVAENGQVYLTGLPQSGKLQVSWGKDKNSNCIVEYKLPEVSPGTLLNQQTAICR

SEQ ID NO: 3380 - protein, 747 aa, Escherichia coli; identical to SEQ ID NO: 2072

SEQ ID NO: 3381 - protein, 161 aa, Escherichia coli; identical to SEQ ID NO: 2582

SEQ ID NO: 3382 - protein, 213 aa, Escherichia coli
MTKMSRYALITALAMFLAGCVGQREPAPVEEVKPAPEQPAEPQQPVPTVPSVPTIPQQPSPIEHEDQTAPPAPHIRHYDWNGAMQPMVSKMLGADGVTAGSVLLVDSVNNRTNGSLNAAEATETLRNALANNGKFTLVSAQQLSMAKQQLGLSPQDSLGTRSKAIGIARNVGAHYVLYSSASGNVNAPTLQMQLMLVQTGEIIWSGKGAVSQQ

SEQ ID NO: 3383 - protein, 120 aa, Escherichia coli
MDAFLSVQGASAPVKKKSFFSKFTRLNMLRLARAVIPAAVLMMFFPQLAMAAQGQDLMASGNTTVKATFGKDSSVVKWVVLAEVLVGAVMYMMTKNVKFLAGFAIISVFIAVGMAVVGLK

SEQ ID NO: 3384 - protein, 729 aa, Escherichia coli
MLSTQFNRDNQHQTTSKPSLLAACIALALLPSAAFAAPATEETVIVEGSATTPVDDENDYSVTSTSAGTKMQMTQRDIPQSVTIVSQQRMEDQQLQTLGEVMENTLGISKSQADSDRALYYSRGFQIDNYMVDGIPTYFESRWNLGDALSDMALFERVEVVRGATGLMTGTGNPSAAINMVRKHATSREFKGDVSAEYGSWNKERYVADLQSPLTEDGKIRARIVGGYQNNDSWLDRYNSEKTFFSGIVDADLGDLTTLSAGYEYQRIDVNSPTWGGLPRWNTDGSSNSYDRARSTAPDWAYNDKEINKVFMTLKQRFADTWQATLNATHSEVEFDSKMMYVDAYVNKADGMLVGPYNNYGPGFDYVGGTGWNSGKRKVDALDLFADGSYELFGRQHNLMFGGSYSKQNNRYFSSWANIFPDEIGSFYNFNGNFPQTDWSPQNLAQDDTTHMKSLYAATRVTLADPLHLILGARYTNWRVDTLTYSMEKNHTTPYAGLVFDINDNWSTYASYTSIFQPQNDRDSSGKYLAPITGNNYELGLKSDWMNSRLTTTLAIFRIEQDNVAQSTGTPIPGSNGETAYKAVDGTVSKGVEFELNGAITDNWQLTFGATRYIAEDNEGNAVNPNLPRTTVKMFTSYRLPVMPELTVGGGVNWQNRVYTDTVTPYGTFRAEQGSYALVDLFTRYQVTKNFSLQGNVNNLFDKTYDTNVEGSIVYGAPRNFSITGTYQF

SEQ ID NO: 3385 - protein, 89 aa, Escherichia coli; identical to SEQ ID NO: 2929

SEQ ID NO: 3386 - protein, 386 aa, Escherichia coli
MVDDVPVAQVLQALAEQEKLNLVVSPDVSGTVSLHLTDVPWKQALQTVVKSAGLITRQEGNILSVHSVAWQNDNIARQEAEQARAQANLPLENRSITLQYADAGELAKAGEKLLSAKGSMTVDKRTNRLLLRDNKAALSALEQWVAQMDLPVGQVELSAHIVTINEKSLRELGVKWTLADAQQAGGVGQVTTLGSDLSVATATTHVGFNIGRINGRLLDLELSALEQKQQLDIIASPRLLASHLQPASIKQGSEIPYQVSSGESGATSVEFKEAVLGMEVTPTVLQKGRIRLKLHISQNVPGQVLQQADGEVLAIDKQEIETQVEVKSGETLALGGIFTRKNKSGQDSVPLLGDIPWFGQLFRHDGKEDERRELVVFITPRLVSSE

SEQ ID NO: 3387 - protein, 331 aa, Escherichia coli; identical to SEQ ID NO: 2700

SEQ ID NO: 3388 - protein, 614 aa, Escherichia coli
MIKKASLLTAFSVTAFSAWAQDTSPDTLVVTANRFEQPRSTVLAPTTVVTRQDIDRWQSTSVNDVLRRLPGVDITQNGGSGQLSSIFIRGTNASHVLVLIDGVRLNLAGVSGSADLSQFPIALVQRVEYIRGPRSAVYGSDAIGGVVNIITTRDEPGTEISAGWGSNSYQNYDVSTQQQLGDKTRVTLLGDYAHTHGYDVVAYGNTGTQAQTDNDGFLSKTLYGALEHNFTDAWSGFVRGYGYDNRTNYDAYYSPGSPLLDTRKLYSQSWDAGLRYNGELIKSQLITSYSHSKDYNYDPHYGRYDSSATLDEMKQYTVQWANNVIVGHGSIGAGVDWQKQTTTPGTGYVEDGYDQRNTGIYLTGLQQVGDFTFEGAARSDDNSQFGRHGTWQTSAGWEFIEGYRFIASYGTSYKAPNLGQLYGFYGNPNLDPEKSKQWEGAFEGLTAGVNWRISGYRNDVSDLIDYDDHTLKYYNEGKARIKGVEATANFDTGPLTHTVSYDYVDARNAITDTPLLRRAKQQVKYQLDWQLYDFDWGITYQYLGTRYDKDYSSYPYQTVKMGGVSLWDLAVAYPVTSHLTVRGKIANLFDKDYETVYGYQTAGREYTLSGSYTF

SEQ ID NO: 3389 - protein, 331 aa, Escherichia coli; identical to SEQ ID NO: 2700

SEQ ID NO: 3390 - protein, 868 aa, Escherichia coli
MKLPYDGKKIQRSPLACLIACSLLPCTQNVWGADETVEFDNTFLMGAGARDIDVNRYSKGNATLPGRYDVSVFINNQASANLKIEFIELDPKHAAQPCISANTLLQLHIRQPEKLTDNAILQKRENAAQDCLNLEVAIPQSSVAYNSNDQRLDISMPQIWLQRTYANYVDASLWDEGINAAMLSYTLNGWRSESPNQTTETSYAGLMGGINLWGWHFRSHGNYSWDKEDGGSFEFQDKYLQRDIAALRSQLVMGETNTTGETFDSVPIRGMRLYSESRMLPPTLASYAPVIRGVANSNAKVTITQNGYKIYETTVPPGPFAIDDLTPAGFGADLEVTITESDGSKRTFSQAYSSVIQMMRPGVGKWDISGGEVNKEELQDKPNLLQGTYYYGLSNTFTGYTGLQMTDNGYWAGLLGVGMNTSLGAFSFDVTQSHAEIPDDKTYSGQSYRISWNKYFAPTETSLNIAAYRYSTENYLGLNDALTLINSANHPDEEDYSGIVSYARMKNQFSVSINQTLKSDERDYGSFYVNGTWTDYWVTNESQSSFSFGYSNSFNWASYSVSLQRTYDEDNKKDDSVYLSVTIPLDKLLGRDSRQGGFKTLNTSVNSDMKGSSQYNAIASGYSQDNRWSYSVNTAYNAQKNSDSLKSISGYTSYESPWGTFSGSASTSSDHSRQYGLSTDGGFVLHRHGLTFSNDSFTDSDTLALINAPGAKGARINFGNSTIDRFGYGVSSSLSPYRENTVVLDVNDLDNDVELKNTSSIAIPRQGSVIFSHFDTDTGRSAILNLLRSNNQPVPFASDITDEKGTSIGTVGQGSQAFVRGIADSGELTVTWYEKNSRQQCRIHYQIPSSPTMTGKTIVLNGVPCTQQ

SEQ ID NO: 3391 - protein, 746 aa, Escherichia coli
MNKKIHSLALLVNLGIYGVAQAQEPTDTPVSHDDTIVVTAAEQNLQAPGVSTITADEIRKNPVARDVSEIIRTMPGVNLTGNSTSGQRGNNRQIDIRGMGPENTLILIDGKPVSSRNSVRQGWRGERDTRGDTSWVPPEMIERIEVLRGPAAARYGNGAAGGVVNIITKKGSGEWHGSWDAYFNAPEHKEEGATKRTNFSLTGPLGDQFSFRLYGNLDKTQADAWDINQGHQSARAGTYATTLPAGREGVINKDINGVVRWDFAPMQSLELEAGYSRQGNLYAGDTQNTNSDAYTRSKYGDETNRLYRQNYSLTWNGGWDNGVTTSNWVQYEHTRNSRIPEGLAGGTEGKFNEKATQDFVDIDLDDVMLHSEVNLPIDFLVNQTLTLGTEWNQQRMKDLSSNTQALTGTNTGGAIDGVSATDRSPYSKAEIFSLFAENNMELTDSTIVTPGLRFDHHSIVGNNWSPALNISQGLGDDFTLKMGIARAYKAPSLYQTNPNYILYSKGQGCYASAGGCYLQGNDDLKAETSINKEIGLEFKRDGWLAGVTWFRNDYRNKIEAGYVAVGQNAVGTDLYQWDNVPKAVVEGLEGSLNVPVSETVMWTNNITYMLKSENKTTGDRLSIIPEYTLNSTLSWQAREDLSMQTTFTWYGKQQPKKYNYKGQPAVGPETKEISPYSIVGLSATWDVTKNVSLTGGVDNLFDKRLWRAGNAQTTGDLAGANYIAGAGAYTYNEPGRTWYMSINTHF

SEQ ID NO: 3392 - protein, 230 aa, Escherichia coli
MMTKIKLLMPIIFYLIISASAHAAGGIALGATRIIYPADAKQTAVWIRNSHTNERFLVNSWIENSSGVKEKSFIITPPLFVSEPKSENTLRIIYTGPPLAADRESLFWMNVKTIPSVDKNALNGRNVLQLAILSRMKLFLRPIQLQELPAEAPDTLKFSRSGNYINVHNPSPFYVTLVNLQVGSQKLGNAMAAPRVNSQIPLPSGVRGKLKFQTVNDYGSVTPVREVNLN

SEQ ID NO: 3393 - protein, 232 aa, Escherichia coli; identical to SEQ ID NO: 2087

SEQ ID NO: 3394 - protein, 446 aa, Escherichia coli
MMITLRKLPLAVAVAAGVMSAQAMAVDFHGYARSGIGWTGSGGEQQCFQTTGAQSKYRLGNECETYAELKLGQEVWKEGDKSFYFDTNVAYSVAQQNDWEATDPAFREANVQGKNLIEWLPGSTIWAGKRFYQRHDVHMIDFYYWDISGPGAGLENIDVGFGKLSLAATRSSEAGGSSSFASNNIYDYTNETANDVFDVRLAQMEINPGGTLELGVDYGRANLRDNYRLVDGASKDGWLFTAEHTQSVLKGFNKFVVQYATDSMTSQGKGLSQGSGVAFDNEKFAYNINNNGHMLRILDHGAISMGDNWDMMYVGMYQDINWDNDNGTKWWTVGIRPMYKWTPIMSTVMEIGYDNVESQRTGDKNNQYKITLAQQWQAGDSIWSRPAIRVFATYAKWDEKWGYDYNGSSSTNPYYGKAVPADFNGGSFGRGDSDEWTFGAQMEIWW

SEQ ID NO: 3395 - protein, 244 aa, Escherichia coli
MCQFVVSAVFIASTAVFSLTAQADIVLSGTRIIYNADQKDVTLRMENKGARPLLVQTWIDTGSENADPSTLKVPFTVTPPVSRVDGKKGQTVKIAWNASQTLPADRESIYWFNALEVPPKMSDADAKGKNILQLAFRTRIKLFYRPTGLAGNPADAPKQLTWRLQSSAGKVVLQATNPTPYHVSFSSITLGSGGNKYTVETSMVAPMSSAEMVVKGAPRSVSGATVDYSAINDFGGGIDGQVKL

SEQ ID NO: 3396 - protein, 274 aa, Escherichia coli; identical to SEQ ID NO: 2303

SEQ ID NO: 3397 - protein, 191 aa, Escherichia coli; identical to SEQ ID NO: 2727

SEQ ID NO: 3398 - protein, 618 aa, Escherichia coli
MNQNDGNDNHEQSGEISRTYLFRPLPQLGSKLTLGETDFSSNIFDGFSYTGAALASDDRMLPWELRGYAPQISGIAQTNATVTISQSGRVIYQKKVPPGPFIIDDLNQSVQGTLDVKVTEEDGRVNNFQVSAASTPFLTRQGQVRYKLAAGQPRTSMSHQTENETFFSNEVSWGMLSNTSLYGGLLISGDDYHSAAMGIGQNMLWLGALSFDVTWASSQFDTQQDERGLSYRFNYSKQVDATNSTISLAAYRFSDRHFHSYANYLDHKYNDNDAQDEKQTISLSVGQPITPLNLNLYANLLHQTWWNADASTTANITAGFNVDIGNWRDISISTSFNTTHYEDKDRDNQIYLSISLPFGNGGRVGYDMQNSSHSTTHRMSWNDTLDERNSWGMSAGLQSDRPDNGAQVSGNYQHLSSAGEWDLSGTYAANDYSSVSSSWSGSFTATQYGAAFHRRSSTNEPRLMVSTDGVADIPVQGNLDYTNHFGIAVVPLVSSYQPSTVAVNMNDLPDGVTVTENVIKETWIEGAIGYKSLASRSGKDINVIIRNASGQFPPLGADIRQDGSSISVGMVGEEGHAWLSGVAENQKFTVVWGDSQRCSIHLPEHMEDTANRLILPCH

SEQ ID NO: 3399 - protein, 162 aa, Escherichia coli; identical to SEQ ID NO: 1967

SEQ ID NO: 3400 - protein, 252 aa, Escherichia coli
MKLMRYLNTKNLIAAGVLLACMSSIAWGAIIPDRTRIIMNESDKGEALKLTNQSKNLPYLAQTWIEDTKGNKSRDFIVTVPPMVRLNPSEQIQIRMISQEKIAQLPNDRETLFYFNVREIPPKTDKKNVMQVTMQHALKLFWRPKAIELEDDGVMSYEKVEIIRRNDGSIRFNNKMPYHVTLGYIGTNGITMLPQTQSLMVTPYSHADTQFKNVPSAFQVGYINDFGGLSFYEINCPTVNNSCNVSVAKRDK

SEQ ID NO: 3401 - protein, 784 aa, Escherichia coli
MKKRIPTLLATMIATALYSQQGLAADLASQCMLGVPSYDRPLVQGDTNDLPVTINADHAKGDYPDDAVFTGSVDIMQGNSRLQADEVQLHQKEAPGQPEPVRTVDALGNVHYDDNQVILKGPKGWANLNTKDTNVWEGDYQMVGRQGRGKADLMKQRGENRYTILDNGSFTSCLPGSDTWSVVGSEIIHDREEQVAEIWNARFKVGPVPIFYSPYLQLPVGDKRRSGFLIPNAKYTTTNYFEFYLPYYWNIAPNMDATITPHYMHRRGNIMWENEFRYLSQAGAGLMELDYLPSDKVYEDEHPNDDSSRRWLFYWQHSGVMDQVWRFNVDYTKVSDPSYFNDFDNKYGSSTDGYATQKFSVGYAVQNFNATVSTKQFQVFSEQNTSSYSAEPQLDVNYYQNDVGPFDTRIYGQAVHFVNTRDDMPEATRVHLEPTINLPLSNNWGSINTEAKLLATHYQQTNLDWYNSRNTTKLDESVNRVMPQFKVDGKMVFERDMEMLAPGYTQTLEPRAQYLYVPYRDQSDIYNYDSSLLQSDYSGLFRDRTYGGLDRIASANQVTTGVTSRIYDDAAVERFNISVGQIYYFTESRTGDDNITWENDDKTGSLVWAGDTYWRISERWGLRGGIQYDTRLDNVATSNSSIEYRRDEDRLVQLNYRYASPEYIQATLPKYYSTAEQYKNGISQVGAVASWPIADRWSIVGAYYYDTNANKQADSMLGVQYSSCCYAIRVGYERKLNGWDNDKQHAVYDNAIGFNIELRGLSSNYGLGTQEMLRSNILPYQNTL

SEQ ID NO: 3402 - protein, 386 aa, Escherichia coli; identical to SEQ ID NO: 3072

SEQ ID NO: 3403 - protein, 322 aa, Escherichia coli
PTVNANKQVTAFSSSQQDTDQYGMKLTLNSKPMDGWQITWGLDADHERFTSNQMFFDLAQASASGGLNNKKIYTTGRYPSYDITNLAAFLQSGYDINNLFTLNGGVRYQYTENKIDDFIGYAQQRQIAAGKATSADAIPGGSVDYDNFLFNAGLLMHITERQQAWLNFSQGVELPDPGKYYGRGIYGAAVNGHLPLTKSVNVSDSKLEGVKVDSYELGWRFTGNNLRTQIAAYYSISDKSVVANKDLTISVVDDKRRIYGVEGAVDYLIPDTDWSTGVNFNVLKTESKVNGTWQKYDVKTASPSKATAYIGWAPDPWSLRVQ

SEQ ID NO: 3404 - protein, 637 aa, Escherichia coli
MLAVDDDGETMVVTASSVEQNLKDAPASISVITQEDLQRKPVQNLKDVLKEVPGVQLTNEGDNRKGVSIRGLDSSYTLILVDGKRVNSRNAVFRHNDFDLNWIPVDSIERIEVVRGPMSSLYGSDALGGVVNIITKKIGQKWSGTVTVDTTIQEHRDRGDTYNGQFFTSGPLIDGVLGMKAYGSLAKREKDDPQNSTTTDTGETPRIEGFSSRDGNVEFAWTPNQNHDFTAGYGFDRQDRDSDSLDKNRLERQNYSVSHNGRWDYGTSELKYYGEKVENKNPGNSSPITSESNTVDGKYTLPLTAINQFVTVGGEWRHDKLSDAVNLTGGTSSKTSASQYALFVEDEWRIFEPLALTTGVRMDDHETYGEHWSPRAYLVYNATDTVTVKGGWVTAFKAPSLLQLSPDWTSNSCRGACKIVGSSDLKPETSESWELGLYYMGEEGWLEGVESSVTVFRNDVKDRISISRTSDVNAAPGYQNFVGFTADGVPVFSYYNVNKARIQGVETELKIPFNDEWKLSINYTYNDGRDVSNGENKPLSDLPFHTANGTLDWKPLALEDWSFYVSGHYTGQKRADSATAKTPGGYTIWNTGAAWQVTKDVKLRAGVLNLGDKDLSRDDYSYNEDGRRYFMAVDYRF

SEQ ID NO: 3405 - protein, 208 aa, Escherichia coli; identical to SEQ ID NO: 1949

SEQ ID NO: 3406 - protein, 268 aa, Escherichia coli
MLPDSMQSFTPLVQGIAQSNALITVSQNGYIIYQKEVPPGPFTIADLQLSGSGSDLDVSIKEADGSVRSFLVPYSSVPNMLQPGVSNFDFIAGRSKIYGVKNQEDFLEANYIYGLNNLLTLYGGTILSDNYNAITLGNGWNTPLGAISFDATRSSSKLNNDITHEGTSYQVAYNKYLVQTATRFSVAAWRYASQDYRTFSDHLYENDKHNHHSEYDDFYDIGRKNSLSANIMQPLSTGIKIALNDEQNLFCTITFKNVIDENKTYICQ

SEQ ID NO: 3407 - protein, 204 aa, Escherichia coli; identical to SEQ ID NO: 2957

SEQ ID NO: 3408 - protein, 431 aa, Escherichia coli
MMKQALRVAFGFLILWASVLHAEVRIVIDSGVDSGRPIGVVPFQWAGPGAAPEDIGGIVAADLRNSGKFNPLDRARLPQQPGSAQEVQPAAWSALGIDAVVVGQVTPNPDGSYNVAYQLVDTGGAPGTVLAQNSYKVNKQWLRYAGHTASDEVFEKLTGIKGAFRTRIAYVVQTNGGQFPYELRVSDYDGYNQFVVHRSPQPLMSPAWSPDGSKLAYVTFESGRSALVIQTLANGAVRQVASFPRHNGAPAFSPDGSKLAFALSKTGSLNLYVMDLASGQIRQVTDGRSNNTEPTWFPDSQNLAFTSDQAGRPQVYKVNINGGAPQRITWEGSQNQDADVSSDGKFMVMVSSNGGQQHIAKQDLATGGVQVLSSTFLDETPSLAPNGTMVIYSSSQGMGSVLNLVSTDGRFKARLPATDGQVKFPAWSPYL

SEQ ID NO: 3409 - protein, 554 aa, Escherichia coli
MALIPACIFLCFAALSVQAEETPVTPQPPDILLGPLFNDVQNAKLFPDQKTFADAVPNSDPLMILADYRMQQNQSGFDLRHFVNVNFTLPKEGEKYVPPEGQSLREHIDGLWPVLTRSTENTEKWDSLLPLPEPYVVPGGRFREVYYWDSYFTMLGLAESGHWDKVADMVANFAHEIDTYGHIPNGNRSYYLSRSQPPFFALMVELLAQHEGDAALKQYLPQMQKEYAYWMDGVENLQAGQQEKRVVKLQDGTLLNRYWDDRDTPRPESWVEDIATAKSNPNRPATEIYRDLRSAAASGWDFSSRWMDNPQQLNTLRTTSIVPVDLNSLMFKMEKILARASKAAGDNAMANQYETLANARQKGIEKYLWNDQQGWYADYDLKSHKVRNQLTAAALFPLYVNAAAKDRANKMATATKTHLLQPGGLNTTSVKSGQQWDAPNGWAPLQWVATEGLQNYGQKEVAMDISWHFLTNVQHTYDREKKLVEKYDVSTTGTGGGGGEYPLQDGFGWTNGVTLKMLDLICPKEQPCDNVPATRPTVKSATTQPSTKEAQPTP

SEQ ID NO: 3410 - protein, 245 aa, Escherichia coli
MKMTFMKGLPLLLLVASLCSHAALQPDRTRIVFNANDKATSLRVDNRSDKLPYLAYSWLENEKGEKSDDLLVALPPIQRLEPKATTQVRIVKQASTTKLPGDRETLFFYNMREIPPAPEKNSDHAVLQVAIQSRIKVFWRPAALRKKAGEKVELQLQVSQQGNQLTLKNPTAYYLTIAYLGRNEKGVLPGFKTVMVAPFSTVNTNTGNYSGSQFYLGYMDDYGALRMTTLNCSGQCHLQAVEAKK

SEQ ID NO: 3411 - protein, 243 aa, Escherichia coli; identical to SEQ ID NO: 2910

SEQ ID NO: 3412 - protein, 203 aa, Escherichia coli; identical to SEQ ID NO: 2201

SEQ ID NO: 3413 - protein, 170 aa, Escherichia coli; identical to SEQ ID NO: 2565

SEQ ID NO: 3414 - protein, 360 aa, Escherichia coli; identical to SEQ ID NO: 3354

SEQ ID NO: 3415 - protein, 362 aa, Escherichia coli; identical to SEQ ID NO: 2434

SEQ ID NO: 3416 - protein, 380 aa, Escherichia coli
MNIYRAVTSFFNNSSKKGLTMKKLTVAISAVAASVLMAMSAQAAEIYNKDSNKLDLYGKVNAKHYFSSNDADDGDTTYARLGFKGETQINDQLTGFGQWEYEFKGNRAESQGSSKDKTRLAFAGLKFGDYGSIDYGRNYGVAYDIGAWTDVLPEFGGDTWTQTDVFMTGRTTGVATYRNNDFFGLVDGLNFAAQYQGKNDRTDVTEANGDGFGFSTTYEYEGFGVGATYAKSDRTNNQVIYGNNSLNASGQNAEVWAAGLKYDANNIYLATTYSETQNMTVFGNNHIANKAQNFEVVAQYQFDFGLRPSVAYLQSKGKDLGAWGDQDLVEYIDVGATYYFNKNMSTFVDYKINLIDKSDFTKASGVATDDIVAVGMVYQF

SEQ ID NO: 3417 - protein, 230 aa, Escherichia coli; identical to SEQ ID NO: 2580

SEQ ID NO: 3418 - protein, 236 aa, Escherichia coli
MQTTRTPYSVSFMATVLLSLVFLCHSTIANAAVALGATRVIFPANQKQVLLPVTNNDPASVYLIQSWIENAGDQKDTQFVITPPLFSMQGKKENTLRIINATNHQLPGDRESLFWVNVKAIPAMEKDQKNANTLQLAIISRIKMFYRPTNLAMAPDQAPEMLRFRRSGSKLTLINPTPYFITVTNMKAGNSDLPNTMVPPKGEISVDFPHGASGDISFQTINDYGALTPRIKATMQ

SEQ ID NO: 3419 - protein, 111 aa, Escherichia coli
MKKQIEGMTMKKVLALVVAAAMGLSSAAFAAETATTPAPTATTTKAAPAKTTHHKKQHKAAPAQKAQAAKKHHKNAKAEQKAPEQKAQAAKKHAKKHSHQQPAKPAAQPAA

SEQ ID NO: 3420 - protein, 430 aa, Escherichia coli; identical to SEQ ID NO: 2617

SEQ ID NO: 3421 - protein, 200 aa, Escherichia coli
MLAFCRSSLKSKKYFIILLVLAAIAGLGTHAAWSSNGLPRIDNKTLARLAQQHTVVVLFRHAERCDRSTNQCLSDKTGITVKGTQDARELGNAFSADIPDFDLYSSNTVRTIQSATWFSAGKKLTVDKRLLQCGNEIYSAIKDLQSKAPDKNIVIFTHNHCLTYIAKDKRDATFKPDYLDGLVMHVEKGKVYLDGEFVNH

SEQ ID NO: 3422 - protein, 446 aa, Escherichia coli; identical to SEQ ID NO: 2176

SEQ ID NO: 3423 - protein, 210 aa, Escherichia coli
MTCAGVVIGGTRVVYLSNNADKSISVFSKEEKIPYLIQAWVDPFNKDDKTKAPFIVIPPVSRLEPAQEKILRIVHTKGLSLPEDRESVFWLNIKNIPPSASSKEANSLEIAVKTRIKLFWRPASIRMIPEDAAPKVKWHREGRNLIAENPNPIHISVMDVIVDGHDVPLNMIRPFETLTLPLPANSSGSQMTWRFINDYGAISEPLKQAL

SEQ ID NO: 3424 - protein, 784 aa, Escherichia coli; identical to SEQ ID NO: 2244

SEQ ID NO: 3425 - protein, 700 aa, Escherichia coli
MKIFSVRQTVLPALLVLSPVVFAADEQTMIVSAAPQVVSELDTPAAVSVVDGEEMRLATPRINLSESLTGVPGLQVQNRQNYAQDLQLSIRGFGSRSTYGIRGIRLYVDGIPATMPDGQGQTSNIDLSSVQNVEVLRGPFSALYGNASGGVMNVTTQTGQQPPTIEASSYYGSFGSWRYGLKATGATGDGTQPGDVDYTVSTTRFTTHGYRDHSGAQKNLANAKLGVRIDDASKLSLIFNSVDIKADDPGGLTEAEWKANPQQAPRAEQYDTRKTIKQTQAGLRYERSLSSQDDMSVMMYAGERETTQYQSIPMAPQLNPSHAGGVITLQRHYQGIDSRWTHRGELGVPVTFTTGLNYENMSENRKGYNNFRLNSGVPEYGQKGELRRDERNLMWNVDPYLQTQWQLSEKLSLDAGVRYSSVWFDSNDHYVTPGNGDDSGDASYHKWLPAGSLKYAMTDAWNIYLAAGRGFETPTINELSYRADGQSGMNFGLKPSTNDTIEIGSKTRIGDGLLSLALFQTDTDDEIVVDSSSGGRTTYKNAGKTRRQGAELAWDQRFAGDFRIKASWTWLDATYRSNVCNDQDCNGNRMPGIARNMGFSSIGYVPEDGWYAGTEARYMGDIMADDENTAKAPSYTLVGLFSGYKYNYHNLTVDLFGRVDNLFDKEYVGSVIVNESNGRYYEPAPGRNYGIGVNVAWRFE

SEQ ID NO: 3426 - protein, 774 aa, Escherichia coli
MTPLRVFRKTTPLVNAIRLSLLPLAGLSFSAFAAQVNIAPGSLDKALNQYAAHSGFTLSVDASLTRGKQSNGLHGDYDVESGLQQLLDGSGLQVKPLGNNSWTLEPAPAPKEDALTVVGDWLGDARENDVFEHAGARDVIRREDFAKTGATTMREVLNRIPGVSAPENNGTGSHDLAMNFGIRGLNPRLTSRSTVLMDGIPVPFAPYGQPQLSLAPVSLGNMDAIDVVRGGGAVRYGPQSVGGVVNFVTRAIPQDFGIEAGVEGQLSPTSSQNNPKETHNLMVGGTADNGFGTALLYSGTRGSDWREHSATRIDDLMLKSKYAPDEVHTFNSLLQYYDGEADMPGGLSRADYDADRWQSTRPYDRFWGRRKLASLGYQFQPDSQHKFNIQGFYTQTLRSGYLEQGKRITLSPRNYWVRGIEPRYSQIFMIGPSAHEVGVGYRYVNESTHEMRYYTATSSGQLPSGSSPYDRDTRSGTEAHAWYLDDKIDIGNWTITPGMRFEHIESYQNNAITGTHEEVSYNAPLPALNVLYHLTDSWNLYANTEGSFGTVQYSQIGKAVQSGNVEPEKARTWELGTRYDDGALTAEMGLFLINFNNQYDSNQTNDTVTARGKTRHTGLETQARYDLGTLTPTLDNVSIYASYAYVNAEIREKGDTYGNLVPFSPKHKGTLGVDYKPGNWTFNLNSDFQSSQFADNANTVKESADGSTGRIPGFMLWGARVAYDFGPQMADLNLAFGVKNIFDQDYFIRSYDDNNKGIYAGQPRTLYMQGSLKF

SEQ ID NO: 3427 - protein, 250 aa, Escherichia coli
MFNLTNTAKIVVPALALLATAVSFSSHASVTPDRTRLVFNESDKSISVTLRNNDPTLPYLAQSWIEDAKGNKISSPLAVLPPVQRIDAMMNGQVKVQGLPDINKLPADRESVFYFNVREIPPKSNKPNTLQIALQTRIKLFWRPKALENTSMKSPWQHKVTLIRNGQDFTVNNPTPYYVIISNASAKKGGNPPAGFTPLMMEPKTSAPLNAKMDSVPVLTYINDYGARMPLYFICTGNSCQVDEEQSRKG

SEQ ID NO: 3428 - protein, 828 aa, Escherichia coli; identical to SEQ ID NO: 2388

SEQ ID NO: 3429 - protein, 517 aa, Escherichia coli; identical to SEQ ID NO: 3116

SEQ ID NO: 3430 - protein, 729 aa, Escherichia coli
MLSTQFNRDNQYQAITKPSLLAGCIALALLPSAAFAAPATEETVIVEGSATAPDDGENDYSVTSTSAGTKMQMTQRDIPQSVTIVSQQRMEDQQLQTLGEVMENTQGISKSQADSDRALYYSRGFQIDNYMVDGIPTYFESRWNLGDALSDMALFERVEVVRGATGLMTGTGNPSAAINMVRKHATSREFKGDVSAEYGSWNKERYVADLQSPLTEDGKIRARIVGGYQNNDSWLDRYNSEKTFFSGIVDADLGDLTMLSAGYEYQRIDVNSPTWGGLPRWNTDGSSNSYDRARSTAPDWAYNDKEINKVFMTLKQRFADTWQATLNATHSEVEFDSKMMYVDAYVNKADGMLVGPYSNYGPGFDYVGGTGWNSGKRKVDALDLFADGSYELFGRQHNLMFGGSYSKQNNRYFSSWANIFPDEIGSFYNFNGNFPQTDWSPQSLAQDDTTHMKSLYAATRVTLADPLHLILGARYTNWRVDTLTYSMEKNHTTPYAGLVFDINDNWSTYASYTSIFQPQNDRDSSGKYLAPITGNNYELGLKSDWMNSRLTTTLAIFRIEQDNVAQSTGTPIPGSNGETAYKAVDGTVSKGVEFELNGAITDNWQLTFGATRYIAEDNEGNAVNPNLPRTTVKMFTSYRLPVMPELTVGGGVNWQNRVYTDTVTPYGTFRAEQGSYALVDLFTRYQVTKNFSLQGNVNNLFDKTYDTNVEGSIVYGAPRNFSITGTYQF

SEQ ID NO: 3431 - protein, 224 aa, Escherichia coli
MATVLLLLLFACHSTVANAAVALGATRVIYPANQKQVLLPVTNNDPASVYLIQSWIENAGDQKDTQFVITPPLFSMQGKKENTLRIINATNHQLPGDRESLFWVNVKAIPAMEKDQKNENTLQLAIISRIKMFYRPTNLAMAPEEAPAMLRFRRSGSKLTLINPTPYFITVTNMKAGNSNLPNTMVPPKGEVSVDIPHAATGDISFQTINDYGALTPRIKATMQ

SEQ ID NO: 3432 - protein, 243 aa, Escherichia coli
MTFMKGLPLLLLVTSLCSHAALQPDRTRIVFNANDKATSLRVDNRSDKLPYLAYSWLENEKGEKSDDLLVALPPIQRLEPKATTQVRIVKQASTAKLPGDRETLFFYNMREIPPAPEKNSDHAVLQVAIQSRIKVFWRPSALRKKAGEKVELQLQVSQQGNQLSLKNPTGYYLTIAYLGRNEQSVLPGFKTVMIAPFSTVSTTTGNYSGSQFYLGYMDDYGALRMTTLNCNGQCRLQAVEAKK

SEQ ID NO: 3433 - protein, 213 aa, Escherichia coli; identical to SEQ ID NO: 2232

SEQ ID NO: 3434 - protein, 122 aa, Escherichia coli; identical to SEQ ID NO: 2915

SEQ ID NO: 3435 - protein, 274 aa, Escherichia coli
MNKTAIALLALLASSASLAATPWQKITQPVPGSAQSIGSFSNGCIVGADTLPIQSEHYQVMRTDQRRYFGHPDLVMFIQRLSSQVSNLGMGTVLIGDMGMPAGGRFNGGHASHQTGLDVDIFLQLPKKRWTSAQLLRPQALDLVSRDGKHVVPALWKPEIFSLIKLAAQDKDVTRIFVNPAIKQQLCLDAGTDRDWLRKVRPWFQHRAHMHVRLRCPADSLECEDQPLPPPGDGCGAELQSWFEPPKPGTTKPEKKTPPPLPPSCQALLDEHVI

SEQ ID NO: 3436 - protein, 478 aa, Escherichia coli
MTRIKINARRIFSLLIPFFFFTSVHAEQTAAPAKPVTVEAKNETFAPQHPDQYLSWKATSEQSERVDALAEDPRLVILWAGYPFSRDYNKPRGHAFAVTDVRETLRTGAPKNAEDGPLPMACWSCKSPDVARLIQKDGEDGYFHGKWARGGPEIVNNLGCADCHNTASPEFAKGKPELTLSRPYAARAMEAIGKPFEKAGRFDQQSMVCGQCHVEYYFDGKNKAVKFPWDDGMKVENMEQYYDKIAFSDWTNSLSKTPMLKAQHPEYETWTAGIHGKNNVTCIDCHMPKVQNAEGKLYTDHKIGNPFDNFAQTCANCHTQDKAALQKVVAERKQSINDLKIKVEDQLVHAHFEAKAALDAGATEAEMKPIQDDIRHAQWRWDLAIASHGIHMHAPEEGLRMLGTAMDKAADARTKLARLLATKGITHEIQIPDISTKEKAQQAIGLNMEQINAEKQDFIKTVIPQWEEQARKNGLLSQ

SEQ ID NO: 3437 - protein, 224 aa, Escherichia coli
MKGLLALLISSMVLPAHAGIVIYGTRIIYPAENKEVMVQLMNQGNRSSLLQAWIDDGDTSLPPEKIQVPFMLTPPVAKIGANSGQQVKIKIMSNKLPTNKESIFYLNVLDIPPNSPEQEGKNALKFAMQNRIKLFYRPAGIAPVNKATFKKLLVNRSGNGLVIKNDSANWVTISDVKANNVKVNYETIMIAPLESQSVNVKTNNANSWHLTIIDDHGNYISDKI

SEQ ID NO: 3438 - protein, 236 aa, Escherichia coli
MTNTWNRLALLIFAVLSLLVAGELRAGVVVGGTRFIFPADRESISILLTNTSQESWLINSKINRPTRWAGGEASTVPAPLLAAPPLILLKPGTTGTLRLLRTESDILPVDRETLFELSIASVPSGKVENQSVKVAMRSVFKLFWRPEGLPGDPLEAYQQLRWTRNSQGVQLTNPTPYYINLIQLSVNGKALSNAGVVPPKSQRQTSWCQAIAPCHVAWRAINDYGGLSAKKEQNLP

SEQ ID NO: 3439 - protein, 231 aa, Escherichia coli; identical to SEQ ID NO: 3055

SEQ ID NO: 3440 - protein, 193 aa, Escherichia coli; identical to SEQ ID NO: 2246

SEQ ID NO: 3441 - protein, 191 aa, Escherichia coli; identical to SEQ ID NO: 2727

SEQ ID NO: 3442 - protein, 246 aa, Escherichia coli
MKSLLTVTGMICLLGFCNFAQATVSPDRTRIIFNASNKSATVRLTNQSKIDPYLAQSWIEDASGKKTRDYISTLPPMERIEANEQVQIRLMALSALNNLPQDRETLFYYNVREIPPRAKEQNVMQIAMQSRLKLFWRPKSIELKEGEMVPLQKLTITHSAAGLTLNNPTPYHITVGYIGTNGKTLMPGTDSIMVTPFGTATQQIKNLPTTFLLGFVGDYGGLEMFKIDCNSVQSLCQATPAKKGKL

SEQ ID NO: 3443 - protein, 760 aa, Escherichia coli
MENNRNFPARQFHSLTFFAGLCIGITPVAQALAAEGQTNADDTLVVEASTPSLYAPQQSADPKFSRPVADTTRTMTVISEQVIKDQGATNLTDALKNVPGVGAFFAGENGNSTTGDAIYMRGADTSNSIYIDGIRDIGSVSRDTFNTEQVEVIKGPSGTDYGRSAPTGSINMISKQPRNDSGIDASASIGSAWFRRGTLDVNQVIGDTTAVRLNVMGEKTHDAGRDKVKNERYGVAPSVAFGLGTANRLYLNYLHVTQHNTPDGGIPTIGLPGYSAPSAGTAALNHSGKVDTHNFYGTDSDYDDSTTDTATMRFEHDISENTTIRNTTRWSRVKQDYLMTAIMGGASNITQPTSNVDSWTWSRIANTKDVSNKILTNQTNLTSTFYTGSIGHDVSTGVEFTRETQTNYGVNPLTLPAVNIYHPGSSIHPGGLTRNGANANGQTDTFAIYAFDTLQITRDFELNGGIRLDNYHTEYDSATACGGSGRGAVTCPAGVAKGSPVTTVDTAKSGNLVNWKAGALYHLTENGNVYINYAVSQQPPGGNNFALAQSGSGNSANRTDFKPQKANTSEIGTKWQVLDKRLLLTAALFRTDIENEVEQNDDGTYSQYGKKRVEGYEISVAGNITPAWQVIGGYTQQKATIKNGKDVAQDGSSSLPYTPEHAFTLWSQYQATDDISVGAGARYIGSMHKGSDGAVGTPAFTEGYWVADAKLGYRVNRNLDFQLNVYNLFDTDYVASINKSGYRYHPGEPRTFLLTANMHF

SEQ ID NO: 3444 - protein, 245 aa, Escherichia coli
MPARHLYFIMTNPWNRLTLSIFAVLSLLVAGELQAGVVVGGTRFIFPAHRESISISLTNTSQESWLINSKINRSTRWAGGEASTVPVPLLAAPPLVFLKPSTTGTLRLLRTESDMLPVDRETLFELNIASVPSGKVENQNVKVAMRSVFKLFWRPEGLPGDPLEAYQQLRWSRNSQGLQLTNPTPYYINLIQVSVNGKALSNAGVVPPKSQRQTSWCQAIAPCHVAWRAINDYGGLSAKKEQDLP

SEQ ID NO: 3445 - protein, 249 aa, Escherichia coli
MYTLTRSATRVAPALALLVAASFTTHASVTPDRTRLIFNEGDKSISVTLRNNDPKQPYLAQSWMEDEKGNKISSPLTVLPPVQRIDAMMNGQVKVQGMPDINKLPADRESMFYFNVREIPPKSNKPNTLQIALQTRIKLFWRPKALAKINMRDPWQHKVTLTRNGQAFTVNNPTPYYVIISNASTQKNGNPAAGFTPLVMPPKSSAPLNVKMDTVPVLTYVNDYGARLSLNFKCTGNNCQVDAEQSRKG

SEQ ID NO: 3446 - protein, 686 aa, Escherichia coli; identical to SEQ ID NO: 3129

SEQ ID NO: 3447 - protein, 118 aa, Escherichia coli [sequence omitted]

SEQ ID NO: 3448 - protein, 351 aa, Escherichia coli
MKKSTLALVVMGIVASASVQAAEIYNKDGNKLDIYGKVKAMHYMSDNDSKDGDQSYIRFGFKGETQINDQLTGYGRWEAEFAGNKAESDTAQQKTRLAFAGLKYKDLGSFDYGRNLGALYDVEAWTDMFPEFGGDSSAQTDNFMTKRASGLATYRNTDFFGVIDGLNLTLQYQGKNENRDVKKQNGDGFGTSLTYDFGGSDFAISGAYTNSDRTNEQNLQSRGTGKRAEAWATGLKYDANNIYLATFYSETRKMTPISGGFANKTQNFEAVAQYQFDFGLRPSLGYVLSKGKDIEGIGDEDLVNYIDVGATYYFNKNMSAFVDYKINQLDSDNKLNINNDDIVAVGMTYQF

SEQ ID NO: 3449 - protein, 656 aa, Escherichia coli
MRLKKRYLCTVLSLAFTQQAVAAQESDTLTVWSSPVSSTTTTVLDQPTMKALDKQNVAQALSVVPGVVLQKSGSRNEEQVKVRGFDSRQVPVYFDGVPIYVPYDGNLDLARILTNNLGAVEVSKGYSSLLQGPNQMGGAINITPQKPTKPLEASLGYRQGWSRSQDNAYDMHASFAASSDLGYLQVSGSQLKQDFLGLPHGVNNDIAGKHGKMINSSADDKRGIVKLGFTPRENEEYTLTYIKQDGEKDNPPYSGNSGQKSRYWQWPEYDKESFYYQGTTQLNDRFTLKSRLYRDTFENTLMMYNSLADLKNKKGSYSHYSDYSDGAGLQLAADVRENDLLSFAVNWKDDVHREKGAPHAAYDRYEDRTWSLASEYQWAAADNVDVVAGISYDWRDSVEAKKHEKDGSITHYDDNNQSAFNWQVMGKYHFANEDTLALSYYDRTRFPTLKERYTTSKPAYNQIAIVNPQLKPERARGVDLTWNGAFTHDWGFEVSVYYNRVSDAILSHNIDADTIQNQNSGTVDYSGLDAGIKGKISNILDVGLSYALIHADAKRKDIGKITDLPTQTMTAWMTLKPWEPLSVTLSEEARSSSYSNSDGSQKAAGFAVTHIRADYTLGHGFSVNASVNNLFDTKYAYSEGFIEEGRNFWAGVEYTF

SEQ ID NO: 3450 - protein, 760 aa, Escherichia coli
MENNRNFPARQFHSLTFFAGLCIGITPVAQALAAEGQTNADDTLVVEASTPSLYAPQQSADPKFSRPVADTTRTMTVISEQVIKDQGATNLTDALKNVPGVGAFFAGENGNSTTGDAIYMRGADTSNSIYIDGIRDIGSVSRDTFNTEQVEVIKGPSGTDYGRSAPTGSINMISKQPRNDSGIDASASIGSAWFRRGTLDVNQVIGDTTAVRLNVMGEKTHDARRDKVKNERYGVAPSIAFGLGTANRLYLNYLHVTQHNTPDGGIPTIGLPGYSAPSAGTAALNHSGKVDTHNFYGTDSDYDDSTTDTATMRFEHDINDNTTIRNTTRWSRVKQDYLMTAIMGGASNITQPTSDVNSWTWSRTANTKDVSNKILTNQTNLTSTFYTGSIGHDVSTGVEFTRETQTNYGVNPVTLPAVNIYHPDSSIHPGGLTRNGANANGQTDTFAIYAFDTLQITRDFELNGGIRLDNYHTEYDSATACGGSGRGAITCPAGVAKGSPVTTVDTAKSGNLVNWKAGALYHLTENGNVYINYAVSQQPPGGNNFALAQSGSGNSANRTDFKPQKANTSEIGTKWQVLDKRLLLTAALFRTDIENEVEQNDDGTYSQYGKKRVEGYEISVAGNITPAWQVIGGYTQQKATIKNGKDVAQDGSSSLPYTPEHAFTLWSQYQATDDISVGAGARYIGSMHKGSDGAVGTPAFTEGYWVADAKLGYRVNRNLDFQLNVYNLFDTDYVASINKSGYRYHPGEPRTFLLTANMHF

SEQ ID NO: 3451 - protein, 721 aa, Escherichia coli
MSVYAQAAVEPKEDTITVTAAPAPQESAWGPAATIAARQSATGTKTDTPIQKVPQSISVVTAEEMALHQPKSVKEALSYTPGVSVGTRGASNTYDHLIIRGFAAEGQSQNNYLNGLKLQGNFYNDAVIDPYMLERAEIMRGPVSVLYGKSSPGGLLNMVSKRPTTEPLKEIQFKAGTDSLFQTGFDFSDALDDDGVYSYRLTGIARSANAQQKGAEEQRYAIAPAFTWRPDDKTNFTFLSYFQNEPETGYYGWLPKEGTVEPLPNGKRLPTDFNEGAKNNTYSRNEKMVGYSFDHEFNDTFTVRQNLRFAENKTSQNSVYGYGVCSDPANAYSKQCAALAPADKGHYLARKYVVDDEKLQNFSVDTQLQSKFATGDIDHTLLTGVDFMRMRNDINAWFGYDDSVPLLDLYNPVNTDFDFNAKDPANSGPYRILNKQKQTGVYVQDQAQWDKVLVTLGGRYDWADQESHNRVEGTTDKRDDKQFTWRGGVNYLFDNGVTPYFSYSESFEPSSQVGKDGNIFAPSKGKQYEVGVKYVPEDRPIVVTGAVYNLTKTNNLMADPEGSFFSVEGGEIRARGVEIEAKAALSASVNVVGSYTYTDAEYTTDTTYKGNTPAQVPKHMASLWADYTFFEGPLSGLTLGTGGRFTGSSYGDPANSFKVGSYTVVDALVRYDLARVGMAGSNVALHVNNLFDREYVASCFNTYGCFWGAERQVVATATFRF

SEQ ID NO: 3452 - protein, 678 aa, Escherichia coli
MVPSTFSRLKAARCLPVVLAALIFAGCGTHTPDQSTAYMQGTAQADSAFYLQQMQQSADDTRINWQLLAIRALVKEGKTGQAVELFNQLPQELNDYQRREKTLLAVEIKLAQKDFAGAQTLLAKITPADLDQNQQARYWQAKIDASQGRPSIDLLRALIAQEPLLGAKEKQQNIDATWQALSSMTQDQANTLVINADENILQGWLDLQRVWFDNRNDPDMMKAGIADWQKRYPNNPGAKMLPTQLVNVKAFKPASTNKIALLLPLNGQAAVFGRTIQQGFEAAKNIGTQPVAAQATAAPIADVAEQPQQQTVDGVASPAQASVSDLTGEETAAQPVPVSAPAANTAAVSAPANPSAELKIYDTSSQPLSQILNQVQQDGASIVVGPLLKNNVEELLKSNTPLNVLALNQPENIENRVNICYFALSPEDEARDAARHIRDQGKQAPLVLIPRSSLGDRVANAFAQEWQKLGGGTVLQQKFGSTSELRAGVNGGSGIALTGSPITPRETTDSGMTTNNPTLQTTPTDDQFTNNGGRVDAVYIVATPGEIAFIKPMIAMRNGSQSGATLYASSRSAQGTAGPDFRLEMEGLQYSEIPMLAGGNLPLMQQALSAVNNDYSLARMYAMGVDAWSLANHFSQMRQVQGFEINGNTGSLTANPDCVINRKLSWLQYQQGQVVPAS

SEQ ID NO: 3453 - protein, 663 aa, Escherichia coli
MFRLNPFVRVGLCLSAISCAWPVLAVDDDGETMVVTASSVEQNLKDAPASISVITQEDLQRKPVQNLKDVLKEVPGVQLTNEGDNRKGVSIRGLDSSYTLILVDGKRVNSRNAVFRHNDFDLNWIPVDSIERIEVVRGPMSSLYGSDALGGVVNIITKKIGQKWSGTVTVDTTIQEHRDRGDTYNGQFFTSGPLIDGVLGMKAYGSLAKREKDDPQNSTTTDTGETPRIEGFSSRDGNVEFAWTPNQNHDFTAGYGFDRQDRDSDSLDKNRLERQNYSVSHNGRWDYGTSELKYYGEKVENKNPGNSSPITSESNAVDGKYTLPLTAINQFLTVGGEWRHDKLSDAVNLTGGTSSKTSASQYALFVEDEWRIFEPLALTTGVRMDDHETYGEHWSPRAYLVYNATDTVTVKGGWATAFKAPSLLQLSPDWTSNSCRGACKIVGSPDLKPETSESWELGLYYMGEEGWLEGVESSVTVFRNDVKDRISISRTSDVNAAPGYQNFVGFETGANGRRIPVFSYYNVNKARIQGVETELKIPFNDEWKLSINYTYNDGRDVSNGENKPLSDLPFHTANGTLDWKPLALEDWSFYVSGHYTGQKRADSATAKTPGGYTIWNTGAAWQVTKDVKLRAGVLNLGDKDLSRDDYSYNEDGRRYFMAVDYRF

SEQ ID NO: 3454 - protein, 686 aa, Escherichia coli
MFWRDITLSVWRKKTTGLKTKKRLLPLVLAAVLCSSPVWAEEATFTANFKDTDLKSFIETVGANLNKTIIMGPGVQGKVSIRTMTPLNERQYYQLFLNLLEAQGYAVVPMENDVLKVVKSSAAKVEPLPLVGEGSDNYAGDEMVTKVVPVRNVSVRELAPILRQMIDSAGSGNVVNYDPSNVIMLTGRASVVERLTEVIQRVDHAGNRTEEVIPLDNASASEIARVLESLTKNSGENQPATLKSQIVADERTNSVIVSGDPATRDKMRRLIRRLDSEMERSGNSQVFYLKYSKAEDLVDVLKQVSGTLTAAKEEAEGTVGSGREVVSIAASKHSNALIVTAPQDIMQSLQSVIEQLDIRRAQVHVEALIVEVAEGSNINFGVQWASKDAGLMQFANGTQIPIGTLGAAISQAKPQKGSTVISENGATTINPDTNGDLSTLAQLLSGFSGTAVGVVKGDWMALVQAVKNDSSSNVLSTPSITTLDNQEAFFMVGQDVPVLTGSTVGSNNSNPFNTVERKKVGIMLKVTPQINEGNAVQMVIEQEVSKVEGQTSLDVVFGERKLKTTVLANDGELIVLGGLMDDQAGESVAKVPLLGDIPLIGNLFKSTADKKEKRNLMVFIRPTILRDGMAADGVSQRKYNYMRAEQIYRDEQGLSLMPHTAQPVLPAQNQALPPEVRAFLNAGRTR

SEQ ID NO: 3455 - protein, 866 aa, Escherichia coli
MTIKPTKNYHNHLTRIATFCALLYCNSAFCAELVEYDHTFLMGQNASNIDLSRYSEGNPAIPGMYDVSVYVNDQPIINQSITFIEIEGKKNAQACITLKNLLQFHINSPDINNEKAVLLARDETLGNCLNLTEIIPQASVRYDVNEQRLDIDVPQAWVMKNYQNYVDPSLWENGINAAMLSYNLNGYHSETPGRRNDSIYAAFNGGMNLGAWRLRASGNYNWMTDSGSNYDFKNRYIQRDIASLRSQLILGESYTTGETFDSVSIRGIRLYSDSRMLPPTLASFAPIIHGVANTNAKVTITQGGYKIYETTVPPGAFVIDDLSPSGYGSDLIVTVEESDGSKRTFSQPFSSVVQMLRPGVGRWDISGGQVLKDDIQDEPNLFQASYYYGLNNYLTGYTGIQITDNNYTAGLLGLGLNTSVGAFSFDVTHSNVRIPDDKTYQGQSYRVSWNKLFEETSTSLNIAAYRYSTQNYLGLNDALTLIDEVKHPEQDLEPKSMRNYSRMKNQVTVSINQPLKFEKKDYGSFYLSGSWSDYWASGQNRSNYSIGYSNSASWGSYSVSAQRSWNEDGDTDDSVYLSFTIPIEKLLGTEQRTSGFQSIDTQMSSDFKGNNQLNVSSSGYSDNARVSYSVNTGYTMNKASKDLSYVGGYASYESPWGSLAGSVSANSDNSRQVSLSTDGGFVLHSGGLTFSNDSFSDSDTLAVVQAPGAQGARINYGNSTIDRWGYGVTSALSPYHENRIALDINDLENDVELKSTSAVAVPRQGSVVFADFETVQGQSAIMNITRSDGKNIPFAADIYDEQGNVIGNVGQGGQAFVRGIEQQGNISIKWLEESKPVSCLAHYQQSSEAEKIAQSIILNGIRCQIQ

SEQ ID NO: 3456 - protein, 880 aa, Escherichia coli
MPDHSLFRLRILPWCIALAMSGSYSSVWAEDDIQFDSRFLELKGDTKIDLKRFSSQGYVEPGKYNLQVQLNKQPLAEEYDIYWYAGEDDASKSYACLTPELVAQFGLKEDVANNLQWSHDAKCLKSGQLEGMEIKADLSQSALVISLPQAYLEYTYPDWDPPSRWDDGISGIVADYSINAQTRHEENGGDDSNEISGNGTVGVNLGPWRMRADWQTNYQHTRSNDDDEFSGDETQKKWEWSRYYAWRALPSLKAKLALGEDYLRSDIFDGFNYVGGSVSTDDQMLPPNLRGYAPDISGVAHTTAKVTVSQMGRVIYETQVPAGPFRIQDLGDSVSGTLHIRIEEQNGQVQEYDISTASMPYLTRPGQVRYKIMMGRPQEWGHHVEGEFFSGAEASWGIANGWSLYGGALGDENYQSAALGVGRDLSTFGAVAFDVTHSHTKLDKDTAYGKGSLDGNSFRVSYSKDFDQLNSRVTFAGYRFSEENFMTMSEYLDASDSGMVRTGNDKEMYTATYNQNFRDAGVSVYLNYTRHTYWDREEQTNYNIMLSHYFNMGSIRNVSISMTGYRYEYDNQADKGMYISLSMPWGDNSTVSYNGNYGSGTDSSQVGYFSRVDDATHYQLNVGTSDKHTSVDGYYSHDGSLAQVDLSANYHEGQYTSAGLSLQGGATLTAHGGALHRTQNMGGTRLLIDADGVADVPVEGNGAAVYTNMFGKAVVSDVNNYYRNQAYIDLNRLPENAEATQSVVQATLTEGAIGYRKFAVISGQKAMAVLRLQDGSHPPFGAEVKNDNEQTVGLVDDDGNVYLAGVKPGEHMSVFWSGVAHCDINLPDPLPADLFNGLLLPCQHKGNVAPVVPDDIKPVIQEQTQQVTPTNPPVSVSANQ

SEQ ID NO: 3457 - protein, 834 aa, Escherichia coli; identical to SEQ ID NO: 3095

SEQ ID NO: 3458 - protein, 851 aa, Escherichia coli
MPSFIGGLVVFVSAAFNAQAETWFDPAFFKDDPSMVADLSRFEKGQKITPGVYRVDIVLNQTIVDTRNVNFVEITPEKGIAACLTTESLDAMGVNTDAFPAFKQLDKQACVPLAEIIPDASVTFNVNKLRLEISVPQIAIKSNARGYVPPERWDEGINALLLGYSFSGANSIHSSADSDSGDSYFLNLNSGVNLGPWRLRNNSTWSRSSGQTAEWKNLSSYLQRAVIPLKGELTVGDDYTAGDFFDSVSFRGVQLASDDNMLPDSLKGFAPVVRGIAKSNAQITIKQNGYTIYQTYVSPGAFEISDLYSTSSSGDLLVEIKEADGSVNSYSVPFSSVPLLQRQGRIKYAVTLAKYRTNSNEQQESKFAQATLQWGGPWGTTWYGGGQYAEYYRAAMFGLGFNLGDFGAISFDATQAKSTLADQSEHKGQSYRFLYAKTLNQLGTNFQLMGYRYSTSGFYTLSDTMYKHMDGYEFNDGDDEDTPMWSRYYNLFYTKRGKLQVNISQQLGEYGSFYLSGSQQTYWHTDQQDRLLQFGYNTQIKDLSLGVSWNYSKSRGQPDADQVFALNFSLPLNLLLPRSNDSYTRKKNYAWMTSNTSIDNEGHITQNLGLTETLLDDGNLSYSVQQGYNSEGKTANGSASMDYKGAFADARVGYNYSDNGSQQQLNYALSGSLVAHSQGITLGQSLGETNVLIAAPGAENTRVANSTGLKTDWRGYTVVPYATSYRENRIALDAASLKRNVDLENAVVNVVPTKGALVLAEFNAHAGARVLMKTSKQGIPLRFGAIATLDGIQTNSGIIDDDGSLYMSGLPAQGAITVRWGEAPDQICHISYQLTEQQINSAITRMDAICR

SEQ ID NO: 3459 - protein, 869 aa, Escherichia coli; identical to SEQ ID NO: 3326

SEQ ID NO: 3460 - protein, 816 aa, Escherichia coli
MNIYRLSLVSCLVVAMPCALAVEFNLNVLDKSMRDRIDISLLKEKGVIAPGEYFVSVAVNNNQISNGQKINWHKNDDKTIPCINDLLVDKFGLKPEVRQSLPLINQCVDFSSRPEMLFNFDQANQQLNITIPQAWLAWHSENWTPPSTWKEGVAGVLMDYNLFASSYRPQDGSSSTNLNAYGTAGINTGAWRLRSDYQLNQTDSDDNHEQSGEISRTYLFRPLPQLGSKLTLGETDFSSNIFDGFSYTGAALASDDRMLPWELRGYAPQISGIAQTNATVTISQSGRVIYQKKVPPGPFIIDDLNQSVQGTLDVKVTEEDGRVNNFQVSAASTPFLTRQGQVRYKLAAGQPRPSMSHQTENETFFSNEVSWGMLSNTSLYGGLLLSGDDYHSAAIGIGQNMLWLGALSFDVTWASSHFDTQQDERGLSYRFNYSKQVDATNSTISLAAYRFSDRHFHSYANYLDHKYNDSDAQDEKQTISLSVGQPITPLNLNLYANLLHQTWWNADASTTANITAGFNVDIGDWRDISISTSFNTTHYEDKDRDNQIYLSISLPFGNGGRVGYDMQNSSHSTTHRMSWNDTLDERNSWGMSAGLQSDRPDNGAQVSGNYQHLSSAGEWDISGTYAANDYSSVSSSWSGSFTATQYGAAFHRRSSTNEPRLMVSTDGVADIPVQGNLDYTNHFGIAVVPLISSYQPSTVAVNMNDLPDGVTVAENVIKETWIEGAIGYKSLASRSGKDVNVIIRNASGQFPPLGADIRQDDSGISVGMVGEEGHAWLSGVAENQNFTVVWGDSQHCSLHLPEHMEDTANRLILPCH

SEQ ID NO: 3461 - protein, 287 aa, Escherichia coli
MPLPDFRLIRLLPLAALVLTACSVTTPKGPGKSPDSPQWRQHQQDVRNLNQYQTRGAFAYISDQQKVYARFFWQQTGQDRYRLLLTNPLGSTELELNAQPGNVQLVDNKGQRYTADDAEEMIGKLTGMPIPLNSLRQWILGLPGDATDYKLDDQYRLSDRNSYALTEAERNASELTRWAGRKCPSGRVMGLANKGWVRGEPQDGGWIGWMIKPLGRWSLIMEIDEGFAVGMSPAELSAEQLLSKLWLWEGKAESYGWGSNSTQEAQFSVLDAITASELINDIEALFE

SEQ ID NO: 3462 - protein, 856 aa, Escherichia coli
MAGFFVRLFVACAFAAQAPLSSAELYFNPRFLADDPQAVADLSRFENGQELPPGTYRVDIYLNNGYMATRDVTFNTGDSEQGIVPCLTRAQLASMELNTASVSGMNLLADDACVPLTSMIHDATAHLDVGQQRLNLTIPQAFMSNRARGYIPPELWDPGINAGLLNYNFSGNSVQNRIGGNSHYAYLNLQSGLNIGAWRLRDNTTWSYNSSDSSSGSKNKWQHINTWLERDIIPLRSRLTLGDGYTQGDIFDGINFRGAQLASDDNMLPDSQRGFAPVIHGIARGTAQVTIKQNGYDIYNSTVPPGPFTINDIYAAGNSGDLQVTIKEADGSTQIFTVPYSSVPLLQREGHTRYSITAGEYRSGNAQQEKPRFFQSTLLHGLPAGWTIYGGTQLADRYRAFNFGIGKNMGALGALSVDMTQANSTLPDDSQHDGQSVRFLYNKSLNESGTNIQLVGYRYSTSGYFNFADTTYSRMNGYNIETQDGVIQVKPKFTDYYNLAYNKRGKLQLTVTQQLGRTSTLYLSGSHQTYWGTSNVDEQFQAGLNTAFEDINWTLSYSLTKNAWQKGRDQMLALNVNIPFSHWLRSDSKSQWRHASASYSMSHDLNGRMTNLVGVYGTLLEDNNLSYSVQTGYAGGGDGNSGSTGYATLNYRGGYGNANIGYSHSDDIKQLYYGVSGGVLAHANGVTLGQPLNDTVVLVKAPGAKDAKVENQTGVRTDWRGYAVLPYATEYRENRVALDTNTLADNVDLDNAVANVVPTRGAIVRAEFKARVGIKLLMTLTHNNKPLPFGAMVTSESSQSSGIVADNGQVYLSGMPLAGKVQVKWGEEENAHCVANYQLPPESQQQLLTQLSAECR

SEQ ID NO: 3463 - protein, 266 aa, Escherichia coli; identical to SEQ ID NO: 1894

SEQ ID NO: 3464 - protein, 871 aa, Escherichia coli
MHQVLILPRFARLTIALGLATAVFPVDAEYYFNPRFLSNDLAESVDLSAFTKGREAPPGTYRVDIYLNDEFMTSRDITFIADDNNADLIPCLSTDLLVSLGIKKSALLDNKEHSAEKHVPDNSACTPLQDRLADASTEFDVGQQHLSLSVPQIYVGRMARGYVSPELWEEGINAGLLNYSFNGNSINNRSNHNAGKSNYAYLNLQSGINIGSWRLRDNSTWSYNSGSSNSSNSNKWQHINTSAERDIIPLRSRLTVGDSYTDGDIFDSVNFRGLKINSTEAMLPDSQHGFAPVIHGIARGTAQVSVKQNGYDVYQTTVPPGPFTIDDINSAANGGDLQVTIKEADGSIQTLYVPYSSVPVLQRAGYTRYALAMGEYRSGNNLQSSPKFIQGSLMHGLEGNWTPYGGMQIAEDYQAFNLGIGKDLGLFGAFSFDITQANTTLADGTRHSGQSVKSVYSKSFYQTGTNIQVAGYRYSTQGFYNLSDSAYSRMSGYTVKPPTGDTNEQTQFIDYFNLFYSKRGQEQISISQQLGNYGTTFFSASRQSYWNTSRSDQQISFGLNVPFGDITTSLNYSYSNNIWQNDRDHLLTFTLNVPFSHWMRTDSQSAFRNSNASYSMSNDLKGGMTNLSGVYGTLLPDNNLNYSVQVGNTHGGNTSSGTSGYSSLNYRGAYGNTNVGYSRNGDSSQIYYGMSGGIIAHADGITFGQPLGDTMVLVKAPGADNVKIENQTGIHTDWRGYAILPFATEYRENRVALNANSLADNVELDETVVTVIPTHGAIARATFNAQIGGKVLMTLKYGNKSVPFGAIVTHGENKNGSIVAENGQVYLTGLPQSGKLQVSWGKDKNSNCIVEYKLPEVSPGTLLNQQTAICR

SEQ ID NO: 3465 - protein, 368 aa, Escherichia coli
MNKTITALTIIMASFAANASVLPETPVPFKSGTGAIDNDTVYIGLGSAGTAWYKLDTQAKDKRWTALAAFPGGPRDQATSAFIDGNLYVFGGIGKNSEGLTQVFNDVHKYNPKTNSWVKLMSHAPMGMAGHVTFVHNGKAYVTGGVNQNIFNGYFEDLNEAGKDSTAIDKINAYYFDKKAEDYFFNKFLLSFDPSTQQWSYAGESPWYGTAGAAVVNKGDKTWLINGEAKPGLRTDAVFELDFTGDNLKWNKLDPVSSPDGVAGGFAGISNDSLIFAGGAGFKGSRENYQNGKNYAHEGLKKSYSVDIHLWYNGKWDKSGELSQGRAYGVSLPWNNSLLIIGGETTGGKAVMDSVLISVKDNKVTVQN

SEQ ID NO: 3466 - protein, 232 aa, Escherichia coli; identical to SEQ ID NO: 2951

SEQ ID NO: 3467 - protein, 412 aa, Escherichia coli
MKQWIAALLLMLIPGVQAAKPQKVTLMVDDVPVAQVLQALAEQEKLNLVVSPDVSGTVSLHLTDVPWKQALQTVVKSAGLITRQEGNILSVHSIAWQNNNIARQEAEQARAQANLPLENRSITLQYADAGELAKAGEKLLSAKGSMTVDKRTNRLLLRDNKTALSALEQWVAQMDLPVGQVELSAHIVTINEKSLRELGVKWTLADAQHAGGVGQVTTLGSDLSVATATTHVGFNIGRINGRLLDLELSALEQKQQLDIIASPRLLASHLQPASIKQGSEIPYQVSSGESGATSVEFKEAVLGMEVTPTVLQKGRIRLKLHISQNVPGQVLQQADGVVLAIDKQEIETQVEVKSGETLALGGIFTRKNKSGQDSVPLLGDIPWFGQLFRHDGKEDERRELVVFITPRLVSSE

SEQ ID NO: 3468 - protein, 243 aa, Escherichia coli; identical to SEQ ID NO: 2910

SEQ ID NO: 3469 - protein, 517 aa, Escherichia coli; identical to SEQ ID NO: 3116

SEQ ID NO: 3470 - protein, 250 aa, Escherichia coli; identical to SEQ ID NO: 3048

SEQ ID NO: 3471 - protein, 274 aa, Escherichia coli
MNKTAIALLALLASSASLAATPWQKITQPVPGSAQSIGSFSNGCIVGADTLPIQSEHYQVMRTDQRRYFGHPDLVMFIQRLSSQVSNLGMGTVLIGDMGMPAGGRFNGGHASHQTGLDVDIFLQLPKTRWTSAQLLRPQALDLVSRDGKHVVPTLWKPEIFSLIKLAAQDKDVTRIFVNPAIKQQLCLDAGTDRDWLRKVRPWFQHRAHMHVRLRCPADSLECEDQPLPPPGDGCGAELQSWFAPPKPGTTKPEKKTPPPLPPSCQALLDEHVI

SEQ ID NO: 3472 - protein, 231 aa, Escherichia coli
MSKRTFAVIITLLCSFCIGQALAGGIVLQQTRVIYDASRKEAALPVANKGAETPYLLQSWVDNIDGTSRAPFIITPPLFRLEAGDDSSLRIIKTADNLPENKESLFYINVRAIPAKKKSDDVNANELTLVFKTRIKMFYRPAHLKGRVNDAWTSLEFKRSDHSLNIYNPTEYYVVFAGLAVDKTDLTSKIEYIAPGEHKQLPLPASGGKNVKWAAINDYGGSSGTETRPLQ

SEQ ID NO: 3473 - protein, 111 aa, Escherichia coli; identical to SEQ ID NO: 3370

SEQ ID NO: 3474 - protein, 230 aa, Escherichia coli; identical to SEQ ID NO: 2580

SEQ ID NO: 3475 - protein, 747 aa, Escherichia coli; identical to SEQ ID NO: 2072

SEQ ID NO: 3476 - protein, 122 aa, Escherichia coli; identical to SEQ ID NO: 2915

SEQ ID NO: 3477 - protein, 729 aa, Escherichia coli
MLSTQFNRDNQYQAITKPSLLAGCIALALLPSAAFAAPATEETVIVEGSATAPDDGENDYSVTSTSAGTKMQMTQRDIPQSVTIVSQQRMEDQQLQTLGEVMENTQGISKSQADSDRALYYSRGFQIDNYMVDGIPTYFESRWNLGDALSDMALFERVEVVRGATGLMTGTGNPSAAINMVRKHATSREFKGDVSAEYGSWNKERYVADLQSPLTEDGKIRARIVGGYQNNDSWLDRYNSEKTFFSGIVDADLGDLTTLSAGYEYQRIDVNSPTWGGLPRWNTDGSSNSYDRARSTAPDWAYNDKEINKVFMTLKQRFADTWQATLNATHSEVEFDSKMMYVDAYVNKADGMLVGPYSNYGPGFDYVGGTGWNSGKRKVDALDLFADGIYELFGRQHNLMFGGSYSKQNNRYFSSWANIFPDEIGSFYNFNGNFPQTDWSPQSLAQDDTTHMKSLYAATRVTLADPLHLILGARYTNWRVDTLTYSMEKNHTTPYAGLVFDINDNWSTYASYTSIFQPQNDRDSSGKYLAPITGNNYELGLKSDWMNSRLTTTLAIFRIEQDNVAQSTGTPIPGSNGETAYKAVDGTVSKGVEFELNGAITDNWQLTFGATRYIAEDNEGNAVNPNLPRTTVKMFTSYRLPVMPELTVGGGVNWQNRVYTDTVTPYGTFRAEQGSYALVDLFTRYQVTKNFSLQGNVNNLFDKTYDTNVEGSIVYGAPRNFSITGTYQF

SEQ ID NO: 3478 - protein, 663 aa, Escherichia coli; identical to SEQ ID NO: 3453

SEQ ID NO: 3479 - protein, 239 aa, Escherichia coli
MAAIPWRPFNLRGIKMKGLLSLLIFSMVLPAHAGIVIYGTRIIYPAENKEVMVQLMNQGNRSSLLQAWIDDGDTSLPPEKIQVPFMLTPPVAKIGANSGQQVKIKIMPNKLPTNKESIFYLNVLDIPPNSPEQEGKNALKFAMQNRIKLFYRPAGIAPVNKATFKKLLVNRSGNGLVIKNDSANWVTISDVKANNVKVNYETIMIAPLESQSVNVKSNNANNWYLTIIDDHGNYISDKI

SEQ ID NO: 3480 - protein, 362 aa, Escherichia coli; identical to SEQ ID NO: 2434

SEQ ID NO: 3481 - protein, 203 aa, Escherichia coli; identical to SEQ ID NO: 2009

SEQ ID NO: 3482 - protein, 236 aa, Escherichia coli
MQTTRTPYSISFMATVLLLLLFACHSTVANAAVALGATRVIYPANQKQVLLPVTNNDPASVYLIQSWIENAGDQKDTQFVITPPLFSMQGKKENTLRIINATNHQLPGDRESLFWVNVKAIPAMEKDQKNENTLQLAIISRIKMFYRPTNLAMAPEEAPAMLRFRRSGSKLTLINPTPYFITVTNMKAGNSNLPNTMVPPKGEVSVDIPHAATGDISFQTINDYGALTPRIKATMQ

SEQ ID NO: 3483 - protein, 243 aa, Escherichia coli
MTFMKGLPLLLLVASLCSHAALQPDRTRIVFNANDKATSLRVDNRSDKLPYLAYSWLENEKGEKSDDLLVALPPIQRLEPKATTQVRIVKQASTTKLPGDRETLFFYNMREIPPAPEKNSDHAVLQVAIQSRIKVFWRPAALRKKAGEKVELQLQVSQQGNQLTLKNPTAYYLTIAYLGRNEKGVLPGFKTVMVAPFSTVNTNTGNYSGSQFYLGYMDDYGALRMTTLNCSGQCHLQAVEAKK

SEQ ID NO: 3484 - protein, 261 aa, Escherichia coli
MINNFTEVKVKKKEKLKVVSIFVFCIVTPSFANEKLEIKEKEFSLKLDRSRLIFNENSRGALLTVENSHEYPILVQTRIIDEDRKGKSESLIATPPLFKLNEGEKSKIRIYKKYISNLPMDRETLFWTCTKGIPPTEKDLWAVENAENIEAKKSSLGVNLAVENCIKVFYRPKGIPSVRFDSGKDLVWSIKGDKIKVYNKTPNYMNFKELTIGNRNIENPAYVPPFSERFFDIKIIEGENINWTVITDFGGESQIHHERIK

SEQ ID NO: 3485 - protein, 760 aa, Escherichia coli
MENNRNFPARQFHSLTFFAGLCIGITPVAQALAAEGQTNADDTLVVEASTPSLYAPQQSADPKFSRPVADTTRTMTVISEQVIKDQGATNLIDALKNVPGVGAFFAGENGNSTTGDAIYMRGADTSNSIYIDGIRDIGSVSRDTFNTEQVEVIKGPSGTDYGRSAPTGSINMISKQPRNDSGIDASASIGSAWFRRGTLDVNQVIGDTTAVRLNVMGEKTHDAGRDKVKNERYGVAPSIAFGLGTANRLYLNYLHVTQHNTPDGGIPTIGLPGYSAPSAGTAALNHSGKVDTHNFYGTDSDYDDSTTDTATMRFEHDINDNTTIRNTTRWSRVKQDYLMTAIMGGASNITQPTSDVNSWTWSRTANTKDVSNKILTNQTNLTSTFYTGSIGHDVSTGVEFTRETQTNYGVNPVTLPAVNIYHPDSSIHPGGLTRNGANANGQTDTFAIYAFDTLQITRDFELNGGIRLDNYHTEYDSATACGGSGRGAITCPAGVAKGSPVTTVDTAKSGNLVNWKAGALYHLTENGNVYINYAVSQQPPGGNNFALAQSGSGNSANRTDFKPQKANTSEIGTKWQVLDKRLLLTAALFRTDIENEVEQNDDGTYSQYGKKRVEGYEISVAGNITPAWQVIGGYTQQKATIKNGKDVAQDGSSSLPYTPEHAFTLWSQYQATDDISVGAGARYIGSMHKGSDGAVGTPAFTEGYWVADAKLGYRVNRNLDFQLNVYNLFDTDYVASINKSGYRYHPGEPRTFLLTANMHF

SEQ ID NO: 3486 - protein, 224 aa, Escherichia coli
MTVSLTAILLSCSSAWAAGKGGIGLAATRLVYSEGEEQISLGVRNTSPDVPYLIQSWVMTPDNKKSADFIITPPLFVLNPANENLLRIMYIGAPLAKDRETLFFTSVRAVPSTTKREEGNTLKIATQSVIKLFWRPKGLAYPLGEAPAKLSCTSSADMVTVSNPTPYFITLTDLKIGGKVVKNQMISPFDKYQFSLPKGAKNSSVTYRTINDYGAETPQLNCKS

SEQ ID NO: 3487 - protein, 162 aa, Escherichia coli; identical to SEQ ID NO: 1965

SEQ ID NO: 3488 - protein, 193 aa, Escherichia coli; identical to SEQ ID NO: 2246

SEQ ID NO: 3489 - protein, 700 aa, Escherichia coli
MKIFSVRQTVLPALLVLSPVVFAADEQTMIVSAAPQVVSELDTPAAVSVVDGEEMRLATPRINLSESLTGVPGLQVQNRQNYAQDLQLSIRGFGSRSTYGIRGIRLYVDGIPATMPDGQGQTSNIDLSSVQNVEVLRGPFSALYGNASGGVMNVTTQTGQQPPTIEASSYYGSFGSWRYGLKATGATGDGTQPGDVDYTVSTTRFTTHGYRDHSGAQKNLANAKLGVRIDEASKLSLIFNSVDIKADDPGGLTKAEWKANPQQAPRAEQYDTRKTIKQTQAGLRYERSLSAQDDMSVMMYAGERETTQYQSIPMAPQLNPSHAGGVITLQRHYQGIDSRWTHRGELGVPVTFTTGLNYENMSENRKGYNNFRLNSGMPEYGQKGELRRDERNLMWNIDPYLQTQWQLSEKLSLDAGVRYSSVWFDSNDHYVTPGNGDDSGDASYHKWLPAGSLKYAMTDAWNIYLAAGRGFETPTINELSYRADGQSGMNFGLKPSTNDTIEIGSKTRIGDGLLSLALFQTDTDDEIVVDSSSGGRTTYKNAGKTRRQGAELAWDQRFAGDFRVNASWTWLDATYRSNVCNEQDCNGNRMPGIARNMGFASIGYVPEDGWYAGTEARYMGDIMADDENTAKAPSYTLIGLFTGYKYNYHNLTVDLFGRVDNLFDKEYVGSVIVNESNGRYYEPSPGRNYGVGMNIAWRFE

SEQ ID NO: 3490 - protein, 246 aa, Escherichia coli; identical to SEQ ID NO: 3021

SEQ ID NO: 3491 - protein, 746 aa, Escherichia coli; identical to SEQ ID NO: 3031

SEQ ID NO: 3492 - protein, 249 aa, Escherichia coli
MRYLNTKNLIAAGVLLACMSSIAWGAIIPDRTRIIMNESDKGEALKLTNQSKNLPYLAQTWIEDTKGNKSRDFIVTVPPMVRLNPSEQIQIRMISQEKIAQLPNDRETLFYFNVREIPPKTDKKNVMQVTMQHALKLFWRPKAIELEDDGVMSYEKVEIIRRNDGSIRFNNKMPYHVTLGYIGTNGITMLPQTQSLMVTPYSHADTQFKNVPSAFQVGYINDFGGLSFYEINCPTVNNSCNVSVAKRDK

SEQ ID NO: 3493 - protein, 241 aa, Escherichia coli; identical to SEQ ID NO: 2922

SEQ ID NO: 3494 - protein, 213 aa, Escherichia coli; identical to SEQ ID NO: 2232

SEQ ID NO: 3495 - protein, 478 aa, Escherichia coli; identical to SEQ ID NO: 3436

SEQ ID NO: 3496 - protein, 265 aa, Escherichia coli
MIYKFSSMKNITFIFFILLASPLYANGDKLYRADSRPPDEIKRSGGLMPRGHNEYFDRGTQMNINLYDHARGTQTGFVRYDDGYVSTSLSLRSAHLAGQSILSGYSTYYIYVIATAPNMFNVNDVLGVYSPHPYEQEVSALGGIPYSQIYGWYRVNFGVIDERLHRNREYRDRYYRNLNIAPAEDGYRLAGFPPDHQAWREEPWIHHAPQGCGNSSRTITDDTCNEETQNLSTIYLRKYQSKVKRQIFSDYQSEVDIYNRIRDEL

SEQ ID NO: 3497 - protein, 200 aa, Escherichia coli; identical to SEQ ID NO: 1784

SEQ ID NO: 3498 - protein, 518 aa, Escherichia coli; identical to SEQ ID NO: 2350

SEQ ID NO: 3499 - protein, 237 aa, Escherichia coli
MRKITQAISAVCLLFALNSSAVALASSPSPLNPGTNVARLAEQAPIHWVSVAQIENSLAGRPPMAVGFDIDDTVLFSSPGFWRGKKTFSPESEDYLKNPVFWEKMNNGWDEFSIPKEVARQLIDMHVRRGDAIFFVTGRSPTKTETVSKTLADNFHIPVTNMNPVIFAGDKPGQNTKSQWLQDKNIRIFYGDSDNDITAARDVGACGIRILRASNSTYKPLPQAGAFGEEVIVNSEY

SEQ ID NO: 3500 - protein, 686 aa, Escherichia coli; identical to SEQ ID NO: 3129

SEQ ID NO: 3501 - protein, 380 aa, Escherichia coli
MNIYRAVTSFFNNSSKKGLTMKKLTVAISAVAASVLMAMSAQAAEIYNKDSNKLDLYGKVNAKHYFSSNDADDGDTTYARLGFKGETQINDQLTGFGQWEYEFKGNRAESQGSSKDKTRLAFAGLKFGDYGSIDYGRNYGVAYDIGAWTDVLPEFGGDTWTQTDVFMTGRTTGVATYRNNDFFGLVDGLNFAAQYQGKNDRTDVTEANGDGFGFSTTYEYEGFGVGATYAKSDRTNNQVIYGNNGLNASGQNAEVWAAGLKYDANNIYLATTYSETQNMTVFGNNHIANKAQNFEAVAQYQFDFGLRPSVAYLHSKGKDLGVWGDQDLVEYVDVGATYYFNKNMSTFVDYKINLIDKSDFTKASGVATDDIVAVGMVYQF

SEQ ID NO: 3502 - protein, 363 aa, Escherichia coli; identical to SEQ ID NO: 3347

SEQ ID NO: 3503 - protein, 828 aa, Escherichia coli; identical to SEQ ID NO: 2388

SEQ ID NO: 3504 - protein, 565 aa, Escherichia coli
MKSPAPSRPQKMALIPACIFLCFAALSVQAEETPVTPQPPDILLGPLFNDVQNAKLFPDQKTFADAVPNSDPLMILADYRMQQNQSGFDLRHFVNVNFTLPKEGEKYVPPEGQSLREHIDGLWPVLTRSTENTEKWDSLLPLPEPYVVPGGRFREVYYWDSYFTMLGLAESGHWDKVADMVANFAHEIDTHGHIPNGNRSYYLSRSQPPFFALMVELLAQHEGDAALKQYLPQMQKEYAYWMDGVENLQAGQQEKRVVKLQDGTLLNRYWDDRDTPRPESWVEDIATAKSNPNRPATEIYRDLRSAAASGWDFSSRWMDNPQQLNTLRTTSIVPVDLNSLMFKMEKILARASKAAGDNAMANQYETLANARQKGIEKYLWNDQQGWYADYDLKSHKVRNQLTAAALFPLYVNAAAKDRANKMATATKTHLLQPGGLNTTSVKSGQQWDAPNGWAPLQWVATEGLQNYGQKEVAMDISWHFLTNVQHTYDREKKLVEKYDVSTTGTGGGGGEYPLQDGFGWTNGVTLKMLDLICPKEQPCDNVPATRPTVKSATTQPSTKEAQPTP

SEQ ID NO: 3505 - protein, 359 aa, Escherichia coli
MKKYLALALIAPLLISCSTTKKGDTYNEAWVKDTNGFDILMGQFAHNIENIWGFKEVVIAGPKDYVKYTDQYQTRSHINFDDGTITIETIAGTEPAAHLRRAIIKTLLMGDDPSSVDLYSDVDDITISKEPFLYGQVVDNTGQPTRWEGRASNFADYLLKNRLKSRSNGLRIIYSVTINMVPNHLDKRAHKYLGMVRQASRKYGVDESLILAIMQTESSFNPYAVSRSDALGLMQVVQHTAGKDVFRSQGKSGTPSRSFLFDPASNIDTGTAYLAMLNNVYLGGIDNPTSRRYAVITAYNGGAGSVLRVFSNDKIQAANIINTMTPGDVYQTLTTRHPSAESRRYLYKVNTAQKSYRRR

SEQ ID NO: 3506 - protein, 121 aa, Escherichia coli
MNTVLSVQGASAPVKKKSFFSKFTRLNMLRLVRAVIPVAVLMMLFPELAMASAGKGTDLMAKGNDTVKATFGKDSSIVKWVVLAEVLVGAVMYMMTKNVKFLVGFAIISVFIAVGMTVVGL

SEQ ID NO: 3507 - protein, 614 aa, Escherichia coli; identical to SEQ ID NO: 3388

SEQ ID NO: 3508 - protein, 191 aa, Escherichia coli; identical to SEQ ID NO: 2727

SEQ ID NO: 3509 - protein, 208 aa, Escherichia coli; identical to SEQ ID NO: 1949

SEQ ID NO: 3510 - protein, 331 aa, Escherichia coli; identical to SEQ ID NO: 2700

SEQ ID NO: 3511 - protein, 678 aa, Escherichia coli
MVPSTFSRLKAARCLPVVLAALIFAGCGTHTPDQSTAYMQGTAQADSAFYLQQMQQSSDDTRINWQLLAIRALVKEGKTGQAVELFNQLPQELNDSQRREKTLLAVEIKLAQKDFAGAQNLLAKITPADLEQNQQARYWQAKIDASQGRPSIDLLRALIAQEPLLGAKEKQQNIDATWQALSSMTQEQANTLVINADENILQGWLDLQRVWFDNRNDPDMMKAGIADWQKRYPNNPGAKMLPTQLVNVKAFKPASTNKIALLLPLNGQAAVFGRTIQQGFEAAKNIGTQPVAAQVAAAPAADVAEQPQPQTVDGVASPAQASVSDLTGEQPAAQPVPVSAPATSTAAVSAPANPSAELKIYDTSSQPLSQILSQVQQDGASIVVGPLLKNNVEELLKSNTPLNVLALNQPENIENRVNICYFALSPEDEARDAARHIRDQGKQAPLVLIPRSSLGDRVANAFAQEWQKLGGGTVLQQKFGSTSELRAGVNGGSGIALTGSPITPRATTDSGMTTNNPTLQTTPTDDQFTNNGGRVDAVYIVATPGEIAFIKPMIAMRNGSQSGATLYASSRSAQGTAGPDFRLEMEGLQYSEIPMLAGGNLPLMQQALSAVNNDYSLARMYAMGVDAWSLANHFSQMRQVQGFEINGNTGSLTANPDCVINRKLSWLQYQQGQVVPAS

SEQ ID NO: 3512 - protein, 232 aa, Escherichia coli
MQKNAAHTYAISSLLVLSLTGCAWIPSTPLVQGATSAQPVPGPTPVANGSIFQSAQPINYGYQPLFEDRRPRNIGDTLTIVLQENVSASKSSSANASRDGKTNFGFDTVPRYLQGLFGNARADVEASGGNTFNGKGGANASNTFNGTLTVTVDQVLVNGNLHVVGEKQIAINQGTEFIRFSGVVNPRTISGSNTVPSTQVADARIEYVGNGYINEAQNMGWLQRFFLNLSPM

SEQ ID NO: 3513 - protein, 203 aa, Escherichia coli; identical to SEQ ID NO: 2201

SEQ ID NO: 3514 - protein, 774 aa, Escherichia coli
MTPLRVFRKTTPLVNAIRLSLLPLAGLSFSAFAAQVNIAPGSLDKALNQYAAHSGFTLSVDASLTRGKQSNGLHGDYDVESGLQQLLDGSGLQVKPLGNNSWTLEPAPAPKEDALTVVGDWLGDARENDVFEHAGARDVIRREDFAKTGATTMREVLNRIPGVSAPENNGTGSHDLAMNFGIRGLNPRLASRSTVLMDGIPVPFAPYGQPQLSLAPVSLGNMDAIDVVRGGGAVRYGPQSVGGVVNFVTRAIPQDFGIEAGVEGQLSPTSSQNNPKETHNLMVGGTADNGFGTALLYSGTRGSDWREHSATRIDDLMLKSKYAPDEVHTFNSLLQYYDGEADMPGGLSRADYDANRWQSTRPYDRFWGRRKLASLGYQFQPDSQHKFNIQGFYTQTLRSGYLEQGKRITLSPRNYWVRGIELRYSQIFMIGPSAHEVGVGYRYVNESTHEMRYYTATSSGQLPSGSSPYDRDTRSGTEAHAWYLDDKIDIGNWTITPGMRFEHIESYQNNAITGTHEEVSYNAPLPALNVLYHLTDSWNLYANTEGSFGTVQYSQIGKAVQSGNVEPEKARTWELGTRYDDGALTAEMGLFLINFNNQYDSNQTNDTVTARGKTRHTGLETQARYDLGTLTPTLDNVSIYASYAYVNAEIREKGDTYGNLVPFSPKHKGTLGVDYKPGNWTFNLNSDFQSSQFADNANTVKESADGSTGRIPGFMLWGARVAYDFGPQMADLNLAFGVKNIFDQDYFIRSYDDNNKGIYAGQPRTLYMQGSLKF

SEQ ID NO: 3515 - protein, 539 aa, Escherichia coli; identical to SEQ ID NO: 3050

SEQ ID NO: 3516 - protein, 351 aa, Escherichia coli; identical to SEQ ID NO: 2519

SEQ ID NO: 3517 - protein, 446 aa, Escherichia coli; identical to SEQ ID NO: 2176

SEQ ID NO: 3518 - protein, 567 aa, Escherichia coli
MKIKLRITIILISVLCIFNGLLTPGAYAAAANGYVANKENLRSFFETVSSYAGKPTIVSKLAMKKQISGNFDLTEPYALIERLSAQMGLIWYDDGKAIYIYDSSEMRNALINLRKVSTNEFNNFLKKSGLYNSRYEIKGDGNGTFYVSGPPVYVDLVVNAAKLMEQNSDGIEIGRNKVGIIHLVNTFVNDRTYELRGEKIVIPGMAKVLSTLLNNNIKQSTGVNVLSEISSRQQLKNVSRMPPFPGAEEDDDLQVEKIISTAGAPETDDIQIIAYPDTNSLLVKGTVSQVDFIEKLVATLDIPKRHIELSLWIIDIDKTDLEQLGADWSGTIKIGSSLSASFNNSGSISTLDGTQFIATIQALAQKRRAAVVARPVVLTQENIPAIFDNNRTFYTKLVGERTAELDEVTYGTMISVLPRFAARNQIELLLNIEDGNEINSDKTNVDDLPQVGRTLISTIARVPQGKSLLIGGYTRDTNTYESRKIPILGSIPFIGKLFGYEGTNANNIVRVFLIEPREIDERMMNNANEAAVDARAITQQMAKNKEINDELLQKWIKTYLNREVVGG

SEQ ID NO: 3519 - protein, 871 aa, Escherichia coli
MHQVLLLPRFARLTIALSLATAVFPVDAEYYFNPRFLSNDLAESVDLSAFTKGREAPPGTYRVDIYLNDEFMTSRDITFITDDNNADLIPCLSTDLLVSLGIKKSALLDNKEHSAEKHVPDNSACTPLQDRLVDASTEFDVGQQHLSLSVPQIYVGRMARGYVSPDLWEEGINAGLLNYSFNGNSINNRSNHNAGKSNYAYLNLQSGINIGSWRLRDNSTWSYNSGSSNSSDSNKWQHINTSAERDIIPLRSRLTVGDSYTDGDIFDSVNFRGLKINSTEAMLPDSQHGFAPVIHGIARGTAQVSVKQNGYDVYQTTVPPGPFTIDDINSAANGGDLQVTIKEADGSIQTLYVPYSSVPVLQRAGYTRYALAMGEYRSGNNLQSSPRFIQGSLMHGLEGNWTPYGGMQIAEDYQAFNLGIGKDLGLFGAFSFDITQANTTLADGTRHSGQSVKSVYSKSFYQTGTNIQVAGYRYSTQGFYNLSDSAYSRMSGYTVKPPTGDSNEQTQFIDYFNLFYSKRGQEQISISQQLGNYGATFFSASRQSYWNTSRSDQQISFGLNVPFGDITTSLNYSYSNNIWQNDRDHLLAFTLNVPFSHWMRTDSQSAFRNSNASYSMSNDLKGGMTNLSGVYGTLLPDNNLNYSVQVGNTHGGNTSSGTSGYSTLNYRGAYGNTNVGYSRSGDSSQIYYGMSGGIIAHADGITFGQPLGDTMVLVKAPGADNVKIENQTGIHTDWRGYAILPFATEYRENRVALNANSLADNVELDETVVTVIPTHGAIARATFNAQIGGKVLMTLKYGNKSVPFGAIVTHGENKNGSIVAENGQVYLTGLPQSGKLQVSWGNDKNSNCIVDYKLPEVSPGTLLNQQTAICR

SEQ ID NO: 3520 - protein, 366 aa, Escherichia coli
MKLKIVAVVVTGLLAANVAHAAEVYNKDGNKLDLYGKVTALRYFTDDKRDDGDKTYARLGFKGETQINDQMIGFGHWEYDFKGYNDEANGSRDNKTRLAYAGLKISEFGSLDYGRNYGVGYDIGSWTDMLPEFGGDTWSQKDVFMTYRTTGVATYRNYDFFGLIEGLNFAAQYQGKNERTDNSHLYGADYTRANGDGFGISSTYVYDGFGIGAVYTKSDRTNAQERAAANPLNASGKNAELWATGIKYDANNIYFAANYAETLNMTTYGDGYISNKAQSFEVVAQYQFDFGLRPSLAYLKSKGIDLGRYGDQDMIEYIDVGATYFFNKNMSTYVDYKINLIDESDFTRAVDIRTDNIVATGITYQF

SEQ ID NO: 3521 - protein, 700 aa, Escherichia coli; identical to SEQ ID NO: 2926

SEQ ID NO: 3522 - protein, 539 aa, Escherichia coli; identical to SEQ ID NO: 3050

SEQ ID NO: 3523 - protein, 713 aa, Escherichia coli
MAKFTPSFSGIKGRALFSLLFAAPMIHATDTATTKDGETITVTADANTATEATDGYQPLSTSTATLTDMPMLDIPQVVNTVSDQVLENQNATTLDEALYNVSNVVQTNTLGGTQDAFVRRGFGANRDGSIMTNGLRTVLPRSFNAATERVEVLKGPASTLYGILDPGGLINVVTKRPEKTFHGSVSATSSSFGGGTGQLDITGPIEGTQLAYRLTGEVQDEDYWRNFGKERSTFIAPSLTWFGDNATVTMLYSHRDYKTPFDRGTIFDLTTKQPVNVDRKIRFDEPFNITDGQSDLAQLNAEYHLNSQWTARFDYSYSQDKYSDNQARVTAYDATTGTLTRRVDATQGSTQRMHSTRADLQGNVDIAGFYNEILGGVSYEYYDLLRTDMIRCKNAKDFNIYNPVYGNTSKCTTVSASDSDQTIKQESYSAYAQDALYLTDNWIAVAGIRYQYYTQYAGKGRPFNVNTDSRDEQWTPKLGLVYKLTPSVSLFANYSQTFMPQSSIASYIGDLPPESSNAYEVGAKFELFDGITADIALFDIHKRNVLYTESIGDETIAKTAGRVRSRGVEVDLAGALTENINIIASYGYTDAKVLEDPDYAGKPLPNVPRHTGSLFLTYDIHNMPGNNTLTFGGGGHGVSRRSATNGADYYLPGYFVADAFAAYKMKLQYPVTLQLNVKNLFDKTYYTSSIATNNLGNQIGDPREVQFTVKMEF

SEQ ID NO: 3524 - protein, 231 aa, Escherichia coli; identical to SEQ ID NO: 2868

SEQ ID NO: 3525 - protein, 838 aa, Escherichia coli; identical to SEQ ID NO: 2916

SEQ ID NO: 3526 - protein, 678 aa, Escherichia coli; identical to SEQ ID NO: 2902

SEQ ID NO: 3527 - protein, 245 aa, Escherichia coli
MTERELSIIRALGEEFAMVLADLQRTFEEKIAAQAQTFEEKLASQSVVLQKCVTGDDVRPMLEQMVKEAVSHIPVPRDGRDYDPDVLQKAVNDAVSALPAPQDGRDATALEILPAIDDQKSFPRGSYATHQGGLWRAYEKTYGMRGWECLVDGVADIDVSMTGERSFSVVVRQSSGQRTEKTFSLPVMLYRGVFRIGETYHPGDTVTWGGSLWHCNSMTGDKPGEAHSSGWTLAAKRGRDAGGGK

SEQ ID NO: 3528 - protein, 331 aa, Escherichia coli; identical to SEQ ID NO: 2705

SEQ ID NO: 3529 - protein, 627 aa, Escherichia coli
MVVTASSVEQNLKDAPASISVITQEDLQRKPVQNLKDVLKEVPGVQLTNEGDNRKGVSIRGLDSSYTLILVDGKRVNSRNAVFRHNDFDLNWIPVDSIERIEVVRGPMSSLYGSDALGGVVNIITKKIGQKWSGTVTVDTTIQEHRDRGDTYNGQFFTSGPLIDGVLGMKAYGSLAKREKDDPQNSTTTDTGETPRIEGFSSRDGNVEFAWTPNQNHDFTAGYGFDRQDRDSDSLDKNRLERQNYSVSHNGRWDYGTSELKYYGEKVENKNPGNSSPITSESNTVDGKYTLPLTAINQFLTVGGEWRHDKLSDAVNLTGGTSSKTSASQYALFVEDEWRIFEPLALTTGVRMDDHETYGEHWSPRAYLVYNATDTVTVKGGWATAFKAPSLLQLSPDWTSNSCRGACKIVGSPDLKPETSESWELGLYYMGEEGWLEGVESSVTVFRNDVKDRISISRTSDVNAAPGYQNFVGFTANGVPVFSYYNVNKARIQGVETELKIPFNDEWKLSLNYTYNDGRDVSNGENKPLSDLPFHTANGTLDWKPLALEDWSFYVSGHYTGQKRADSATAKTPGGYTIWNTGAAWQVTKDVKLRAGVLNLGDKDLSRDDYSYNEDGRRYFMAVDYRF

SEQ ID NO: 3530 - protein, 866 aa, Escherichia coli
MTIKPTKNYHNHLTRIATFCALLYCNSAFCAELVEYDHTFLMGQNASNIDLSRYSEGNPAIPGMYDVSVYVNDQPIINQSITFIEIEGKKNAQACITLKNLLQFHINSPDINNEKAVLLARDETLGNCLNLTEIIPQASVRYDVNEQRLDIDVPQAWVMKNYQNYVDPSLWENGINAAMLSYNLNGYHSETPGRRNDSIYAAFNGGMNLGAWRLRASGNYNWMTDSGSNYDFKNRYIQRDIASLRSQLILGESYTTGETFDSVSIRGIRLYSDSRMLPPTLASFAPIIHGVANTNAKVTIMQGGYKIYETTVPPGAFVIDDLSPSGYGSDLIVTVEESDGSKRTFSQPFSSVVQMLRPGVGRWDISGGQVLKDDIQDEPNLFQASYYYGLNNYLTGYTGIQITDNNYTAGLLGLGLNTSVGAFSFDVTHSNVRIPDDKTYQGQSYRVSWNKLFEETSTSLNIAAYRYSTQNYLGLNDALTLIDEVKHPEQDLEPKSMRNYSRMKNQVTVSINQPLKFEKKDYGSFYLSGSWSDYWASGQNRSNYSIGYSNSASWGSYSVSAQRSWNEDGDTDDSVYLSFTIPIEKLLGTEQRTSGFQSIDTQMSSDFKGNNQLNVSSSGYSDNARVSYSVNTGYTMNKASKDLSYVGGYASYESPWGSLAGSVSANSDNSRQVSLSTDGGFVLHSGGLTFSNDSFSDSDTLAVVQAPGAQGARINYGNSTIDRWGYGVTSALSPYHENRIALDINDLENDVELKSTSAVAVPRQGSVVFADFETVQGQSAIMNITRSDGKNIPFAADIYDEQGNVIGNVGQGGQAFVRGIEQQGNISIKWLEESKPVSCLAHYQQSSEAEKIAQSIILNGIRCQIQ

SEQ ID NO: 3531 - protein, 266 aa, Escherichia coli; identical to SEQ ID NO: 1894

SEQ ID NO: 3532 - protein, 161 aa, Escherichia coli; identical to SEQ ID NO: 2582

SEQ ID NO: 3533 - protein, 161 aa, Escherichia coli; identical to SEQ ID NO: 2582

SEQ ID NO: 3534 - protein, 747 aa, Escherichia coli; identical to SEQ ID NO: 2954

SEQ ID NO: 3535 - protein, 266 aa, Escherichia coli; identical to SEQ ID NO: 1892

SEQ ID NO: 3536 - protein, 351 aa, Escherichia coli; identical to SEQ ID NO: 2872

SEQ ID NO: 3537 - protein, 838 aa, Escherichia coli
MPQRHHQGHKRTPKQLALIIKRCLPMVLTGSGMLCTTANAEEYYFDPIMLETTKSGMQTTDLSRFSKKYAQLPGTYQVDIWLNKKKVSQKKITFTANAEQLLQPQFTVEQLRELGIKVDEIPALAEKDDDSVINSLEQIIPGTAAEFDFNHQRLNLSIPQIALYRDARGYVSPSRWDDGIPTLFTNYSFTGSDNRYRQGNRSQRQYLNMQNGANFGPWRLRNYSTWTRNDQASSWNTISSYLQRDIKALKSQLLLGESATSGSIFSSYTFTGVQLASDDNMLPNSQRGFAPTVRGIANSSAIVTIRQNGYVIYQSNVPAGAFEINDLYPSSNSGDLEVTIEESDGTQRRFIQPYSSLPMMQRPGHLKYSATAGRYRADANSDSKEPEFAEATAIYGLNNTFTLYGGLLGSEDYYALGIGIGGTLGALGALSMDINRADTQFDNQHSFHGYQWRTQYIKDIPETNTNIAVSYYRYTNDGYFSFDEANTRNWDYNSRQKSEIQFNISQTIFDGVSLYASGSQQDYWGNNDKNRNISVGVSGQQWGIGYSLNYQYSRYTDQNNDRALSLNLSIPLERWLPRSRVSYQMTSQKDRPTQHEMRLDGSLLDDGRLSYSLEQSLDDDNNHNSSLNASYRSPYGTFSAGYSYGNDSSQYNYGVTGGVVIHPHGVTLSQYLGNAFALIDANGASGVRIQNYPGIATDPFGYAVVPYLTTYQENRLSVDTTQLPDNVDLEQTTQFVVPNRGAMVAARFNANIGYRVLVTVSDRNGKPLPFGALASNDETGQQSIVDEGGILYLSGISSKSQSWTVRWGNQADQQCQFAFSTPDSEPTTSVLQGTAQCH

SEQ ID NO: 3538 - protein, 881 aa, Escherichia coli
MPDHSLFRLRILPWCIALAMSGSYSSVWAEDDIQFDSRFLELKGDTKIDLKRFSSQGYVEPGKYNLQVQLNKQPLAEEYDIYWYAGEDDASKSYACLTPELVAQFGLKEDVANNLQWSHDAKCLKSGQLEGMEIKADLSQSALVISLPQAYLEYTYPDWDPPSRWDDGISGIVADYSINAQTRHEENGGDDSNEISGNGTVGVNLGPWRMRADWQTNYQHTRSNDDDDEFSGDETQKKWEWSRYYAWRALPSLKAKLALGEDYLRSDIFDGFNYVGGSVSTDDQMLPPNLRGYAPDISGVAHTTAKVTVSQMGRVIYETQVPAGPFRIQDLGDSVSGTLHIRIEEQNGQVQEYDISTASMPYLTRPGQVRYKIMMGRPQEWGHHVEGEFFSGAEASWGIANGWSLYGGALGDENYQSAALGVGRDLSTFGAVAFDVTHSHTKLDKDTAYGKGSLDGNSFRVSYSKDFDQLNSRVTFAGYRFSEENFMTMSEYLDASDSGMVRTGNDKEMYTATYNQNFRDAGVSVYLNYTRHTYWDREEQTNYNIMLSHYFNMGSIRNVSISMTGYRYEYDNQADKGMYISLSMPWGDNSTVSYNGNYGSGTDSSQVGYFSRVDDATHYQLNVGTSDKHTSVDGYYSHDGSLAQVDLSANYHEGQYTSAGLSLQGGATLTAHGGALHRTQNMGGTRLLIDADGVADVPVEGNGAAVYTNMFGKAVVSDVNNYYRNQAYIDLNRLPENAEATQSVVQATLTEGAIGYRKFAVISGQKAMAVLRLSDGSHPPFGAEVKNDNEQTVGLVDDDGNVYLAGVKPGEHMSVFWSGVAHCDINLPDPLPADLFNGLLLPCQHKGNVAPITSPAVKPAIQEQTQRVTPTEPPTSISVNQ

SEQ ID NO: 3539 - protein, 478 aa, Escherichia coli; identical to SEQ ID NO: 2404

SEQ ID NO: 3540 - protein, 170 aa, Escherichia coli
MIFAVLSLLVAGELQAGVVVGGTRFIFPADRESISILLTNTSQESWLINSKINRPTRWAGGEASTVPAPLLAAPPLILLKPGTTGTLRLLRTESDILPVDRETLFELSIASVPSGKVENQSVKVAMRSVFKLFWRPEGCRATRWKLINNYAGHGSRRVYNSLTQRLITLT

SEQ ID NO: 3541 - protein, 203 aa, Escherichia coli; identical to SEQ ID NO: 2201

SEQ ID NO: 3542 - protein, 274 aa, Escherichia coli; identical to SEQ ID NO: 2304

SEQ ID NO: 3543 - protein, 252 aa, Escherichia coli
MTNLFCSARTAATTLALLITAASLSVQASVTPDRTRLIFNESDKSISVTLRNNDPKMPYLAQSWMEDGQGNRISSPLTVLPPVQRIDSMMNGQVKVQGMPDINKLPADRESVFYFNVREIPPKSNKPNTLQIALQTRIKLFWRPKALENVSMKNPWQHKVTLTLSGQEFTVNNPTPYFVVISNASAQKNGNPAAGFSPMVISPKTSVPLKVKMDSVPVLTYVNDYGARLPLFFRCTGNTCQVDEEQNSKGQG

SEQ ID NO: 3544 - protein, 860 aa, Escherichia coli
MSGSYVNAWAENEIQFDSRFLELKGDTKIDLKRFSSQGYVEPGKYNLQVQLNKQPLTEEYDIYWYASENDASKTYACLTPELVAQFGLKEDVAKNLQWIHDGKCLKPGQLEGIDIKADLSQSALVISLPQAYLEYTDINWDPPSRWDDGISGLIADYSITAQTRHEENGGDDSNEISGNGTVGVNLGAWRLRADWQTDYLHSKSNDDDVINGDDTQKNWEWSRYYAWRALPSLKAKLGLGEDYLNSDIFDGFNYVGGSISTDDQMLPPNLRGYAPDISGVAHTTAKVTVSQLGRVIYETQVPAGPFRIQDLGDSVSGTLHIRIEEQNGQVQEYDINTASMPFLTRPGQVRYKLMMGRPQEWGHHVEGGFFSGGEASWGIANGWSLYGGALADEHYQSAALGVGRDLSVFGAVAFDITHSHTRLDKETAYGKGSLDGNSFRLSYSKDFDELNSRVTFAGYRFSEENFMTMSEYLDASDSEMVRTGNDKEMYTATYNQNFRDAGVSVYLNYTRHTYWDRDEQTNYNVMLSHYFNLGSIRNMSISMTGYRYEYDNQADKGVYISLSMPWGDSSTISYNGNYGSGSDSSQVGYFSRVDDATHYQLNVGTSDNHSSVDGYYSHDGSLAQVDLSANYHEGQYTSAGISLQGGATLTAQGGALHRTQNMGGTRLLIDADGVAGVPVEGNGAAVYTNMFGKAVVADVNNYYRNQAYIDLNNLPENAEATQSVVQATLTEGAIGYRKFSVISGQKAMAVLRLQDGSYPPFGAEVKNDSAQNVGLVDDDGNVYLAGVKPGEHMIVSWGGVAHCDIHLPDPLPADLFNGLLLPCQQTGAISPSMPHEIKPVIQEQTQQVMPTEAPVSVSAN

SEQ ID NO: 3545 - protein, 446 aa, Escherichia coli; identical to SEQ ID NO: 2180

SEQ ID NO: 3546 - protein, 696 aa, Escherichia coli
MRITTLASVVIPCLGFSASSIAAAEDVMIVSASGYEKKLTNAAASVSVISQEELQSSQYHDLAEALRSVEGVDVESGTGKTGGLEISIRGMPASYTLILIDGVRQGGSSDVTPNGFSAMNTGFMPPLAAIERIEVIRGPMSTLYGSDAMGGVVNIITRKNADKWLSSVNAGLNLQESNKWGNSSQFNFWSSGPLVDDSVSLQVRGSTQQRQGSSVTSLSDTAATRIPYPTESQNYNLGARLDWKASEQDVLWFDMDTTRQRYDNRDGQLGSLTGGYDRTLRYERNKISAGYDHTFTFGTWKSYLNWNETENKGRELVRSVLKRDKWGLAGQPRELKESNLILNSLLLTPLGESHLVTVGGEFQSSSMKDGVVLASTGETFRQKSWSVFAEDEWHLTDALALTAGSRYEHHEQFGGHFSPRAYLVWDVADAWTLKGGVTTGYKAPRMGQLHKGISGVSGQGKTNLLGNPDLKPEESVSYEAGVYYDNPAGLNANVTGFMTDFSNKIVSYSINDNTNSYVNSGKARLHGVEFAGTLPLWSEDVTLSLNYTWTRSEQRDGDNKGAPLSYTPEHMVNAKLNWQITEEVASWLGARYRGKTPRFTQNYSSLSAVQKKVYDEKGEYLKAWTVVDAGLSWKMTDALTLKAAVNNLLNKDYSDVSLYSAGKSTLYAGDYFQTGSSTTGYVIPERNYWMSLNYQF

SEQ ID NO: 3547 - protein, 209 aa, Escherichia coli
MPASSRIIYRDGDREKTLMLVNTNDYPVLVQSWVDNGEGSPEAASPPFVVLPPVFRLAARRTQGLRIIYNHDPLPQDRESAFWLNLYEMPPETPHQDPTHLTLAMNTQLKIFYRPKSVTMTPQEAMRKISWHLGNDGSSSYIELNNPTPLNISFTSISIGATKVQQESDMMIKPFSQRRYWLASNNVSGVVAATYLDDNGAQIKQQLAQ

SEQ ID NO: 3548 - protein, 233 aa, Escherichia coli
MNIFAYLLVLVFSMSMSSSAFASVVMTGTRIIFPGDAKEKTIQLRNTSDQPYIINIHVEDERGSDKNVPFMPTPQTFRMEAAAGQALRLLYTGNNLPQDRESVFWFSFSQLPYLNKNDKSQNQLILALTNRVKIFYRPSSIVGKSSDAPKNLTYQVKQNRIEVTNPTGYYVTIRAAELLNNGKKVPLANSVMIAPQSTTEWTLPSGISVAPGAQIHLVTVNDYGVNVTSEHAL

SEQ ID NO: 3549 - protein, 368 aa, Escherichia coli; identical to SEQ ID NO: 2370

SEQ ID NO: 3550 - protein, 241 aa, Escherichia coli; identical to SEQ ID NO: 2887

SEQ ID NO: 3551 - protein, 856 aa, Escherichia coli
MAGFFVRLFVACAFAVQAPLSSAELYFNPRFLADDPQAVADLSRFENGQELPPGTYRVDIYLNNGYMATRDVTFNTGDSEQGIVPCLTRAQLASMGLNTASVAGMNLLADDACVPLTTMVQDATAHLDVGQQRLNLTIPQAFMSNRARGYIPPELWDPGINAGLLNYNFSGNSVQNRIGGNSHYAYLNLQSGLNIGAWRLRDNTTWSYNSSDRSSGSKNKWQHINTWLERDIIPLRSRLTLGDGYTQGDIFDGINFRGAQLASDDNMLPDSQRGFAPVIHGIARGTAQVTIKQNGYDIYNSTVPPGPFTINDIYAAGNSGDLQVTIKEADGSTQIFTVPYSSVPLLQREGHTRYSITAGEYRSGNAQQEKPRFFQSTLLHGLPAGWTIYGGTQLADRYRAFNFGIGKNMGALGALSVDMTQANSTLPDDSQHDGQSVRFLYNKSLNESGTNIQLVGYRYSTSGYFNFADTTYSRMNGYNIETQDGVIQVKPKFTDYYNLAYNKRGKLQLTVTQQLGRSSTLYLSGSHQTYWGTSNVDEQFQAGLNTAFEDINWTLSYSLTKNAWQKGRDQMLARNVNIPFSHWLRSDSKSQWRHASASYSMSHDLNGRMTNLAGVYGTLLEDNNLSYSVQTGYAGGGDGNSGSTGYATLNYRGGYGNANIGYSHSDDIKQLYYGVSGGVLAHANGVTLGQPLNDTVVLVKAPGAKDAKVENQTGVRTDWRGYAVLPYATEYRENRVALDTNTLADNVDLDNAVANVVPTRGAIVRAEFKARVGIKLLMTLTHNNKPLPFGAMVTSESSQSSGIVADNGQVYLSGMPLAGKVQVKWGEEENAHCVANYQLPPESQQQLLTQLSAECR

SEQ ID NO: 3552 - protein, 784 aa, Escherichia coli; identical to SEQ ID NO: 2240

SEQ ID NO: 3553 - protein, 191 aa, Escherichia coli; identical to SEQ ID NO: 2727

SEQ ID NO: 3554 - protein, 232 aa, Escherichia coli; identical to SEQ ID NO: 2087

SEQ ID NO: 3555 - protein, 213 aa, Escherichia coli; identical to SEQ ID NO: 2232

SEQ ID NO: 3556 - protein, 170 aa, Escherichia coli; identical to SEQ ID NO: 2565

SEQ ID NO: 3557 - protein, 89 aa, Escherichia coli; identical to SEQ ID NO: 2812

SEQ ID NO: 3558 - protein, 359 aa, Escherichia coli; identical to SEQ ID NO: 2332

SEQ ID NO: 3559 - protein, 432 aa, Escherichia coli; identical to SEQ ID NO: 2026

SEQ ID NO: 3560 - protein, 111 aa, Escherichia coli; identical to SEQ ID NO: 2911

SEQ ID NO: 3561 - protein, 243 aa, Escherichia coli
MTFVKGFPLILLVASMCSHGAVQPDRTRIIFNSKDKATSLRVENRSDKLPYLAYSWIENEKGEKSDEFLVALPPIQRLEPKATSQVRIMKQAATAKLPTDRESLFYYNLREIPPVPEGSEGHAILQVAVQSRIKLFWRPAALRKKMGDHVEQQLQVSQQNNQLTLKTPTGYYLTIAYLGRDEKGVLPGFKSTMVAPFSSVTTSTGSYSGKQFYLGYMDDYGALRMNTLSCQRQCRLQPVENKK

SEQ ID NO: 3562 - protein, 816 aa, Escherichia coli
MNIYRLSVLSCLAMVTPPALTAEFNLNVLDKSIRDSVDISLLNQKGVVAPGDYFVSVTVNNNKISNGQQIRWQKSGDKIIPCINESLIELFGLKSDFRKKLPAIKECVDFSVFPEIIFTFDQANQQLNITIPQAWLAWHSENWTPPSTWNNGIPGFLMDYNLFASTYRPQSGSSSNNLNAYGTTGLNAGAWRLRSDYQLSQSDSGDNREQSGAISRTYLFRPLPQIGSRLTLGETDFSSNIFDGFSYTGAALASDDRMLPWELRGYAPQISGIAQTNATVTISHSGRVIYQKKVPPGPFIIDDLNQSVQGTLDVKVSEEDGRVNNFQVSAASTPFLTRQGQVRYKLAAGRPRSSMSHHTEDETFISHEVSWGMLSNTSLYGGMLLAGDDYRSGALGIGQNMLWMGALSFDVTWADSHFDTQQDEQGYSYRFNYSKQVDATNSTISLAAYRFSDRHFHSYANYIDHKYNDADAQDEKQTISLSFGQPITLLNLNLYANILHQSWWNADTSTTANITVGFNVDIGDWKDISVSTSFNTTHYEDKDRDNQIYFSISLPIGESGRLGYDMQNNSNTTTHRMSWNDTLDERNSWGMSAGIQSDRPDNGAQVSGNYQHLSSAGEWDLTGTYAANDYTSASASWSGSFTATQHGAAFHRRSSTNEPRLMVSTDGVGDIPIQGNIDYTNRFGIAVVPFVSSYQPTTVAVNMNDLPDGVTVSENVVKETWTEGAIGFKSLASRAGKDLNVIISDANGHFPPLGADVRQAEGGVSVGMVGENGHAWLSGVDENQQFTVHWGDQKTCAIHLPEHLEDVTKRLILPCH

SEQ ID NO: 3563 - protein, 826 aa, Escherichia coli
MLRMTPLASAIVALLLGIEAHAAEETFDTHFMMGGMKGEQVTNLRLDDNQPLPGQYDIDIYVNKQWRGKYEIIVKDNPHETCLTREIVKRLGINSDNFARENQCLTFEQLVQGGSYSWDIGIFRLDLAVPQAWVEELENGYVPPENWERGINAFYTSYYVSQYYSDYKASGNSKSTYVRFNSGLNLLGWQLHSDASFSKTDNNPGEWKSNTLYLEHGFSQILGTLRIGDMYTSADIFDSVRFTGVRLFRDMQMLPNSKQNFTPRVQGIAQSNALVTIEQNGFVVYQKEVPPGPFSISDLQLAGGGADLDVSVKEADGSVTTYLVPYAAVPNMLQPGVSKYDFAAGRSHIEGASKQSDFVQAGYQYGFNNLLTLYGGTMVANNYYAFTLGTGWNTRIGAISVDATKSHSKQDNGDVFDGQSYQIAYNKFLSQTSTRFGLAAWRYSSRDYRTFNDYVWANNKDNYRRDKNDVYDIADYYQNDFGRKNSFSANMSQSLPEGWGSVSLSTLWRDYWGRSGSSKDYQLSYSNNWRRISYTLAASQAYDENHAEEKRFNIFISIPFDWGDDVTTPRRQIYMSNSTTFDDQGFASNNTGLSGTVGNRDQFNYGINLSHQHQGNETTAGANLTWTAPAATVNGSYSQSSTYRQVGASVSGGLVAWSGGVNLANRLSETFAVMHAPGIKDAYVNGQKYRTTNCNGVVVYDGLTPYRENHLMMDVSQSDSETELRGNRKMTAPYRGAVVLVDFDTDQRKPWFIKALRSDGQPLTFGYEVNDMHGHNIGVVGQGSQIFIRTNEIPPAVNVAIDKQQGLSCTITFGKEIDESKNYICR

SEQ ID NO: 3564 - protein, 237 aa, Escherichia coli; identical to SEQ ID NO: 2816

SEQ ID NO: 3565 - protein, 614 aa, Escherichia coli; identical to SEQ ID NO: 1883

SEQ ID NO: 3566 - protein, 746 aa, Escherichia coli; identical to SEQ ID NO: 2949

SEQ ID NO: 3567 - protein, 760 aa, Escherichia coli; identical to SEQ ID NO: 2078

SEQ ID NO: 3568 - protein, 780 aa, Escherichia coli
MKIPTTTDIPQRYTWCLAGICYSSLAILPSFLSYAESYFNPAFLLENGTSVADLSRFERGNHQPARVYRVDLWRNDEFIGSQDIVFESTTENTGDKSGGLMPCFNQVLLERIGLNSSAFPELAQQQNNKCINLLKAVPDATINFDFAAMRLNITIPQITLLSSAHGYIPPEEWDEGIPALLLNYNFTGNRGNGNDSYFFSELSGINIGPWRLRNNGSWNYFRGNGYHSEQWNNIGTWVQRAIIPLKSELVMGDGNTGSDIFDGVGFRGVRLYSSDNMYPDSQQGFAPTVRGIARTAAQLTIRQNGFIIYQSYVSPGAFEITDLHPTSSNGDLDVTIDERDGNQQNYTIPYSTVPILQREGRFKFDLTAGDFRSGNSQQSSPFFFQGTALGGLPQEFTAYGGTQLSANYTAFLLGLGRNLGNWGAVSLDVTHARSQLADDSRHEGDSIRFLYAKSMNTFGTNFQLMGYRYSTQGFYTLDDVAYRRMEGYEYDYDYDGEHRDEPIIVNYHNLRFSRKDRLQLNISQSLNDFGSLYISGTHQKYWNTSDSDTWYQVGYTSSWVGISYSLSFSWNESVGIPDNERIVGLNVSVPFNVLTKRRYTRENALDRAYASFNANRNSNGQNSWLAGVGGTLLEGHNLSYHVSQGDTSNNGYTGSATANWQATYGTLGVGYNYDRDQHDVNWQLSGGVVGHENGITLSQPLGDTNVLIKAPGAGGVRIENQTGILTDWRGYAVMPYATVYRYNRIALDTNTMGNSIDVEKILAALCRRKARWFVPILIPA

SEQ ID NO: 3569 - protein, 518 aa, Escherichia coli; identical to SEQ ID NO: 2351

SEQ ID NO: 3570 - protein, 227 aa, Escherichia coli
MRIITALLMSFFILPVHAGVVIYGTRIIYPEKNREVLVQLMNQSKNASLIQAWIDDGNTTIAPEKIQVTFILTPPVSRVAGGSGQQLKIRKMPNNLPHNKESLFYLNVLDIPPNNPQNAGKNKIKLALQNRIKLLWRPSGIAPVDKKSLSQLNIKKKNNAISINNETANWITVTTIKAQNVKVNNESILLPPFSHNDITLKNNHASEYELTVVDDYGNNIHSKIAAR

SEQ ID NO: 3571 - protein, 816 aa, Escherichia coli; identical to SEQ ID NO: 2817

SEQ ID NO: 3572 - protein, 162 aa, Escherichia coli; identical to SEQ ID NO: 1969

SEQ ID NO: 3573 - protein, 208 aa, Escherichia coli; identical to SEQ ID NO: 1949

SEQ ID NO: 3574 - protein, 865 aa, Escherichia coli
MPRFARLTIALGLATAVFPVDAEYYFNPRFLSNDLAESVDLSAFTKGREAPPGTYRVDIYLNDEFMTSRDITFIADDNNAELIPCLSTDLLVSLGIKKIALLDNKEHSAEKHVPDNSACTPLQDRLADASTEFDVGQQHLSLSVPQIYVGRMARGYVSPDLWEEGINAGLLNYSFNGNSINNRSNHNAGKSNYAYLNLQSGINIGSWRLRDNSTWSYYSGSSNSSDSNKWQHINTSAERDIIPLRSRLTVGDSYTDGDIFDSVNFRGLKINSTEAMLPDSQHGFAPVIHGIARGTAQVSVKQNGYDVYQTTVPPGPFTIDDINSAANGGDLQVTIKEADGSIQTLYVPYSSVPVLQRAGYTRYALAMGEYRSGNNLQSSPKFIQGSLMHGLEGNWTPYGGMQIAEDYQAFNLGIGKDLGLFGAFSFDITQANTTLADGTRHSGQSVKSVYSKSFYQTGTNIQVAGYRYSTQGFYNLSDSAYSRMSGYTVKPPTGDTNEQTQFIDYFNLFYSKRGQEQISISQQLGNYGTTFFSASRQSYWNTSRSDQQISFGLNVPFGDITTSLNYSYSNNIWQNDRDHLLAFTLNVPFSHWMRTDSQSAFRNSNASYSMSNDLKGGMTNLSGVYGTLLPDNNLNYSVQVGNTHGGNTSSGTSGYSSLNYRGAYGNTNVGYSRSGDSSQIYYGMSGGIIAHADGITFGQPLGDTMVLVKAPGADNVKIENQTGIHTDWRGYAILPFATEYRENRVALNANSLADNVELDETVVTVIPTHGAIARATFNAQIGGKVLMTLKYGNKSVPFGAIVTHGENKNGSIVAENGQVYLTGLPQSGKLQVSWGKDKNSNCIVEYKLPEVSPGTLLNQQTAICR

SEQ ID NO: 3575 - protein, 823 aa, Escherichia coli
MTPLASAIVALLLGIEAYAAEETFDTHFMIGGMKDQQVANIRLDDNQPLPGQYDIDIYVNKQWRGKYEIIVKDNPQETCLSREVIKRLGINSDNFASGKQCLTFEQLVQGGSYTWDIGVFRLDFSVPQAWVEELESGYVPPENWERGINAFYTSYYVSQYYSDYKASGNSKSTYVRFNSGLNLLGWQLHSDASFSKTNNNPGVWKSNTLYLERGFAQLLGTLRVGDMYTSSDIFDSVRFRGVRLFRDMQMLPNSKQNFTPRVQGIAQSNALVTIEQNGFVVYQKEVPPGPFAITDLQLAGGGADLDVSVKEADGSVTTYLVPYAAVPNMLQPGVSKYDFAAGRSHIEGASKHSDFVQAGYQYGFNNLLTLYGGSMVANNYYAFTLGTGWNTRIGAISVDATKSHSKQDNGDVFDGQSYQIAYNKFVSQTSTRFGLAAWRYSSRDYRTFNDHVWANNKDNYRRDENDVYDIADYYQNDFGRKNSFSANMSQSLPEGWGSVSLSTLWRDYWGRSGSSKDYQLSYSNNLRRISYTLAASQAYDENHHEEKRFNIFISIPFDWGDDVSTPRRQIYMSNSTTFDDQGFASNNTGLSGTVGSRDQFNYGVNLSHQHQGNETTAGANLTWNAPVATVNGSYSQSSTYRQAGASVSGGIVAWSGGVNLANRLSETFAVMNAPGIKDAYVNGQKYRTTNRNGVVVYDGMTPYRENHLMLDVSQSDSEAELRGNRKIAAPYRGAVVLVNFDTDQRKPWFIKALRADGQPLMFGYEVNDIHGHNIGVVGQGSQLFIRTNEVPPSVNVAIDKQQGLSCTITFGKEIDESRNYICQ

SEQ ID NO: 3576 - protein, 203 aa, Escherichia coli; identical to SEQ ID NO: 2009

SEQ ID NO: 3577 - protein, 207 aa, Escherichia coli; identical to SEQ ID NO: 2211

SEQ ID NO: 3578 - protein, 224 aa, Escherichia coli
MTVSLTAILLSCSSTWAAGKGGVGLAATRLVYSEGEEQISLGVRNTSPDVPYLIQSWVMTPDNKKSADFIITPPLFVLNPANENLLRIMYIGAPLAKDRETLFFTSVRAVPSTTKREEGNTLKIATQSVIKLFWRPKGLAYPLGEAPAKLRCTSSADMVTVSNPTPYFITLTDLKIGGKLVKNQMISPFDKYQFSLPKGAKNSSVTYRTINDYGAETPQLNCKS

SEQ ID NO: 3579 - protein, 324 aa, Escherichia coli
MGQHVDLTMFEKGQEQQLPGIYRVSVYVNEQRMETRTLEFKEATEAQRKAMGESLVPCLSRTQLAEMGVRVESFPALNLVSAEACVPFDEIIPLASSHFDFSEQKLVLSFPQAAMHQVARGTVPESLWDEGIPALLLDYSFSGSNSEYDSTGSSSSYVDDNGTVHHDDGKDTLKSDSYYLNLRSGLNLGAWRLRNYSTWSHSGGKAQWDNIGTSLSRAIIPFKAQLTMGDTATAGDIFDSVQMRGAMLASDEEMLPDSQRGFAPIVRGIAKSNAEVSIEQNGYVIYRTYVQPGAFEINDLYPTANSGDLTVIIKEADGSEQRFI

SEQ ID NO: 3580 - protein, 633 aa, Escherichia coli
MLRTTRWVAAIIFLYSFPGYAEETFDTHFMIGGMKGEKVSEYHFDNKQPLPGNYELDFYVNNQWRGKQDITIPESPVKPCLPKVLLTKLGVKTGNLNTEDNCILLDKAVHGGQYQWDISEHRLNLTVPQAYINELERGYVPPESWDRGIDAFYTSYNLSQYRSYDSNNNSNTASYGRFNSGLNLFSWQLHSDASYSKPDDMKGTWQSNTLYLEHGWSQILSTVQIGENYTSSLIFDSLRFSGIRLFRDMQMLPDSMQSFTPLVQGVAQSNALITVSQNGYIIYQKEVPPGPFTIADLQLSGSGSDLDVSIKEADGSVRSFLVPYSSVPNMLQPGISNFDFIAGRSKIYGVKNQEDFLEANYIYGLNNLLTLYGGTILSDNYNAITLGNGWNTPLGAISFDATRSSSKLNNDITHEGTSYQVAYNKYLVQTATRFSVAAWRYASQDYRTFSDHLYENDKINHQSDYDDFYDIGRKNSLSANIMQPLSNNLGNVSLSALWRNYWGRSGNAKDYQFSYSNSWQRISYTFSASQSYDENDKEEERFNLFISIPFYWGDDIAKTRHQINLSNSTSFSKDGYSSNNTGITGIAGEHDQLNYGIYVNQQQQNNDTSLGTNLSWRTPIATIDGSYSHSKNA

SEQ ID NO: 3581 - protein, 367 aa, Escherichia coli; identical to SEQ ID NO: 2431

SEQ ID NO: 3582 - protein, 241 aa, Escherichia coli
MFPLVKKTVSALFVSTLLASAPAFADIIISGTRIIYNADKKDVNVRLENKGNRPLLIQNWLDTGDDNADPSQIKVPFTATPPVSRVEPKRGQTVKVMYTGATALPKDRESVYWFNVLEVPPKPKDAEADKNLLQLAFRTRIKLFYRPSGLQGEPAEAPAKITWKLNNAQLQANNPTPYYVSFNEVKLESGGKTYNVNSSMVTPFSQASFGVTSLPGSVSSGKVVFKAINDFGGNIDGSATF

SEQ ID NO: 3583 - protein, 760 aa, Escherichia coli
MGVNTDAFPAFKQLDKQACVPLAEIIPDASVTFNVNKLRLEISVPQIAIKSNARGYVPPERWDEGINALLLGYSFSGANSIHSSADSDSGDSYFLNLNSGVNLGPWRLRNNSTWSRSSGQTAEWKNLSSYLQRAVIPLKGELTVGDDYTAGDFFDSVSFRGVQLASDDNMLPDSLKGFAPVVRGIAKSNAQITIKQNGYTIYQTYVSPGAFEISDLYSTSSSGDLLVEIKEADGSVNSYSVPFSSVPLLQRQGRIKYAVTLAKYRTNSNEQQESKFAQATLQWGGPWGTTWYGGGQYAEYYRAAMFGLGFNLGDFGAISFDVTQAKSTLADQSEHKGQSYRFLYAKTLNQLGTNFQLMGYRYSTSGFYTLSDTMYKHMDGYEFNDGDDEDTPMWSRYYNLFYTKRGKLQVNISQQLGEYGSFYLSGSQQTYWHTDQQDRLLQFGYNTQIKDLSLGVSWNYSKSRGQPDADQVFALNFSLPLNLLLPRSNDSYTRKKNYAWMTSNTSIDNEGHITQNLGLTETLLDDGNLSYSVQQGYNSEGKTANGSASMDYKGAFADARVGYNYSDNGSQQQLNYALSGSLVAHSQGITLGQSLGETNVLIAAPGAENTRVANSTGLKTDWRGYTVVPYATSYRENRIALDAASLKRNVDLENAVVNVVPTKGALVLAEFNAHAGARVLMKTSKQGIPLRFGAIATLDGIQTNSGIIDDDGSLYMSGLPAQGAITVRWGEAPDQICHISYQLTEQQINSAITRMDAICR

SEQ ID NO: 3584 - protein, 368 aa, Escherichia coli
MNKTITALAIMMASFAANASVLPETPVPFKSGTGAIDNDTVYIGLGSAGTAWYKLDTQAKDKKWTALAAFPGGPRDQATSAFIDGNLYVFGGIGKNSEGLTQVFNDVHKYNPKTNSWVKLMSHAPMGMAGHVTFVHNGKAYVTGGVNQNIFNGYFEDLNEAGKDSTAIDKINAHYFDKKAEDYFFNKFLLSFDPSTQQWSYAGESPWYGTAGAAVVNKGDKTWLINGEAKPGLRTDAVFELDFTGNNLKWNKLDPVSSPDGVAGGFAGISNDSLIFAGGAGFKGSRENYQNGKNYAHEGLKKSYSTDIHLWHNGKWDKSGELSQGRAYGVSLPWNNSLLIIGGETAGGKVVTDSVLISVKDNKVTVQI

SEQ ID NO: 3585 - protein, 89 aa, Escherichia coli; identical to SEQ ID NO: 2810

SEQ ID NO: 3586 - protein, 430 aa, Escherichia coli; identical to SEQ ID NO: 2617

SEQ ID NO: 3587 - protein, 729 aa, Escherichia coli; identical to SEQ ID NO: 2948

SEQ ID NO: 3588 - protein, 834 aa, Escherichia coli; identical to SEQ ID NO: 3095

SEQ ID NO: 3589 - protein, 229 aa, Escherichia coli
MMKSKFVALALSLFLSQSVLAGGVGLSSTRVIYDGSKKEASLTVQNKSKTEEFLIQSWVDDAAGSKKTPFIITPPLFKLDPEKNNILRIVNITPGLPQDRESVYWVNVKAIPSKSDDSENKNVLQIAVRTRIKLFYRPAGLKGDVKTAPNELRFTRNGNQLRVDNPTVFNITFNQFFANDKEIEKAGMVPAKGALNITLPAGVGSVSKIKYNTINDFGSSAEMITKNVD

SEQ ID NO: 3590 - protein, 514 aa, Escherichia coli
MCNEKNKFFIFTALFCCSAQAAPSSLEKRLGKSEYFIITKSSPVRAILNDFAANYSIPVFISSSVNDDFSGEIKNEKPVKVLEKLSKLYHLTWYYDENILYIYKTNEISRSIITPTYLDIDSLLKYLSDTISVNKNSCNVRKITTFNSIEVRGVPECIKYITSLSESLDKEAQSKAKNKDVVKVFKLNYASATDITYKYRDQNVVVPGVVSILKTMASNGSLPSTGKGAVERSGNLFDNSVTISADPRLNAVVVKDREITMDIYQQLISELDIEQRQIEISVSIIDVDANDLQQLGVNWSGTLNAGQGTIAFNSSTAQANISSSVISNASNFMIRVNALQQNSKAKILSQPSIITLNNMQAILDKNVTFYTKVSGEKVASLESITSGTLLRVTPRILDDSSNSLTGKRRERVRLLLDIQDGNQSTNQSNAQDASSTLPEVQNSEMTTEATLSAGESLLLGGFIQDKESSSKDGIPLLSDIPVIGSLFSSTVKQKHSVVRLFLIKATPIKSASSE

SEQ ID NO: 3591 - protein, 840 aa, Escherichia coli
MNKSVVSISAAMLVLLCQPVMGSEISPATPSDEDNYTFDPQLFRGSRFSQSSLAKLTTRESVAPGNYKMDIYTNNKLSGSWNVTFKEAADGRVLPCLTPEVADAIGLKTGEDKGEKDPVCTFAKELAPGITSQTQLSQLRLDLSVPQSQLISRPRGYVPPSELDTGASLAFMNYIANYYNVAYSGQNAHSQRSLWASFNGGINLGAWQYRQLSNMTWDNDKGNQWNNIRSYLQRPLPAINSQLMMGQLITSGRFFSGLSYHGVSLATDERMLPDSMRGYAPTIRGVAATNARVSVMQNGHEIYQTTVAPGPFEINDLYPTSYSGDLDVTVTEANGAVSRFSVPFSAVPESMRPGTSRYNVEVGKTQDSGDDSMFGDLTWQHGMTNTLTFNSGSRIADGYQALMLGGVYGSSLGAFGANLTWSHARVPESEAQSGWMSQLTWSKTFQPTSTTVSLAGYRYSTSGYRDLADVLGERHAASNKQSWDSSQWRQQSRFDLTLSQSLANYGNLFVSGSTQNYRGGKSRDTQLQLGYSNSFSHGISMNLSVGRQRMGGYKDNSDDMQTVTSLSFSFPLGGNGPRVPSLSNSWTHSTDGSSQLQSSLTGMLDEAQTTNYSLNVMRDQQYKQTTLSGNMQKRFSQTTVGLNASKGQDYWQASGNVQGAMAVHGGGITFGPYLGETFALVEAKGAEGAKVYNSSQLEINDSGYALVPAVTPYRYNRISLDPQGMDGDAELVDSERQVAPVAGAAVKVIFRTRPGKALLIKSRMADGSELPMGADVLDENNTVVGIAGQGGQIYLRTEQTKGHLSVRWGEGANDSCQLPFDISGKDSNSPIIRLNETCQS

SEQ ID NO: 3592 - protein, 118 aa, Escherichia coli [sequence omitted]

SEQ ID NO: 3593 - protein, 193 aa, Escherichia coli; identical to SEQ ID NO: 2250

SEQ ID NO: 3594 - protein, 113 aa, Escherichia coli
MEKDQKNENTLQLAIISRIKMFYRPTNLAMAPEEAPAMLRFRRSGSNLTLINPTPYFITVTNMKAGNSNLPNTMVPPKGEVSVDIPHAATGDISFQTINDYGALTPRIKATMQ

SEQ ID NO: 3595 - protein, 650 aa, Escherichia coli; identical to SEQ ID NO: 3057

SEQ ID NO: 3596 - protein, 191 aa, Escherichia coli; identical to SEQ ID NO: 2996

SEQ ID NO: 3597 - protein, 629 aa, Escherichia coli
MTVTATGNARSSFEAPMMVSVIDTSAPENQTATSATDLLRHVPGITLDGTGRTNGQDVNMRGYDHRGVLVLVDGVRQGTDTGHLNGTFLDPALIKRVEIVRGPSALLYGSGALGGVISYDTVDAKDLLQEGQSSGFRVFGTGGTGDHSLGLGASAFGRTENLDGIVAWSSRDRGDLRQSNGETAPNDESINNMLAKGTWQIDSAQSLSGLVRYYNNDAREPKNPQTVEASESSNPMVDRSTIQRDAQLSYKLAPQGNDWLNADAKIYWSEVRINAQNTGSSGEYREQITKGARLENRSTLFADSFASHLLTYGGEYYRQEQHPGGATTGFPQAKIDFSSGWLQDEITLRDLPITLLGGTRYDSYRGSSDGYKDVDADKWSSRAGMTINPTNWLMLFGSYAQAFRAPTMGEMYNDSKHFSIGRFYTNYWVPNPNLRPETNETQEYGFGLRFDDLMLSNDALEFKASYFDTKAKDYISTTVDFAAATTMSYNVPNAKIWGWDVMTKYTTDLFSLDVAYNRTRGKDTDTGEYISSINPDTVTSTLNIPIAHSGFSVGWVGTFADRSTHISSSYSKQPGYGVNDFYVSYQGQQALKGMTTTLVLGNAFDKEYWSPQGIPQDGRNGKIFVSYQW

SEQ ID NO: 3598 - protein, 230 aa, Escherichia coli; identical to SEQ ID NO: 2995

SEQ ID NO: 3599 - protein, 370 aa, Escherichia coli
MQRAVIPLKGELTVGDDYTAGDFFDSVSFRGVQLASDDNMLPDSLKGFAPVVRGIAKSNAQITIKQNGYTIYQTYVSPGAFEISDIYSTSSSGDLLVEIKEADGSVNSYSVPFSSVPLLQRQGRIKYAVTLAKYRTNSNEQQESKFAQATLQWGGPWGTTWYGGGQYAEYYRAAMFGLGFNLGDFGAISFDVTQAKSTLADQSEHKGQSYRFLYAKTLNQLGTNFQLMGYRYSTSGFYTLSDTMYKHMDGYEFNDGDDEDTPMWSRYYNLFYTKRGKLQVNISQQLSEYGSFYLSGSQQTYWHTDQQDRLLQFGYNTQIKDLSLGISWNYSKSRGQPDADQVFALNFSLPLNLLLSRSNDSYTSKKITPG

SEQ ID NO: 3600 - protein, 386 aa, Escherichia coli
MVDDVPVAQVLQALAEQEKLNLVVSPDVSGTVSLHLTDVPWKQALQTVVKSAGLITRQEGNILSVHSIAWQNDNIARQEAEQARAQANLPLENRNITLQYADAGELAKAGEKLLSAKGSMTVDKRTNRLLLRDNKTALSALEQWVAQMDLPVGQVELSAHIVTINEKSLRELGVKWTLADAQHAGGVGQVTTLGSDLSVATATTHVGFNIGRINGRLLDLELSALEQKQQLDIIASPRLLASHLQPASIKQGSEIPYQVSSGESGATSVEFKEAVLGMEVTPTVLQKGRIRLKLHISQNVPGQVLQQADGEVLAIDKQEIETQVEVKSGETLALGGIFTRKNKSGQDSVPLLGDIPWFGQLFRHDGKEDERRELVVFITPRLVSSE

SEQ ID NO: 3601 - protein, 361 aa, Escherichia coli
MKRNILAVIVPALLVAGTANAAEIYNKDGNKVDLYGKAVGLHYFSKGNGENSYGGNGDMTYARLGFKGETQINSDLTGYGQWEYNFQGNNSEGADAQTGNKTRLAFAGLKYADVGSFDYGRNYGVVYDALGYTDMLPEFGGDTAYSDDFFVGRVGGVATYRNSNFFGLVDGLNFAVQYLGKNERDTARRSNGDGVGGSISYEYEGFGIVGAYGAADRTNLQEAQLLGNGKKAEQWATGLKYDANNIYLAANYGETRNATPITNKFTNISGFANKTQDVLLVAQYQFDFGLRPSIAYTKSKAKDVEGIGDVDLVNYFEVGATYYFNKNMSTYVDYIINQIDSDNKLGVGSDDTVAVGIVYQF

SEQ ID NO: 3602 - protein, 108 aa, Escherichia coli
MATAGIVVGGTRVIFYGDKPDTTISIFNKETNLPYLLQTWVDPFNKEDKSKPPFSVIPPVSRIEPQQEKILRILKTAGELPKDRESVFWLNVKNIPPSIDKKIPMFLR

SEQ ID NO: 3603 - protein, 975 aa, Escherichia coli
MTVNKIKNIFNNATLTTKSAFNTASSSVRSAGKKLILLIPDNYEAQGVGINELVKAADELGIEIHRTERDDTAIANQFFGAAEKVVGLTERGVAIFAPQLDKLLQKYQKVGSKIGGTAENVGNNLGKAGTVLSALQNFTGIALSGMALDELLRKQRAGEDISQNDIAKSSIELINQLVDTVSSINSTVDSFSEQLNQLGSFLSSKPRLSSVGGKLQNLPDLGPLGDGLDVVSGILSAVSASFILGNSDAHTGTKAAAGIELTTQVLGNVGKAVSQYILAQRMAQGLSTTAASAGLITSAVMLAISPLSFLAAADKFERAKQLESYSERFKKLNYEGDALLAAFHKETGAIDAALTTINTVLSSVSAGVSAASSASLIGAPISMLVSALTGTISGILEASKQAMFEHVAEKFAARINEWEKEHGKNYFENGYDARHAAFLEDSLSLLADFSRQHAVERAVAITQQHWDEKIGELAGITRNADRSQSGKAYINYLENGGLLEAQPKEFTQQVFDPQKGTIDLSTGNVSSVLTFITPTFTPGEEVRERKQSGKYEYMTSLIVNGKDTWSVKGIKNHKGVYDYSKLIQFVEKNNKHYQARIISELGDKDDVVYSGAGSSEVFAGEGYDTVSYNKTDVGKLTIDATGASKPGEYIVSKNMYGDVKVLQEVVKEQEVSVGKRTEKIQYRDFEFRTGGIPYDVIDNLHSVEELIGGKHDDEFKGGKFNDIFHGADGNDYIEGNYGNDRLYGDDGDDYISGGQGDDQLFGGSGNDKLSGGDGNNYLTGGSGNDELQAHGAYNILSGGTGDDKLYGGGGIDLLDGGEGNDYLNGGFGNDIYVYGQNYGHHTIADEGGKGDRLHLSDISFDDIAFKRVGNDLIMNKAINGVLSFNESNDVNGITFKNWFAKDASGADNHLVEVITDKDGREIKVDKIPHNNNERSGYIKASNIASEKTWLISPVLPMILIRLFLQFQGSIQVMND

SEQ ID NO: 3604 - protein, 224 aa, Escherichia coli
MKGLLSLLISSMIFPVHAGMVIFGTRIIYPAEQKEVMVQLMNQGNRSSLMQAWIDDGDTSLPPEKIQVPFMLTPPVVKVAANSGQQIKIKIMPNKLPSNKESIFYLNVLDIPPNSPEDEGKNALKFAMQNRIKLFYRPAGIAPVNKTTFKKLRVSRSGNNVVIKNDSPNWVTISDVKANNVKVNYETIMIAPQESQNVSEKNNNANGWQLTIIDDHGNYISDKI

SEQ ID NO: 3605 - protein, 237 aa, Escherichia coli
MRKITQAISAVCLLFALNSSAVALASSPSPLNPGTNVARLAEQAPIHWVSVAQIENSLAGRPPMAVGFDIDDTVLFSSPGFWRGKKNFSPESEDYLKNPVFWEKMNNGWDEFSIPKEVARQLIDMHVRRGDAIFFVTGRSPTKTETVSKTLADNFHIPATNMNPVIFAGDKPGQNTKSQWLQDKNIRIFYGDSDNDITAARDVGARGIRILRASNSTYKPLPQAGAFGEEVIVNSEY

SEQ ID NO: 3606 - protein, 878 aa, Escherichia coli
MSYLNLRLYQRNTQCLHIRKHRLAGFFVRLVVACAFAAQAPLSSAELYFNPRFLADDPQAVADLSRFENGQELPPGTYRVDIYLNNGYMATRDVTFNTGDSEQGIVPCLTRAQLASMGLNTASVSGMNLLADDACVPLTSMIHDATAHLDVGQQRLNLTIPQAFMSNRARGYIPPELWDPGINAGLLNYNFSGNSVQNRIGGNSHYAYLNLQSGLNIGAWRLRDNTTWSYNSSDRSSGSKNKWQHINTWLERDIIPLRSRLTLGDGYTQGDIFDGINFRGAQLASDDNMLPDSQRGFAPVIHGIARGTAQVTIKQNGYDIYNSTVPPGPFTINDIYAAGNSGDLQVTIKEADGSTQIFTVPYSSVPLLQREGHTRYSITAGEYRSGNAQQEKPRFFQSTLLHGLPAGWTIYGGTQLADRYRAFNFGIGKNMGALGALSVDMTQANSTLPDDSQHDGQSVRFLYNKSLNESGTNIQLVGYRYSTSGYFNFADTTYSRMNGYNIETQDGVIQVKPKFTDYYNLAYNKRGKLQLTVTQQLGRTSTLYLSGSHQTYWGTSNVDEQFQAGLNTAFEDINWTLSYSLTKNAWQKGRDQMLALNVNIPFSHWLRSDSKSQWRHASASYSMSHDLNGRMTNLAGVYGTLLEDNNLSYSVQTGYAGGGDGNSGSTGYATLNYRGGYGNANIGYSHSDDIKQLYYGVSGGVLAHANGVTLGQPLNETVVLVKAPGAKDAKVENQTGVRTDWRGYAVLPYATEYRENRVALDTNTLADNVDLDNAVANVVPTRGAIVRAEFKARVGIKLLMTLTHNNKPLPFGAMVTSESSQSSGIVADNGQVYLSGMPLAGKVQVKWGEEENAHCVANYQLPPESQQQLLTQLSAECR

SEQ ID NO: 3607 - protein, 780 aa, Escherichia coli
MKIPTTTDIPQRYTWCLAGICYSSLAILPSFLSYAESYFNPAFLLENGTFVADLSRFERGNHQPAGVYRVDLWRNDEFIGSQDIVFESTTENTGDKSGGLMPCFNQVLLERIGLNSSAFPELAQQQNNKCINLLKAVPDATINFDFAAMRLNITIPQIALLSSAHGYIPPEEWDEGIPALLLNYNFTGNRGNGNDSYFFSELSGINIGPWRLRNNGSWNYFRGNGYHSEQWNNIGTWVQRAIIPLKSELVMGDGNTGSDIFDGVGFRGVRLYSSDNMYPDSQQGFAPTVRGIARTAAQLTIRQNGFIIYQSYVSPGAFEITDLHPTSSNGDLDVTIDERDGNQQNYTIPYSTVPILQREGRFKFDLTAGDFRSGNSQQSSPFFFQGTALGGLPQEFTAYGGTQLSANYTAFLLGLGRNLGNWGAVSLDVTHARSQLADDSRHEGDSIRFLYAKSMNTFGTNFQLMGYRYSTQGFYTLDDVAYRRMEGYEYDYDYDGEHRDEPIIVNYHNLRFSRKDRLQLNISQSLNDFGSLYISGTHQKYWNTSDSDTWYQVGYTSSWVGISYSLSFSWNESVGIPDNERIVGLNVSVPFNVLTKRRYTRENALDRAYASFNANRNSNGQNSWLAGVGGTLLEGHNLSYHVSQGDTSNNGYTGSATANWQAAYGTLGVGYNYDRDQHDVNWQLSGGVVGHENGITLSQPLGDTNVLIKAPGAGGVRIENQTGILTDWRGYAVMPYATVYRYNRIALDTNTMGNSIDVEKILAALCRRKARWFVPILIPA

SEQ ID NO: 3608 - protein, 207 aa, Escherichia coli; identical to SEQ ID NO: 2211

SEQ ID NO: 3609 - protein, 432 aa, Escherichia coli; identical to SEQ ID NO: 2026

SEQ ID NO: 3610 - protein, 122 aa, Escherichia coli; identical to SEQ ID NO: 2915

SEQ ID NO: 3611 - protein, 614 aa, Escherichia coli; identical to SEQ ID NO: 1884

SEQ ID NO: 3612 - protein, 232 aa, Escherichia coli; identical to SEQ ID NO: 2087

SEQ ID NO: 3613 - protein, 230 aa, Escherichia coli; identical to SEQ ID NO: 3019

SEQ ID NO: 3614 - protein, 517 aa, Escherichia coli; identical to SEQ ID NO: 2462

SEQ ID NO: 3615 - protein, 193 aa, Escherichia coli; identical to SEQ ID NO: 2246

SEQ ID NO: 3616 - protein, 154 aa, Escherichia coli
MLTPPVAKIGANSGQQVKIKIMPNKLPTNKESIFYLNVLDIPPNSPEQEGKNALKFAMQNRIKLFYRPAGIAPVNKATFKKLLVNRSGNGLVIKNDSANWVTISDVKANNVKVNYETIMIAPLESQSVNVKSNNANNWYLTIIDDHGNYISDKI

SEQ ID NO: 3617 - protein, 663 aa, Escherichia coli; identical to SEQ ID NO: 1910

SEQ ID NO: 3618 - protein, 431 aa, Escherichia coli; identical to SEQ ID NO: 3408

SEQ ID NO: 3619 - protein, 243 aa, Escherichia coli; identical to SEQ ID NO: 3483

SEQ ID NO: 3620 - protein, 828 aa, Escherichia coli; identical to SEQ ID NO: 2388

SEQ ID NO: 3621 - protein, 200 aa, Escherichia coli
MLAFCRSSLKSKKYFIILLALAAIAGLGTHAAWSSNGLPRIDNKTLARLAQQHPVVVLFRHAERCDRSTNQCLSDKTGITVKGTQDARELGNAFSADIPDFDLYSSNTVRTIQSATWFSAGKKLTVDKRLLQCGNEIYSAIKDLQSKALDKNIVIFTHNHCLTYIAKNKRDATFKPDYLDGLVMHVEKGKVYLDGEFVNH

SEQ ID NO: 3622 - protein, 250 aa, Escherichia coli; identical to SEQ ID NO: 3427

SEQ ID NO: 3623 - protein, 249 aa, Escherichia coli; identical to SEQ ID NO: 3492

SEQ ID NO: 3624 - protein, 551 aa, Escherichia coli; identical to SEQ ID NO: 2446

SEQ ID NO: 3625 - protein, 518 aa, Escherichia coli; identical to SEQ ID NO: 2350

SEQ ID NO: 3626 - protein, 760 aa, Escherichia coli; identical to SEQ ID NO: 3026

SEQ ID NO: 3627 - protein, 274 aa, Escherichia coli; identical to SEQ ID NO: 3471

SEQ ID NO: 3628 - protein, 230 aa, Escherichia coli; identical to SEQ ID NO: 3348

SEQ ID NO: 3629 - protein, 208 aa, Escherichia coli; identical to SEQ ID NO: 1949

SEQ ID NO: 3630 - protein, 111 aa, Escherichia coli; identical to SEQ ID NO: 3096

SEQ ID NO: 3631 - protein, 360 aa, Escherichia coli; identical to SEQ ID NO: 3354

SEQ ID NO: 3632 - protein, 478 aa, Escherichia coli; identical to SEQ ID NO: 2404

SEQ ID NO: 3633 - protein, 700 aa, Escherichia coli; identical to SEQ ID NO: 3128

SEQ ID NO: 3634 - protein, 615 aa, Escherichia coli
MFWRDITLSVWRKKTTGLKTKKRLLPLVLAAALCSSPVWAEEATFTANFKDTDLKSFIETVGANLNKTIIMGQGVQGKVSIRTMTPLNERQYYQLFLNLLEAQGYAVVPMENDVLKVVKSSAAKVEPLPLVGEGSDNYAGDEMVTKVVPVRNVSVRELAPILRQMIDSAGSGNVVNYDPSNVIMLTGRASVVERLTEVIQRVDHAGNRTEEVIPLDNASASEIARVLESLTKNSGENQPATLKSQIVADERTNSVIVSGDPATRDKMRRLIRRLDSEMERSGNSQVFYLKYSKAEDLVDVLKQVSGTLTAAKEEAEGTVGSGREIVSIAASKHSNALIVTAPQDIMQSLQSVIEQLDIRRAQVHVEALIVEVAEGSNINFGVQWASKDAGLMQFANGTQIPIGTLGAAISQAKPQKGSTVISENGATTINPDTNGDLSTLAQLLSGFSGTAVGVVKGDWMALVQAVKNDSSSNVLSTPSITTLDNQEAFFMVGQDVPVLTGSTVGSNNSNPFNTVERKKVGIMLKVTPQINEGNAVQMVIEQEVSKVEGQTSLDVVFGERKLKTTVLANDGELIVLGGLMDDQAGESVAKVPLLGDIPLIGNLFKSTADKKENVT

SEQ ID NO: 3635 - protein, 236 aa, Escherichia coli; identical to SEQ ID NO: 3286

SEQ ID NO: 3636 - protein, 162 aa, Escherichia coli; identical to SEQ ID NO: 1965

SEQ ID NO: 3637 - protein, 1024 aa, Escherichia coli
MPTITTAQIKSTLQSAKQSAANKLHSAGQSTKDALKKAAEQTRNAGNRLILLIPKDYKGQGSSLNDLVRTADELGIEVQYDEKNGTAITKQVFGTAEKLIGLTERGVTIFAPQLDKLLQKYQKAGNKLGGSAENIGDNLGKAGGILSTFQNFLGTALSSMKIDELIKKQKSGGNVSSSEMAEASIELINQLVDTAASLNNNVNSFSQQLNTLGSVLSNTKHLNGVGNKLQNLPNLDNIGAGLDTVSGILSAISASFILSNADADTRTKAAAGVELTTKVLGNVGKGISQYIIAQRAAQGLSTSAAAAGLIASAVTLAISPLSFLSIADKFKRANKIEEYSQRFKKLGYDGDSLLAAFHKETGAIDASLTTISTALASVSSGISAAATTSLVGAPVSALVGAVTGIISGILEASKQAMFEHVASKMADVIAEWEKKHGKNYFENGYDARHAAFLEDNFKILSQYNKEYSVERSVLITQQHWDTLIGELAGVTRNGDKTLSGKSYIDYYEEGKRLEKKTDEFQKQVFDPLKGNIDLSDSKSSTLLKFVTPLLTPGEEIRERRQSGKYEYITELLVKGVDKWTVKGVQDKGAVYDYSNLIQHASVGNNQYREIRIESHLGDGDDKAFLSAGSANIYAGKGHDVVYYDKTDTGYLTIDGTKATEAGNYTVTRVLGGDVKVLQEVVKEQEVSVGKRTEKTQYRSYEFTHINGKNLTETDNLYSVEELIGTTRADKFFGSKFTDIFHGADGDDLIEGNDGNDRLYGDKGNDTLSGGNGDDQLYGGDGNDKLIGGAGNNYLNGGDGDDELQVQGNSLAKNVLSGGKGNDKLYGSEGADLLDGGEGNDLLKGGYGNDIYRYLSGYGHHIIDDDGGKEDKLSLADIDFRDVAFKREGNDLIMYKAEGNVLSIGHENGITFRNWFEKESGDISNHQIEQIFDKGGRIITPDSLKKALEYQQRNNKASYVYGNDALAYGSQNNLNPLINEISKIISAAGNFDVKEERTAASLLQLSGNASDFSYGRNSITLTTSA

SEQ ID NO: 3638 - protein, 374 aa, Escherichia coli; identical to SEQ ID NO: 2993

SEQ ID NO: 3639 - protein, 191 aa, Escherichia coli
MKKSLLGLTFASLMFSAGSAVAADYKIDKEGQHAFVNFRIQHLGYSWLYGTFKDFDGTFTFDEKNPAADKVNVTINTTSVDTNHAERDKHLRSADFLNTAKYPLATFTSTSVKKDGDELDITGDLTLNGVTKPVTLEAKLIGQGDDPWGGKRAGFEAEGKIKLKDFNIKTDLGPASQEVDLIISVEGVQQK

SEQ ID NO: 3640 - protein, 678 aa, Escherichia coli; identical to SEQ ID NO: 3511

SEQ ID NO: 3641 - protein, 412 aa, Escherichia coli; identical to SEQ ID NO: 3323

SEQ ID NO: 3642 - protein, 823 aa, Escherichia coli
MFTVQFFIDCRNILIILLITICICNSVMARRGKRGHLLTNCTACLSGSKVFAVAGCVVLRTTMPDSCNSWQKCRNKTMNKKIHSLALLVNLGIYGVAQAQEPTDTPVSHDDTIVVTAAEQNLQAPGVSTITADEIRKNPVARDVSEIIRTMPGVNLTGNSTSGQRGNNRQIDIRGMGPENTLILIDGKPVSSRNSVRQGWRGERDTRGDTSWVPPEMIERIEVLRGPAAARYGNGAAGGVVNIITKKGSGEWHGSWDAYFNAPEHKEEGATKRTNFSLTGPLGDEFSFRLYGNLDKTQADAWDINQGHQSARAGTYATTLPAGREGVINKDINGVVRWDFAPLQSLELEAGYSRQGNLYAGDTQNTNSDAYTRSKYGDETNRLYRQNYSLTWNGGWDNGVTTSNWVQYEHTRNSRIPEGLAGGTEGKFNEKATQDFVDIDLDDVMLHSEVNLPIDFLVNQTLTLGTEWNQQRMKDLSSNTQALTGANTGGAIDGVSATDRSPYSKAEIFSLFAENNMELTDSTIVTPGLRFDHHSIVGNNWSPALNISQGLGDDFTLKMGIARAYKAPSLYQTNPNYILYSKGQGCYASAGGCYLQGNDDLKAETSINKEIGLEFKRDGWLAGVTWFRNDYRNKIEAGYVAVGQNAVGTDLYQWDNVPKAVVEGLEGSLNVPVSETVMWTNNITYMLKSENKTTGDRLSIIPEYTLNSTLSWQAREDLSMQTTFTWYGKQQPKKYNYKGQPAVGPETKEISPYSIVGLSATWDVTKNVSLTGGVDNLFDKRLWRAGNAQTTGDLAGANYIAGAGAYTYNEPGRTWYMSVNTHF

SEQ ID NO: 3643 - protein, 565 aa, Escherichia coli; identical to SEQ ID NO: 2678

SEQ ID NO: 3644 - protein, 351 aa, Escherichia coli; identical to SEQ ID NO: 2872

SEQ ID NO: 3645 - protein, 198 aa, Escherichia coli
MVYLSNNADKSISVFSKEEKIPYLIQAWVDPFNKEDKSKAPFTVIPPVSRLEPSQEKILRIIHTKGVSLPDDRESVFWLNIKNIPPSASNKATNSLEIAVKTRIKLFWRPANIRLIPEDAAPKVKWRREGRNLIAENPNPIHISVMDVIVDGHDVPLNMIRPFETLTLPLPANSAGGQMTWRFINDYGAVSDPIKMTL

SEQ ID NO: 3646 - protein, 213 aa, Escherichia coli; identical to SEQ ID NO: 2232

SEQ ID NO: 3647 - protein, 161 aa, Escherichia coli
MPAPLLAAPPLILLKPGTTGTLRLLRTESDILPVDRETLFELSIASVPSGKVENQSVKVAMRSVFKLFWRPEGLPGDPLEAYQQLRWTRNSQGVQLTNPTPYYINLIQLSVNGKALSNAGVVPPKSQRQTSWCQAIAPCHVAWRAINDYGGLSAKKEQNLP

SEQ ID NO: 3648 - protein, 774 aa, Escherichia coli
MTPLRVFRKTTPLVNTIRLSLLPLAGLSFSAFAAQVNIAPGSLDKALNQYAAHSGFTLSVDASLTRGKQSNGLHGDYDVESGLQQLLDGSGLQVKPLGNNSWTLEPAPAPKEDALTVVGDWLGDARENDVFEHAGARDVIRREDFAKTGATTMREVLNRIPGVSAPENNGTGSHDLAMNFGIRGLSPRLASRSTVLMDGIPVPFAPYGQPQLSLAPVSLGNMDAIDVVRGGGAVRYGPQSVGGVVNFVTRAIPQDFGIEAGVEGQLSPTSSQNNPKETHNLMVGGTADNGFGTALLYSGTRGSDWREHSATRIDDLMLKSKYAPDEVHTFNSLLQYYDGEADMPGGLSRADYDADRWQSTRPYDRFWGRRKLASLGYQFQPDSQHKFNIQGFYTQTLRSGYLEQGKRITLSPRNYWVRGIEPRYSQIFMIGPSAHEVGVGYRYLNESTHEMRYYTATSSGQLPSGSSPYDRDTRSGTEAHAWYLDDKIDIGNWTITPGMRFEHIESYQNNAITGTHEEVSYNAPLPALNVLYHLTDSWNLYANTEGSFGTVQYSQIGKAVQSGNVEPEKARTWELGTRYDDGALTAEMGLFLINFNNQYDSNQTNDTVTARGKTRHTGLETQARYDLGTLTPTLDNVSIYASYAYVNAEIREKGDTYGNLVPFSPKHKGTLGVDYKPGNWTFNLNSDFQSSQFADNANTVKESADGSTGRIPGFMLWGARVAYDFGPQIADLNLAFGVKNIFDQDYFIRSYDDNNKGIYAGQPRTLYMQGSLKF

SEQ ID NO: 3649 - protein, 233 aa, Escherichia coli
MKTCITKGIVTVSFTAILLSCSSAWAAGKGGIGLAATRLVYSEGEEQISLGVRNTSPDVPYLIQSWVMTPDNKKSADFIITPPLFVLNPANENLLRIMYIGAPLAKDRETLFFTSVRAVPSTTKREEGNTLKIATQSVIKLFWRPKGLAYPLGEAPAKLRCTSSADMVTVSNPTPYFITLTDLKIGGKVVKNQMISPFDKYQFSLPKGAKNSSVTYRTINDYGAETPQLNCKS

SEQ ID NO: 3650 - protein, 241 aa, Escherichia coli; identical to SEQ ID NO: 2851

SEQ ID NO: 3651 - protein, 231 aa, Escherichia coli; identical to SEQ ID NO: 3055

SEQ ID NO: 3652 - protein, 784 aa, Escherichia coli; identical to SEQ ID NO: 2244

SEQ ID NO: 3653 - protein, 362 aa, Escherichia coli; identical to SEQ ID NO: 2434

SEQ ID NO: 3654 - protein, 446 aa, Escherichia coli; identical to SEQ ID NO: 2176

SEQ ID NO: 3655 - protein, 729 aa, Escherichia coli
MLSTQFNRDNQYQASTKPSLLAGCIALALLPSAAFAAPATEETVIVEGSATAPDDGENDYSVTSTSAGTKMQMTQRDIPQSVTIVSQQRMEDQQLQTLGEVMENTLGISKSQADSDRALYYSRGFQIDNYMVDGIPTYFESRWNLGDALSDMALFERVEVVRGATGLMTGTGNPSAAINMVRKHATSREFKGDVSAEYGSWNKERYVADLQSPLTEDGKIRARIVGGYQNNDSWLDRYNSEKTFFSGIVDADLGDLTTLSAGYEYQRIDVNSPTWGGLPRWNTDGSSNSYDRARSTAPDWAYNDKEINKVFMTLKQRFADTWQATLNATHSEVEFDSKMMYVDAYVNKADGMLVGPYSNYGPGFDYVGGTGWNSGKRKVDALDLFADGIYELFGRQHNLMFGGSYSKQNNRYFSSWANIFPDEIGSFYNFNGNFPQTDWSPQSLAQDDTTHMKSLYAATRVTLADPLHLILGARYTNWRVDTLTYSMEKNHTTPYAGLVFDINDNWSTYASYTSIFQPQNDRDSSGKYLAPITGNNYELGLKSDWMNSRLTTTLAIFRIEQDNVAQSTGTPIPGSNGETAYKAVDGTVSKGVEFELNGAITDNWQLTFGATRYIAEDNEGNAVNPNLPRTTVKMFTSYRLPVMPELTVGGGVNWQNRVYTDTVTPYGTFRAEQGSYALVDLFTRYQVTKNFSLQGNVNNLFDKTYDTNVEGSIVYGAPRNFSITGTYQF

SEQ ID NO: 3656 - protein, 747 aa, Escherichia coli; identical to SEQ ID NO: 2072

SEQ ID NO: 3657 - protein, 121 aa, Escherichia coli; identical to SEQ ID NO: 2523

SEQ ID NO: 3658 - protein, 203 aa, Escherichia coli; identical to SEQ ID NO: 2015

SEQ ID NO: 3659 - protein, 203 aa, Escherichia coli; identical to SEQ ID NO: 2201

SEQ ID NO: 3660 - protein, 760 aa, Escherichia coli; identical to SEQ ID NO: 3026

SEQ ID NO: 3661 - protein, 243 aa, Escherichia coli; identical to SEQ ID NO: 2910

SEQ ID NO: 3662 - protein, 246 aa, Escherichia coli; identical to SEQ ID NO: 3021

SEQ ID NO: 3663 - protein, 68 aa, Escherichia coli
MYGKTFSLPVMLYRGVFRAGETYHPGDTVTWGGSLWHCNSMTGDKPGEAHSSGWTLAAKRGRDAGGGK

SEQ ID NO: 3664 - protein, 478 aa, Escherichia coli; identical to SEQ ID NO: 2404

SEQ ID NO: 3665 - protein, 266 aa, Escherichia coli; identical to SEQ ID NO: 1894

SEQ ID NO: 3666 - protein, 191 aa, Escherichia coli; identical to SEQ ID NO: 2727

SEQ ID NO: 3667 - protein, 359 aa, Escherichia coli; identical to SEQ ID NO: 2329

SEQ ID NO: 3668 - protein, 591 aa, Escherichia coli
MPSFIGGLVVFVSAAFNAQAETWFDPAFFKDDPSMVADLSRFEKGQKITPGVYRVDIVLNQTIVDTRNVNFVEITPEKGIAACLTTESLDAMGVNTDAFPAFKQLDKQACVPLAEIIPDASVTFNVNKLRLEISVPQIAIKSNARGYVPPERWDEGINALLLGYSFSGANSIHSSADSDSGDSYFLNLNSGVNLGPWRLRNNSTWSRSSGQTAEWKNLSSYLQRAVIPLKGELTVGDDYTAGDFFDSVSFRGVQLASDDNMLPDSLKGFAPVVRGIAKSNAQITIKQNGYTIYQTYVSPGAFEISDLYSTSSSGDLLVEIKEADGSVNSYSVPFSSVPLLQRQGRIKYAVTLAKYRTNSNEQQESKFAQATLQWGGPWGTTWYGGGQYAEYYRAAMFGLGFNLGDFGAISFDATQAKSTLADQSEHKGQSYRFLYAKTLNQLGTNFQLMGYRYSTSGFYTLSDTMYKHMDGYEFNDGDDEDTPMWSRYYNLFYTKRGKLQVNISQQLGEYGSFYLSGSQQTYWHTDQQDRLLQFGYNTQIKDLSLGVSWNYSKSRGQPDADQVFALNFSLPLNLLLPRSNDSYTRKKITPG

SEQ ID NO: 3669 - protein, 631 aa, Escherichia coli; identical to SEQ ID NO: 3058

SEQ ID NO: 3670 - protein, 747 aa, Escherichia coli
MARSKTAQPKHSLRKIAVVVATAVSGMSVYAQAAVEPKEDTITVTAAPAPQESAWGPAATIAARQSATGTKTDTPIQKVPQSISVVTAEEMALHQPKSVKEALSYTPGVSVGTRGASNTYDHLIIRGFAAEGQSQNNYLNGLKLQGNFYNDAVIDPYMLERAEIMRGPVSVLYGKSSPGGLLNMVSKRPTTEPLKEVQFKAGTDSLFQTGFDFSDSLDDDGVYSYRLTGLARSANAQQKGSEEQRYAIAPAFTWRPDDKTNFTFLSYFQNEPETGYYGWLPKEGTVEPLPNGKRLPTDFNEGAKNNTYSRNEKMVGYSFDHEFNDTFTVRQNLRFAENKTSQNSVYGYGVCSDPANAYSKQCAALAPADKGHYLARKYVVDDEKLQNFSVDTQLQSKFATGDIDHTLLSGVDFMRMRNDINAWFGYDDSVPLLNLYNPVNTDFDFNAKDPANSGPYRILNKQKQTGVYVQDQAQWDKVLVTLGGRYDWADQESLNRVAGTTDKRDDKQFTWRGGVNYLFDNGVTPYFSYSESFEPSSQVGKDGNIFAPSKGKQYEVGVKYVPEDRPIVVTGAVYNLTKTNNLMADPEGSFFSVEGGEIRARGVEIEAKAALSASVNVVGSYTYTDAEYTTDTTYKGNTPAQVPKHMASLWADYTFFDGPLSGLTLGTGGRYTGSSYGDPANSFKVGSYTVVDALVRYDLARVGMAGSNVALHVNNLFDREYVASCFNTYGCFWGAERQVVATATFRF

SEQ ID NO: 3671 - protein, 539 aa, Escherichia coli; identical to SEQ ID NO: 3050

SEQ ID NO: 3672 - protein, 221 aa, Escherichia coli
MKNYLWLVALLPLLSGCESQAILVKKDDAYFAPPKTEAPPPADGRAGGVFETGYNWSLTADRRAYRVGDILTVILEESTQSSKQAKTNFGKSNTVDIGAPTIFSHTKDKLSGSIDANRDFDGSATSQQQNSLRGEITVSVHAVQPNGILEIRGEKWLTLNQGDEYIRLSGLVRADDIQNDNSVSSQRIADACISYAGRGALSDANAAGWLTRLFNHPLFPI

SEQ ID NO: 3673 - protein, 518 aa, Escherichia coli; identical to SEQ ID NO: 2349

SEQ ID NO: 3674 - protein, 208 aa, Escherichia coli; identical to SEQ ID NO: 1949

SEQ ID NO: 3675 - protein, 243 aa, Escherichia coli
MTFMKGLPLLLLVASLCSHAALQPDRTRIVFNANDKATSLRVDNRSDKLPYLAYSWLENEKGEKSDDLLVALPPIQRLEPKATTQVRIVKQASTTKLPGDRETLFFYNMREIPPAPEKNSDHAVLQVAIQSRIKVFWRPAALRKKAGEKVELQLQVSQQGNQLTLKNPTAYYLTIVYLGRNEKGVLPGFKTVMVAPFSTVNTNIGNYSGSQFYLGYMDDYGALRMTTLNYSGQCHLQAVEAKK

SEQ ID NO: 3676 - protein, 224 aa, Escherichia coli; identical to SEQ ID NO: 3165

SEQ ID NO: 3677 - protein, 669 aa, Escherichia coli
MIVSASGYEKKLTNAAASVSVISQEELQSSQYHDLAEALRSVEGVDVESGTGKTGGLEISIRGMPASYTLILIDGVRQGGSSDVTPNGFSAMNTGFMPPLAAIERIEVIRGPMSTLYGSDAMGGVVNIITRKNADKWLSSVNAGLNLQESNKWGNSSQFNFWSSGPLVDDSVSLQVRGSTQQRQGSSVTSLSDTAATRIPYPTESQNYNLGARLDWKASEQDVLWFDMDTTRQRYDNRDGQLGSLTGGYDRTLRYERNKISAGYDHTFTFGTWKSYLNWNETENKGRELVRSVLKRDKWGLAGQPRELKESNLILNSLLLTPLGESHLVTVGGEFQSSSMKDGVVLASTGETFRQKSWSVFAEDEWHLTDALALTAGSRYEHHEQFGGHFSPRAYLVWDVADAWTLKGGVTTGYKAPRMGQLHKGISGVSGQGKTNLLGNPDLKPEESVSYEAGVYYDNPAGLNANVTGFMTDFSNKIVSYSINDNTNSYVNSGKARLHGVEFAGTLPLWSEDVTLSLNYTWTRSEQRDGDNKGAPLSYTPEHMVNAKLNWQITEEVASWLGARYRGKTPRFTQNYSSLSAVQKKVYDEKGEYLKAWTVVDAGLSWKMTDALTLNAAVNNLLNKDYSDVSLYSAGKSTLYAGDYFQTGSSTTGYVIPERNYWMSLNYQF

SEQ ID NO: 3678 - protein, 678 aa, Escherichia coli; identical to SEQ ID NO: 3014

SEQ ID NO: 3679 - protein, 162 aa, Escherichia coli; identical to SEQ ID NO: 1965

SEQ ID NO: 3680 - protein, 200 aa, Escherichia coli; identical to SEQ ID NO: 1784

SEQ ID NO: 3681 - protein, 843 aa, Escherichia coli; identical to SEQ ID NO: 3163

SEQ ID NO: 3682 - protein, 863 aa, Escherichia coli; identical to SEQ ID NO: 3156

SEQ ID NO: 3683 - protein, 161 aa, Escherichia coli; identical to SEQ ID NO: 2582

SEQ ID NO: 3684 - protein, 203 aa, Escherichia coli; identical to SEQ ID NO: 2201

SEQ ID NO: 3685 - protein, 432 aa, Escherichia coli; identical to SEQ ID NO: 2026

SEQ ID NO: 3686 - protein, 170 aa, Escherichia coli [sequence omitted]

SEQ ID NO: 3687 - protein, 236 aa, Escherichia coli; identical to SEQ ID NO: 3286

SEQ ID NO: 3688 - protein, 866 aa, Escherichia coli
MTIKPTKNYHNHLTRIATFCALLYCNSAFCAELVEYDHTFLMGQNASNIDLSRYSEGNPAIPGMYDVSVYVNDQPIINQSITFIEIEGKKNAQACITLKNLLQFHINSPDINNEKAVLLARDETLGNCLNLTEIIPQASVRYDVNEQRLDIDVPQAWVMKNYQNYVDPSLWENGINAAMLSYNLNGYHSETPGRRNDSIYAAFNGGMNLGAWRLRASGNYNWMTDSGSNYDFKNRYIQRDIASLRSQLILGESYTTGETFDSVSIRGIRLYSDSRMLPPTLASFAPIIHGVANTNAKVTITQGGYKIYETTVPPGAFVIDDLSPSGYGSDLIVTVEESDGSKRTFSQPFSSVVQMLRPGVGRWDISGGQVLKDDIQDEPNLFQASYYYGLNNYLTGYTGIQITDNNYTAGLLGLGLNTSVGAFSFDVTHSNVRIPDDKTYQGQSYRVSWNKLFEETSTSLNIAAYRYSTQNYLGLNDALTLIDEVKHPEQDLEPKSMRNYSRMKNQVTVSINQPLKFEKKDYGSFYLSGSWSDYWASGQNRSNYSIGYSNSASWGSYSVSAQRSWNEDGDTDDSVYLSFTIPIEKLLGTEQRTSGFQSIDTQMSSDFKGNNQLNVSSSGYSDNARVSYSVNTGYTMNKASKDLSYVGGYASYESPWGTLAGSVSANSDNSRQVSLSTDGGFVLHSGGLTFSNDSFSDSDTLAVVQAPGAQGARINYGNSTIDRWGYGVTSALSPYHENRIALDINDLENDVELKSTSAVAVPRQGSVVFADFETVQGQSAIMNITRSDGKNIPFAADIYDEQGNVIGNVGQGGQAFVRGIEQQGNISIKWLEESKPVSCLAHYQQSSEAEKIAQSIILNGIRCQIQ

SEQ ID NO: 3689 - protein, 386 aa, Escherichia coli; identical to SEQ ID NO: 3094

SEQ ID NO: 3690 - protein, 118 aa, Escherichia coli [sequence omitted]

SEQ ID NO: 3691 - protein, 351 aa, Escherichia coli
MKKSTLALVVMGIVASASVQAAEIYNKDGNKLDVYGKVKAMHYMSDNASKDGDQSYIRFGFKGETQINDQLTGYGRWEAEFAGNKAESDTAQQKTRLAFAGLKYKDLGSFDYGRNLGALYDVEAWTDMFPEFGGDSSAQTDNFMTKRASGLATYRNTDFFGVIDGLNLTLQYQGKNENRDVKKQNGDGFGTSLTYDFGGSDFAISGAYTNSDRTNEQNLQSRGTGKRAEAWATGLKYDANNFYLATFYSETRKMTPITGGFANKTQNFEAVAQYQFDFGLRPSLGYVLSKGKDIEGIGDEDLVNYIDVGATYYFNKNMSAFVDYKINQLDSDNKLNINNDDIVAVGMTYQF

SEQ ID NO: 3692 - protein, 834 aa, Escherichia coli
MYKKLKLTTISELIKNIYCSLSVLIIGCASAYAVEFNKDLIEAEDRENVNLSQFETDGQLPVGKYSLNALINNKRTPIHLDLQWVLIDNQTAVCLTPEQLTLLGFTDEIIEEAQQNLIDGCYPIEKEKQITTYLDKGKMQLSISAPQAWLKYKDANWTPPELWDHGIAGAFLDYNLYASHYAPHQGDNSQNISSYGQAGVNLGAWRLRTDYQYDQSFNNGKSQANNLDFPRIYLFRPIPAINAKLTIGQYDTESSIFDSFHFSGVSLKSDENMLPPDLRGYAPQITGVAQTNAKVTVSQNNRIIYQENVPPGPFAITNLFNTLQGQLDVKVEEEDGQVTQWQVASNSIPYLTRKGQIRYTTAMGKPTSVGGDSLQQPFFWTGEFSWGWLNNVSLYGGSVLTNRDYQSLAAGVGFNLNSLGSLSFDVTRSDAQLHNQDKETGYSYRANYSKRFESTGSQLTFAGYRFSDKNFVTMNEYINDTNHYTNYQNEKESYIVTFNQYLESLRLNTYVSLARNTYWDASSNVNYSLSLSRDFDIGPLKNVSTSLTFSRINWEEDNQDQLYLNISIPWGTSRTLSYGMQRNQDNKISHTASWYDSSDRNNSWSVSASGDNDEFKDMKASLRASYQHNTENGRLYLSGTSQRDSYYSLNASWNGSFTATRHGAAFHDYSGSADSRFMIDADGAEDIPLNNKRAVTNRYGIGVIPSVSSYITTSLSVDTRNLPENVDIENSVITTTLTEGAIGYAKLDTRKGYQIMGVIRLADGSHPPLGISVKDKTSHKELGLVADGGFVYLNGIQDDSKLTLRWGDKSCFIQPPNSSNLTTGTVILPCISQN

SEQ ID NO: 3693 - protein, 614 aa, Escherichia coli; identical to SEQ ID NO: 3301

SEQ ID NO: 3694 - protein, 360 aa, Escherichia coli
MKKLTVAISAVAASVLMAMSAQAAEIYNKDSNKLDLYGKVNAKHYFSSNDADDGDTTYARLGFKGETQINDQLTGFGQWEYEFKGNRAESQGSSKDKTRLAFAGLKFGDYGSIDYGRNYGVAYDIGAWTDVLPEFGGDTWTQTDVFMTGRTTGVATYRNNDFFGLVDGLNFAAQYQGKNDRTDVTQANGDGFGFSTTYEYEGFGVGATYAKSDRTNNQVIYGNNSLNASGQNAEVWAAGLKYDANNIYLATTYSETQNMTVFGKNHIANKAQNFEVVAQYQFDFGLRPSVAYLQSKGKDLGAWGDQDLVEYIDVGATYYFNKNMSTFVDYKINLIDKSDFTKASGVATDDIVAVGMVYQF

SEQ ID NO: 3695 - protein, 746 aa, Escherichia coli
MNKKIHSLALLVNLGIYGVAQAQEPTDTPVSHDDTIVVTAAEQNLQAPGVSTITADEIRKNPVARDVSEIIRTMPGVNLTGNSTSGQRGNNRQIDIRGMGPENTLILIDGKPVSSRNSVRQGWRGERDTRGDTSWVPPEMIERIEVLRGPAAARYGNGAAGGVVNIITKKGSGEWHGSWDAYFNAPEHKEEGATKRTNFSLTGPLGDEFSFRLYGNLDKTQADAWDINQGHQSARAGTYATTLPAGREGVINKDINGVVRWDFAPLQSLELEAGYSRQGNLYAGDTQNTNSDAYTRSKYGDETNRLYRQNYALTWNGGWDNGVTTSNWVQYEHTRNSRIPEGLAGGTEGKFNEKATQDFVDIDLDDVMLHSEVNLPIDILVNQTLTLGTEWNQQRMKDLSSNTQALTGANTGGAIDGMSATDRSPYSKAEIFSLFAENNMELTDSTIVTPGLRFDHHSIVGNNWSPALNISQGLGDDFTLKMGIARAYKAPSLYQTNPNYILYSKGQGCYASAGGCYLQGNDDLKAETSINKEIGLEFKRDGWLAGVTWFRNDYRNKIEAGYVAVGQNAVGTDLYQWDNVPKAVVEGLEGSLNVPVSETVMWTNNITYMLKSENKTTGDRLSIIPEYTLNSTLSWQAREDLSMQTTFTWYGKQQPKKYNYKGQPAVGPETKEISPYSIVGLSATWDVTKNVSLTGGVDNLFDKRLWRAGNAQTTGDLAGANYIAGAGAYTYNEPGRTWYMSVNTHF

SEQ ID NO: 3696 - protein, 363 aa, Escherichia coli; identical to SEQ ID NO: 3347

SEQ ID NO: 3697 - protein, 359 aa, Escherichia coli
MVVNTVASENPDEAGRYSMDVEYGQYSVILLVEGFPPSHAGTITVYEDSQPGTLNDFLGAMSEDDVRPEALRRFELMVEEVARHAEEAKKNAGEAETSARNAGISASQAEESAANADTSAGEASESARQAAESAASAKQSEDASSSSASAAAQKASESSQSAAEAELSRKTAESAAGNAARDATTATEKARESAESAQSAEQSRIAAEEAVNRIPTVVGPPGPKGEQGPAGPQGPKGDKGERGDTGPVGATGERGPAGDAGPAGPQGPKGDRGERGETGLTGMQVHRVQREIPVRQARQAHRDRKEKQVRLARWGQPDLRDRRATRGRHKSVFVWGRRALLRQTAMAGSRIQMAHSSPD

SEQ ID NO: 3698 - protein, 228 aa, Escherichia coli; identical to SEQ ID NO: 3034

SEQ ID NO: 3699 - protein, 430 aa, Escherichia coli; identical to SEQ ID NO: 2617

SEQ ID NO: 3700 - protein, 826 aa, Escherichia coli
MLRMTPLASAIVALLLGIEAYAAEETFDTHFMIGGMKDQQVANIRLDDNQPLPGQYDIDIYVNKQWRGKYEIIVKDNPQETCLSIEVIKRLGINSDNFASGKQCLTFEQLVQGGSYTWDIGVFRLDFSVPQAWVEELESGYVPPENWERGINAFYTSYYVSQYYSDYKASGNSKSTYVRFNSGLNLLGWQLHSDASFSKTNNNPGVWKSNTLYLERGFAQLLGTLRVGDMYTSSDIFDSVRFSGVRLFRDMQMLPNSKQNFTPRVQGIAQSNALVTIEQNGFVVYQKEVPPGPFAITDLQLAGGGADLDVSVKEADGSVTTYLVPYAAVPNMLQPGVSKYDFAAGRSHIEGASKQSDFVQAGYQYGFNNLLTLYGGSMVANNYYAFTLGTGWNTRIGAISVDATKSHSKQDNGDVFDGQSYQIAYNKFVSQTSTRFGLAAWRYSSRDYRTFNDHVWANNKDNYRRDENDVYDIADYYQNDFGRKNSFSANMSQSLPEGWGSVSLSTLWRDYWGRSGSSKDYQLSYSNNWRRISYILAASQAYDENHHEEKRFNIFISIPFDWGDDVTTPRRQIYMSNSTTFDDQGFASNNTGLSGTVGSRDQFNYGVNLSYQNQGNETTAGANLTWNAPVATVNGSYSQSSTYRQAGASVSGGIVAWSGGVNLANRLSETFAVMNAPGIKDAYVNGQKYRTTNRNGVVVYDGMTPYRENHLMLDVSQSDSEAELRGNRKIAASYRGAVVLVNFDTDQRKPWFIKALRADGQPLMFGYEVNDIHGHNIGVVGQGSQLFIRTNEVPPSVNVAIDKQQGLSCTITFGKEIDESRNYICQ

SEQ ID NO: 3701 - protein, 224 aa, Escherichia coli; identical to SEQ ID NO: 3115

SEQ ID NO: 3702 - protein, 559 aa, Escherichia coli
MLPWELRGYAPQISGIAQTNATVTISQSGRVIYQKKVPPGPFIIDDLNQSVQGTLDVKVTEEDGRVNNFQVSAASTPFLTRQGQVRYKLAAGQPRPSMSHQTENETFFSNDVSWGMLSNTSLYGGLLLSGDDYHSAAIGIGQNMLWLGALSFDVTWASSHFDTQQDERGLSYRFNYSKQVDATNSTISLAAYRFSDRHFHSYANYLDHKYNDSDAQDEKQTISLSVGQPITPLNLNLYANLLHQTWWNADASTTANITAGFNVDIGDWRDISISTSFNTTHYEDKDRDNQIYLSISLPFGNGGRVGYDMQNSSHSTTHRMSWNDTLDERNSWGMSAGLQSDRPDNGAQVSGNYQHLSSAGEWDISGTYAANDYSSVSSSWSGSFTATQYGAAFHRRSSTNEPRLMVSTDGVADIPVQGNLDYTNHFGIAVVPLISSYQPSTVAVNMNDLPDGVTVAENVIKETWIEGAIGYKSLASRSGKDVNVIIRNASGQFPPLGADIRQDDSGISVGMVGEEGHAWLSGVAENQKFTVVWGDSQHCSLHLPEHMEDTANRLILPCH

SEQ ID NO: 3703 - protein, 450 aa, Escherichia coli
MNDDFSGEIKNEKPMKVLEKLSRLYHLTWYYDENILYIYKTNEISRSIITPTYLDIDSLLKYLRDTISVNKNSCNVRKITTFNSIEVRGVPECIKYITSLSESLDKEAQSKAKNKDVVRVFKLNYASATDITYKYRDQNVVVPGVVSILKTMASNGSLPSTGKGAVERNGNLFDNSVKISADPRLNAVVVKDREITMDIYRQLISELDIEQRQIEISVSIIDVDANDLQQLGVNWSGTLNAGQGSIAFNSSTAQANLSSSVISNANNFMIRVNALQQNSKAKILSQPSIITLNNMQAILDKNVTFYTKVSGEKVASLESITSGTLLRVTPRILDDNSNSLTGKRRERVRLLLDIQDGNQSTNQSNAQDASSILPEVQNSEMTTEATLSAGESLLLGGFIQDKESSSKDGIPLLSDIPVIGNLFSSTTKQKHSVVRLFLIKATPIKSASSE

SEQ ID NO: 3704 - protein, 331 aa, Escherichia coli; identical to SEQ ID NO: 2700

SEQ ID NO: 3705 - protein, 446 aa, Escherichia coli; identical to SEQ ID NO: 2176

SEQ ID NO: 3706 - protein, 130 aa, Escherichia coli
MPVDRETLFELSIASVPSGKVENQSVKVAMRSVFKLFWRPEGLPGDPLEAYQQLRWTRNSQGVQLTNPTPYYINLIQLSVNGKALSNAGVVPPKSQRQTSWCQAIAPCHVAWRAINDYGGLSAKKEQNLP

SEQ ID NO: 3707 - protein, 250 aa, Escherichia coli
MFNLTNTAKIVVPALALLATVVSFSSHASVTPDRTRLVFNESDKSISVTLRNNDPTLPYLAQSWIEDAKGNKISSPLAVLPPVQRIDAMMNGQVKVQGLPDINKLPADRESVFYFNVREIPPKSNKPNTLQIALQTRIKLFWRPKALENTSMKSPWQHKVTLIRNGQDFTVNNPTPYYVIISNASAKKGGNPPAGFTPLMMEPKTSAPLNAKMDSVPVLTYINDYGARMPLYFICTGNSCQVDEEQSRKG

SEQ ID NO: 3708 - protein, 774 aa, Escherichia coli; identical to SEQ ID NO: 3122

SEQ ID NO: 3709 - protein, 732 aa, Escherichia coli; identical to SEQ ID NO: 3068

SEQ ID NO: 3710 - protein, 232 aa, Escherichia coli; identical to SEQ ID NO: 2087

SEQ ID NO: 3711 - protein, 203 aa, Escherichia coli; identical to SEQ ID NO: 2009

SEQ ID NO: 3712 - protein, 565 aa, Escherichia coli; identical to SEQ ID NO: 2678

SEQ ID NO: 3713 - protein, 881 aa, Escherichia coli
MPDHSLFRLRILPWCIALAMSGSYSSVWAEDDIQFDSRFLELKGDTKIDLKRFSSQGYVEPGKYNLQVQLNKQPLAEEYDIYWYAGEDDASKSYACLTPELVAQFGLKEDVAKNLQWSHDAKCLKSGQLEGMEIKADLSQSALVISLPQAYLEYTYPDWDPPSRWDDGISGIVADYSINAQTRHEENGGDDSNEISGNGTVGVNLGPWRMRADWQTNYQHTRSNDDDDEFSGDETQKKWEWSRYYAWRALPSLKAKLALGEDYLRSDIFDGFNYVGGSVSTDDQMLPPNLRGYAPDISGVAHTTAKVTVSQMGRVIYETQVPAGPFRIQDLGDSVSGTLHIRIEEQNGQVQEYDISTASMPYLTRPGQVRYKIMMGRPQEWGHHIEGEFFSGAEASWGIANGWSLYGGALGDENYQSAALGVGRDLSTFGAVAFDVTHSHTKLDKDTAYGKGSLDGNSFRVSYSKDFDQLNSRVTFAGYRFSEENFMTMSEYLDASDSGMVRTGNDKEMYTATYNQNFRDAGVSVYLNYTRHTYWDREEQTNYNIMLSHYFNMGSIRNVSISMTGYRYEYDNQADKGMYISLSMPWGDNSTVSYNGNYGSGTDSSQVGYFSRVDDATHYQLNVGTSDKHTSVDGYYSHDGSLAQVDLSANYHEGQYTSAGLSLQGGATLTAHGGALHRTQNMGGTRLLIDADGVADVPVEGNGAAVYTNMFGKAVVSDVNNYYRNQAYIDLNRLPENAEATQSVVQATLTEGAIGYRKFAVISGQKAMAVLRLSDGSHPPFGAEVKNDNEQTVGLVDDDGNVYLAGVKPGEHMSVFWSGVAHCDINLPDPLPADLFNGLLLPCQHKGNVAPITSPAVKPAIQEQTQRVTPTEPPTSISVNQ

SEQ ID NO: 3714 - protein, 368 aa, Escherichia coli; identical to SEQ ID NO: 3171

SEQ ID NO: 3715 - protein, 700 aa, Escherichia coli; identical to SEQ ID NO: 3128

SEQ ID NO: 3716 - protein, 231 aa, Escherichia coli; identical to SEQ ID NO: 3055

SEQ ID NO: 3717 - protein, 721 aa, Escherichia coli
MDEIPALAEKDDDSVINSLEQIIPGTAAEFDFNHQRLNLSIPQIALYRDARGYVSPSRWDDGIPTLFTNYSFTGSDNRYRQGNRSQRQYLNMQNGANFGPWRLRNYSTWTRNDQASSWNTISSYLQRDIKALKSQLLLGESATSGSIFSSYTFTGVQLASDDNMLPNSQRGFAPTVRGIANSSAIVTIRQNGYVIYQSNVPAGAFEINDLYPSSNSGDLEVTIEESDGTQRRFIQPYSSLPMMQRPGHLKYSATAGRYRADANSDSKEPEFAEATAIYGLNNTFTLYGGLLGSEDYYALGIGIGGTLGALGALSMDINRADTQFDNRHSFHGYQWRTQYIKDIPETNTNIAVSYYRYTNDGYFSFDEANTRNWDYNSRQKSEIQFNISQTIFDGVSLYASGSQQDYWGNNDKNRNISVGVSGQQWGIGYSLNYQYSRYTDQNNDRALSLNLSIPLERWLPRSRVSYQMTSQKDRPTQHEMRLDGSLLDDGRLSYSLEQNLDDDNNHNSSLNASYRSPYGTFSAGYSYGNDSSQYNYGVTGGVVIHPHGVTLSQYLGNAFALIDANGASGVRIQNYPGIATDPFGYAVVPYLTTYQENRLSVDTTQLPDNVDLEQTTQFVVPNRGAMVAARFNANIGYRVLVTVSDRNGKPLPFGALASNDETGQQSIVDEGGILYLSGISSKSQSWTVRWGNQADQQCQFAFSTPDSEPTTSVLQGTAQCH

SEQ ID NO: 3718 - protein, 784 aa, Escherichia coli; identical to SEQ ID NO: 2244

SEQ ID NO: 3719 - protein, 673 aa, Escherichia coli
MKMTRLYPLALGGLLLPAIANAQTSQQDESTLVVTASKQSSRSASANNVSSTVVSAPELSDAGVTASDKLPRVLPGLNIENSGNMLFSTISLRGVSSAQDFYNPAVTLYVDGVPQLSTNTIQALTDVQSVELLRGPQGTLYGKSAQGGIINIVTQQPDSTPRGYIEGGVSSRDSYRSKFNLSGPIEDGLLYGSVTLLRQVDDGDMINPATGSDDLGGTRASIGNVKLRLAPDDQPWEMGFAASRECTRATQDAYVGWNDIKGRKLSISDGSPDPYMRRCTDSQTLSGKYTTDDWVFNLISAWQQQHYSRTFPSGSLIVNMPQRWNQDVQELRAATLGDARTVDMVFGLYRQNTREKLNSAYDMPTMPYLSSTGYTTAETLAAYSDLTWHLTDRFDIGGGVRFSHDKSSTQYHGSMLGNPFGDQGKSNDDQVLGQLSAGYMLTDDWRVYTRVAQGYKPSGYNIVPTAGLDAKPFVAEKSINYELGTRYETADVTLQAATFYTHTKDMQLYSGPDGMQTLSNAGKADATGVELEAKWRFAPGWSWDINGNVIRSEFTNDSELYHGNRVPFVPRYGAGSSVNGVIDTRYGALMPRLAVNLVGPHYFDGDNQLRQGTYATLDSSLGWQATERMNISVYVDNLFDRRYRTYGYMNGSSAVAQVNMGRTVGINTRIDFF

SEQ ID NO: 3720 - protein, 729 aa, Escherichia coli
MLSTQFNRDNQYQASTKPSLLAGCIALALLPSAAFAAPATEETVIVEGSATAPDDGENDYSVTSTSAGTKMQMTQRDIPQSVTIVSQQRMEDQQLQTLGEVMENTLGISKSQADSDRALYYSRGFQIDNYMVDGIPTYFESRWNLGDALSDMALFERVEVVRGATGLMTGTGNPSAAINMVRKHATSREFKGDVSAEYGSWNKERYVADLQSPLTEDGKIRARIVGGYQNNDSWLDRYNSEKTFFSGIVDADLGDLTTLSAGYEYQHIDVNSPTWGGLPRWNTDGSSNSYDRARSTAPDWAYNDKEINKVFMTLKQRFADTWQATLNATHSEVEFDSKMMYVDAYVNKADGMLIGPYSNYGPGFDYVGGTGWNSGKRKVDALDLFADGSYELFGRQHNLMFGGSYSKQNNRYFSSWANIFPDEIGSFYNFNGNFPQTDWSPQSLAQDDTTHIKSLYAATRVTLADPLHLILGARYTNWRVDTLTYSMEKNHTTPYAGLVFDINDNWSTYASYTSIFQPQNDRDSSGKYLAPITGNNYELGLKSDWMNSRLTTTLAIFRIEQDNVAQSTGTPIPGSNGETAYKAVDGTVSKGVEFELNGAITDNWQLTFGATRYIAEDNEGNAVNPNLPRTTVKMFTSYRLPVMPELTVGGGVNWQNRVYTDTVTPYGTFRAEQGSYALVDLFTRYQVTKNFSLQGNVNNLFDKTYDTNVEGSIVYGAPRNFSITGTYQF

SEQ ID NO: 3721 - protein, 274 aa, Escherichia coli
MNKTAIALLALLASSASLAATPWQKITQPVPGSAQSIGSFSNGCIVGADTLPIQSEHYQVMRTDQRRYFGHPDLVMFIQRLSSQVSNLGMGTVLIGDMGMPAGGRFNGGHASHQTGLDVDIFLQLPKTRWTSAQLLRPQALDLVSRDGKHVVSSLWKPEIFSLIKLAAQDKNVTRIFVNPAIKQQLCLDAGTDRDWLRKVRPWFQHRAHMHVRLRCPADSLECEDQPLPPPGDGCGAELQSWFEPPKPGTTKPEKKTPPPLPPSCQALLDEHVI

SEQ ID NO: 3722 - protein, 207 aa, Escherichia coli; identical to SEQ ID NO: 2211

SEQ ID NO: 3723 - protein, 230 aa, Escherichia coli
MMTKIKLLMLIIFYLIISASAHAAGGIALGATRIIYPADAKQTAVWIRNSHTNERFLVNSWIENSSGVKEKSFIITPPLFVSEPKSENTLRIIYTGPPLAADRESLFWMNVKTIPSVDKNALNGRNVLQLAILSRMKLFLRLIQLQELPAEAPDTLKFSRSGNYINVHNPSPFYVTLVNLQVGSQKLGNAMAAPRVNSQIPLPSGVQGKLKFQTVNDYGSVTPVREVNLN

SEQ ID NO: 3724 - protein, 241 aa, Escherichia coli; identical to SEQ ID NO: 2922

SEQ ID NO: 3725 - protein, 213 aa, Escherichia coli; identical to SEQ ID NO: 2232

SEQ ID NO: 3726 - protein, 780 aa, Escherichia coli
MKIPTTTDIPQRYTWCLAGICYSSLAILPSFLSYAESYFNPAFLLENGTSVADLSRFERGNHQPAGVYRVDLWRNDEFIGSQDIVFESTTENTGDKSGGLMPCFNQVLLERISLNSSAFPELAQQQNNKCINLLKAVPDATINFDFAAMRLNITIPQIALLSSAHGYIPPEEWDEGIPALLLNYNFTGNRGNGNDSYFFSELSGINIGPWRLRNNGSWNYFRGNGYHSEQWNNIGTWVQRAIIPLKSELVMGDGNTGSDIFDGVGFRGIRLYSSDNMYPDSQQGFAPTVRGIARTAAQLTIRQNGFIIYQSYVSPGAFEITDLHPTSSNGDLDVTIDERDGNQQNYTIPYSTVPILQREGRFKFDLTAGDFRSGNSQQSSPFFFQGTALGGLPQEFTAYGGTQLSANYTAFLLGLGRNLGNWGTVSLDVTHARSQLADDSRHEGDSIRFLYAKSMNTFGTNFQLMGYRYSTQGFYTLDDVAYRRMEGYEYDYDYDGEHRDEPIIVNYHNLRFSRKDRLQLNISQSLNDFGSLYISGTHQKYWNTSDSDTWYQVGYTSSWVGISYSLSFSWNESVGIPDNERIVGLNVSVPFNVLTKRRYTRENALDRAYASFNANRNSNGQNSWLAGVGGTLLEGHNLSYHVSQGDTSNNGYTGSATANWQAAYGTLGVGYNYDRDQHDVNWQLSGGVVGHENGITLSQPLGDTNVLIKAPGAGGVRIENQTGILTDWRGYAVMPYATVYRYNRIALDTNTMGNSIDVEKILAALCRRKARWFVPILIPA

SEQ ID NO: 3727 - protein, 89 aa, Escherichia coli; identical to SEQ ID NO: 2833

SEQ ID NO: 3728 - protein, 871 aa, Escherichia coli
MHQVLIMPRFARLTIALGLATAVFPVDAEYYFNPRFLSNDLAESVDLSAFTKGREAPPGTYRVDIYLNDEFMTSRDITFIADDNNAELIPCLSTDLLVSLGIKKIALLDNKEHSAEKHVPDNSACTPLQDRLADASTEFDVGQQHLSLSVPQIYVGRMARGYVSPDLWEEGINAGLLNYSFNGNSINNRSNHNAGKSNYAYLNLQSGINIGSWRLRDNSTWSYNSGSSNSSDSNKWQHINTSAERDIIPLRSRLTVGDSYTDGDIFDSVNFRGLKINSTEAMLPDSQHGFAPVIHGIARGTAQVSVKQNGYDVYQTTVPPGPFTIDDINSAANGGDLQVTIKEADGSIQTLYVPYSSVPVLQRAGYTRYALAMGEYRSGNNLQSSPKFIQGSLMHGLEGNWTPYGGMQIAEDYQAFNLGIGKDLGLFGAFSFDITQANTTLADGTRHSGQSVKSVYSKSFYQTGTNIQVAGYRYSTQGFYNLSDSAYSRMSGYTVKPPTGDTNEQTQFIDYFNLFYSKRGQEQISISQQLGNYGTTFFSASRQSYWNTSRSDQQISFGLNVPFGDITTSLNYSYSNNIWQNDRDHLLAFTLNVPFSHWMRTDSQSAFRNSNASYSMSNDLKGGMTNLSGVYGTLLPDNNLNYSVQVGNTHGGNTSSGTSGYSSLNYRGAYGNTNVGYSRSGDSSQIYYGMSGGIIAHADGITFGQPLGDTMVLVKAPGADNVKIENQTGIHTDWRGYAILPFATEYRENRVALNANSLADNVELDETVITVIPTHGAIARATFNAQIGGKVLMTLKYGNKSVPFGAIVTHGENKNGSIVAENGQVYLTGLPQSGKLQVSWGKDKNSNCIVEYKLPEVSPGTLLNQQTAICR

SEQ ID NO: 3729 - protein, 193 aa, Escherichia coli; identical to SEQ ID NO: 2246

SEQ ID NO: 3730 - protein, 111 aa, Escherichia coli; identical to SEQ ID NO: 3096

SEQ ID NO: 3731 - protein, 361 aa, Escherichia coli; identical to SEQ ID NO: 3061

SEQ ID NO: 3732 - protein, 754 aa, Escherichia coli
MIDAEDRENIDISRFEKKGYIPPGRYLVRVQINKNMLPQTLILEWVKADNESGSLLCLTKENLTNFGLNTEFIESLQNIAGSECLDLSQRQELTTRLDKATMILSLSVPQAWLKYQATNWTPPEFWDTGIAGFILDYNVPPSQYAPHHGDSTQNVSSYGTLGFNLGAWRLRSDYQYNQNFADGRSVNRDSEFARTYLFRPIPSWSSKFTMGQYDLSSNLYDTFHFTGASLESDESMLPPDLQGYAPQITGIAQTNAKVTVAQNGRVLYQTTVAPGPFTISDLGQSFQGLLDVTVEEEDGRTSTFQVGSASIPYLTRKGQVRYKTSLGKPTSVGHNDINNPFFWTAEASWGWLNNVSLYGGGMFTADDYQAITTGIGFNLNQFGSLSFDVTGADASLQQQNSGNLRGYSYRFNYAKHFESTGSQITFAGYRFSDKDYVSMSEYLSSRNGDESIDNEKESYVISLNQYFETLELNSYLNVTRNTYWDSASNTNYSVSVSKNFDIGDFKGISASLAVSRIRWDDDEENQYYFSFSLPLQQNRNISYSMQRTGSSNTSQMISWYDSSDRNNIWNISASATDDNIRDGEPTLRGSYQHYSPWGRLNINGSVQPNQYNSVTAGWYGSLTATRHGIALHDYSYGDNARMMVDTDGISGIEINSNRTVTNGLGIAVIPSLSNYTTSMLRVNNNDLPEGVDVENSVIRTTLTLKWSTKTGHRVRVFSSIDFPIRLVVTHHYIRAVLVRCNIQRYSPLLRELHR

SEQ ID NO: 3733 - protein, 224 aa, Escherichia coli; identical to SEQ ID NO: 3115

SEQ ID NO: 3734 - protein, 170 aa, Escherichia coli [sequence omitted]

SEQ ID NO: 3735 - protein, 539 aa, Escherichia coli; identical to SEQ ID NO: 3050

SEQ ID NO: 3736 - protein, 614 aa, Escherichia coli
MIKKASLLTACSVTAFSAWAQDTSPDTLVVTANRFEQPRSTVLAPTTVVTRQDIDRWQSTSVNDVLRRLPGVDITQNGGSGQLSSIFIRGTNASHVLVLIDGVRLNLAGVSGSADLSQFPIALVQRVEYIRGPRSAVYGSDAIGGVVNIITTRDEPGTEISAGWGSNSYQNYDVSTQQQLGDKTRVTLLGDYAHTHGYDVVAYGNTGTQAQTDNDGFLSKTLYGALEHNFTDAWSGFVRGYGYDNRTNYDAYYSPGSPLLDTRKLYSQSWDAGLRYNGELIKSQLITSYSHSKDYNYDPHYGRYDSSATLDEMKQYTVQWANNVIVGHGSIGAGVDWQKQTTTPGTGYVENGYDQRNTGIYLTGLQQVGDFTFEGAARSDDNSQFGRHGTWQTSAGWEFIEGYRFIASYGTSYKAPNLGQLYGFYGNPNLDPEKSKQWEGAFEGLTAGVNWRISGYRNDVSDLIDYDDHTLKYYNEGKARIKGVEATANFDTGPLTHTVSYDYVDARNAITDTPLLRRAKQQVKYQLDWQLYDFDWGITYQYLGTRYDKDYSSYPYQTVKMGGASLWDLAVAYPVTSHLTVRGKIANLFDKDYETVYGYQTAGREYTLSGSYTF

SEQ ID NO: 3737 - protein, 230 aa, Escherichia coli; identical to SEQ ID NO: 3348

SEQ ID NO: 3738 - protein, 869 aa, Escherichia coli
MKIPTTTDIPQRYTWCLAGICYSSLAILPSFLSYAESYFNPAFLLENGTSVADLSRFERGNHQPAGVYRVDLWRNDEFIGSQDIVFESTTENTGDKSGGLMPCFNQVLLERISLNSSAFPELAQQQNNKCINLLKAVPDATINFDFAAMRLNITIPQIALLSSAHGYIPPEEWDEGIPALLLNYNFTGNRGNGNDSYFFSELSGINIGPWRLRNNGSWNYFRGNGYHSEQWNNIGTWVQRAIIPLKSELVMGDGNTGSDIFDGVGFRGIRLYSSDNMYPDSQQGFAPTVRGIARTAAQLTIRQNGFIIYQSYVSPGAFEITDLHPTSSNGDLDVTIDERDGNQQNYTIPYSTVPILQREGRFKFDLTAGDFRSGNSQQSSPFFFQGTALGGLPQEFTAYGGTQLSANYTAFLLGLGRNLGNWGTVSLDVTHARSQLADDSRHEGDSIRFLYAKSMNTFGTNFQLMGYRYSTQGFYTLDDVAYRRMEGYEYDYDYDGEHRDEPIIVNYHNLRFSRKDRLQLNISQSLNDFGSLYISGTHQKYWNTSDSDTWYQVGYTSSWVGISYSLSFSWNESVGIPDNERIVGLNVSVPFNVLTKRRYTRENALDRAYASFNANRNSNGQNSWLAGVGGTLLEGHNLSYHVSQGDTSNNGYTGSATANWQAAYGTLGGGYNYDRDQHDVNWQLSGGVVGHENGITLSQPLGDTNVLIKAPGAGGVRIENQTGILTDWRGYAVMPYATVYRYNRIALDTNTMGNSIDVEKNISSVVPTQGALVRANFDTRIGVRALITVTQGRKPVPFGSLVRENSTGITSMVGDDGQVYLSGAPLSGELLVQWGDGANSRCIAHYVLPKQSLQQAVTVISAVCTHPGS

SEQ ID NO: 3739 - protein, 765 aa, Escherichia coli
MQFHINSPDINNEKAVLLARDETLGNCLNLTEIIPQASVRYDVNEQRLDIDVPQAWVMKNYQNYVDPSLWENGINAAMLSYNLNGYHSETPGRRNDSIYAAFNGGMNLGAWRLRASGNYNWMTDSGSNYDFKNRYIQRDIASLRSQLILGESYTTGETFDSVSIRGIRLYSDSRMLPPTLASFAPIIHGVANTNAKVTITQGGYKIYETTVPPGAFVIDDLSPSGYGSDLIVTVEESDGSKRTFSQPFSSVVQMLRPGVGRWDISGGQVLKDDIQDEPNLFQASYYYGLNNYLTGYTGIQITDNNYTAGLLGLGLNTSVGAFSFDVTHSNVRIPDDKTYQGQSYRVSWNKLFEETSTSLNIAAYRYSTQNYLGLNDALTLIDEVKHPEQDLEPKSMRNYSRMKNQVTVSINQPLKFEKKDYGSFYLSGSWSDYWASGQNRSNYSIGYSNSASWGSYSVSAQRSWNEDGDTDDSVYLSFTIPIEKLLGTEQRTSGFQSIDTQMSSDFKGNNQLNVSSSGYSDNARVSYSVNTGYTMNKASKDLSYVGGYASYESPWGTLAGSVSANSDNSRQVSLSTDGGFVLHSGGLTFSNDSFSDSDTLAVVQAPGAQGARINYGNSTIDRWGYGVTSALSPYHENRIALDINDLENDVELKSTSAVAVPRQGSVVFADFETVQGQSAIMNITRSDGKNIPFAADIYDEQGNVIGNVGQGGQAFVRGIEQQGNISIKWLEESNPVSCLAHYQQSSEAEKIAQSIILNGIRCQIQ

SEQ ID NO: 3740 - protein, 678 aa, Escherichia coli; identical to SEQ ID NO: 3014

SEQ ID NO: 3741 - protein, 863 aa, Escherichia coli
MHIRKHRLAGFFVRLFVACAFAAQTPLSSAELYFNPRFLADDPQAVADLSRFENGQELPPGTYRVDIYLNNGYMATRDVTFNTGDSEQGIVPCLTRAQLASMGLNTASVSGMNLLADDACVPLTSMIHDATAHLDVGQQRLNLTIPQAFMSNRARGYIPPELWDPGINAGLLNYNFSGNSVQNRIGGNSHYAYLNLQSGLNIGAWRLRDNTTWSYNRSDRSSGSKNKWQHINTWLERDIIPLRSRLTLGDGYTQGDIFDGINFRGAQLASDDNMLPDSQRGFAPVIHGIARGTAQVTIKQNGYDIYNSTVPPGPFTINDIYAAGNSGDLQVTIKEADGSTQIFTVPYSSVPLLQREGHTRYSITAGEYRSGNAQQEKPRFFQSTLLHGLPAGWTIYGGTQLADRYRAFNFGIGKNMGALGALSVDMTQANSTLPDDSQHDGQSVRFLYNKSLNESGTNIQLVGYRYSTSGYFNFADTTYSRMNGYNIETQDGVIQVKPKFTDYYNLAYNKRGKLQLTVTQQLGRTSTLYLSGSHQTYWGTSNVDEQFQAGLNTAFEDINWTLSYSLTKNAWQKGRDQMLALNVNIPFSHWLRSDSKSQWRHASASYSMSHDLNGRMTNLAGVYGTLLEDNNLSYSVQTGYAGGGDGNSGSTGYATLNYRGGYGNANIGYSHSDDIKQLYYGVSGGVLAHANGVTLGQPLNETVVLVKAPGAKDAKVENQTGVRTDWRGYAVLPYATEYRENRVALDTNTLADNVDLDNAVANVVPTRGAIVRAEFKARVGIKLLMTLTHNNKPLPFGAMVTSESSQSSGIVADNGQVYLSGMPLAGKVQVKWGEEENAHCVANYQLPPESQQQLLTQLSAECR

SEQ ID NO: 3742 - protein, 351 aa, Escherichia coli; identical to SEQ ID NO: 2519

SEQ ID NO: 3743 - protein, 221 aa, Escherichia coli
MKNYLWLVALLPLLSGCESQAILVKKDDAYFAPPKTEAPPPADGRAGGVFETGYNWSLTADRRAYRVGDILTVILEESTQSSKQAKTNFGKSNTVDIGAPTIFSHTKDKLSGSIDANRDFDGSATSQQQNSLRGEITVSVHAVQPNGILEIRGEKWLTLNQGDEYIRLSGLVRADDIQNDNSVSSQRIADARISYAGRGALSDANAAGWLTRLFNHPLFPI

SEQ ID NO: 3744 - protein, 232 aa, Escherichia coli; identical to SEQ ID NO: 2087

SEQ ID NO: 3745 - protein, 266 aa, Escherichia coli
MAKSLFRALVALSFLAPLWLNAAPRVITLSPANTELAFAAGITPVGVSSYSDYPPQAQKIGQVSTWQGMNLERIVALKPDLVIAWRGGNAERQVDQLASLGIKVMWVDATSIEQIANALRQLAPWSPQPDKAEQAAQSLLDQYAQLKAQYADKPKKRVFLQFGINPPFTSGKESIQNQVLEVCGGENIFKDSRVPWPQVSREQVLARSPQAIVITGGPDQIPKIKQYWGEQLKIPVIPLTSDWFERASPRIILAAQQLCNALSQVD

SEQ ID NO: 3746 - protein, 843 aa, Escherichia coli
MNLVMRGMKDRIPFAVNNITCVILLSLFCNAASAVEFNTDVLDAADKKNIDFTRFSEAGYVLPGQYLLDVIVNGQSISPASLQISFVEPALSGDKAEKKLPQACLTSDMVRLMGLTAESLDKVVYWHDGQCADFHGLPGVDIRPDTGAGVLRINMPQAWLEYSDATWLPPSRWDDGIPGLMLDYNLNGTVSRNYQGGDSHQFSYNGTVGGNLGPWRLRADYQGSQEQSRYNGEKTTNRNFTWSRFYLFRAIPRWRANLTLGENNINSDIFRSWSYTGASLESDDRMLPPRLRGYAPQITGIAETNARVVVSQQGRVLYDSMVPAGPFSIQDLDSSVRGRLDVEVIEQNGRKKTFQVDTASVPYLTRPGQVRYKLVSGRSRGYGHETEGPVFATGEASWGLSNQWSLYGGAVLAGDYNALAAGAGWDLGVPGTLSADITQSVARIEGERTFQGKSWRLSYSKRFDNADADITFAGYRFSERNYMTMEQYLNARYRNDYSSREKEMYTVTLNKNVADWNTSFNLQYSRQTYWDIRKTDYYTVSVNRYFNVFGLQGVAVGLAASRSKYLGRDNDSAYLRISVPLGTGTASYSGSMSNDRYVNMAGYTDTFNDGLDSYSLNAGLNSGGGLTSQRQINAYYSHRSPLANLSANIASLQKGYTSFGVSASGGATITGKGAALHAGGMSGGTRLLVDTDGVGGVPVDGGQVVTNRWGTGVVTDISSYYRNTTSVDLKRLPDDVEATRSVVESALTEGAIGYRKFSVLKGKRLFAILRLADGSQPPFGASVTSEKGRELGMVADEGLAWLSGVTPGETLSVNWDGKIQCQVNVPETAISDQQLLLPCTPQK

SEQ ID NO: 3747 - protein, 834 aa, Escherichia coli; identical to SEQ ID NO: 3692

SEQ ID NO: 3748 - protein, 700 aa, Escherichia coli; identical to SEQ ID NO: 3128

SEQ ID NO: 3749 - protein, 432 aa, Escherichia coli; identical to SEQ ID NO: 2026

SEQ ID NO: 3750 - protein, 740 aa, Escherichia coli
MADASSEFDVGQQHLSLSVPQIYVGRMARGYVSPDLWEEGINAGLLNYSFDGNSINNRSNHNAGKSNYAYLNLQSGINIGSWRLRDNSTWSYNSGSSNSSDSNKWQHINTSAERDIIPLRSRLTVGDSYTDGDIFDSVNFRGLKINSTEAMLPDSQHGFAPVIHGIARGTAQVSVKQNGYDVYQTTVPPGPFTIDDINSAANGGNLQVTIKEADGSIQTLYVPYSSVPVLQRAGYTRYALAMGEYRSGNNLQSTPKFVQASLMHGLKGNWTPYGGMQIAEDYQAFNLGIGKDLGLFGAFSFDITQANTTLADDTRHSGQSVKSVYSKSFYQTGTNIQVAGYRYSTQGFYNLSDSAYSRMSGYTVKPPTGDTSEQTLFIDYFNLFYSKRGQEQISISQQLGNYGTTFFSASRQSYWNTSRSDQQISFGLNVPFGDITTSLNYSYSNNIWQNDRDHLLAFTLNVPFSHWMRTDSQSAFHNSNASYSMSNDLKGGMTNLSGVYGTLLPDNNLNYSVQVGNTQGGNTSSGTSGYSSLNYRGAYGNTNVGYSRSGDSSQIYYGMSGGIIAHADGITFGQPLGDTMVLVKAPGADNVKIENQTGIHTDWRGYAILPFATEYRENRVSLNANSLADNVELDETVVTVIPTHGAIARATFNAQIGGKVLMTLKYGNKSVPFGAIVTHGENKNGSIVAENGQVYLTGLPQSGKLQVSWGKDKNSNCIVDYKLPVVSPGTLLNQQTAICR

SEQ ID NO: 3751 - protein, 816 aa, Escherichia coli; identical to SEQ ID NO: 2817

SEQ ID NO: 3752 - protein, 130 aa, Escherichia coli
MPVDRETLFELSIASVPSGKVENQSVKVAMRSVFKLFWRPEGLPGDPLEAYQQLRWTRNSQGVQLTNPAPYYINLIQLSVNGKALSNAGVVPPKSQRQTSWCQAIAPCHVAWRAINDYGGLSAKKEQNLP

SEQ ID NO: 3753 - protein, 843 aa, Escherichia coli
MHWMHLPLYHYRAHFSFSLLALTIASSLPAYGGKFNPKFLENVQGIDQHIDLSVYDSPVGQQIPGKYRVSVFVNEEKMASRTLDFSTASEAKRKASGESLMPCLSRVQLEEMGVRVDSFPALKMSPPEACVAFDEIIPQATSRFDFNTQTLHLSFPQAAMMMTARGTVDPSRWDEGIPALLLDYSFSGSNGRNEGIGSSSDSTSDSYYLNLRSGLNVGPWRLRNNSIWNRTDGKNQWDNVGTSLNRAIIPLKSQITLGDTATPGEIFDSVQMRGALLASDDEMLPDSQRGFAPVVRGIAKSNAEVSIEQNGYVIYRTFVQPGAFEINDLYATSGSGDLTVIIKEADGSEQRFIQPFSAVAIFQREGYLKYSLAAGEYRAGNYDSDKPHFGQFTAMYGLPWGMTAYGGALLSADYNALALGLGKNFGTIGAVSVDVTQAKSQLRNNEKEEGQSYRFLYSKSFEGGTDLRLLGYKYSTSGYYTFQEATDVRSDADSDYRRYHKRSQIQGNITQQLGDYGSVYFNMTQQDYWNVDGKENSLSAGYHGHIGRVNYSVAYTWTRSPEWEEDDRLWSFSVSIPLGGAWSSYRMTTDQNGKTSQQASVSGTLLEDRNLSYNVQQGYTSNGVGYSGSVNMGYMGGSGNIDVGYNYSKDNQQVNYGVRGGVIVHSEGITLSQPLGESLAIVSAPGARGGHVVNSSGVEVDWMGNAVVPYLTPYRETIVELRSDTLGQNVELQEAFQKVVPTRGAVVRSRFDTRVGYRVLMSLKQANGNAVPFGATAALIDESKPASSIVGEEGQLYISGMPEEGELQVSWGNEQAQRCRVPFRLPENKDNAAIVMVNAVCEK

SEQ ID NO: 3754 - protein, 208 aa, Escherichia coli; identical to SEQ ID NO: 1949

SEQ ID NO: 3755 - protein, 207 aa, Escherichia coli; identical to SEQ ID NO: 2211

SEQ ID NO: 3756 - protein, 430 aa, Escherichia coli; identical to SEQ ID NO: 2617

SEQ ID NO: 3757 - protein, 387 aa, Escherichia coli
MKRKVLAMLVPALLVAGAANAAEIYNKNGNKLDLYGKVDARHTFSDNPGDDGDETIIELGFKGETQITDQLTGYGQALTKTKASDTEGSDNTYVKLAFAGQKFGEMGSFDYGRNYGVIYDVEAWTDMLPVFGGDSYTWTDNFMAGRANGVATYRNSDFFGLVEGLNFALQYQGNNEGSNAGEDQEGTKNGHEDVRFQNGDGFGLSTSYDFDFGLSLGAAYSNSDRTNSQVALGGYHYNEYSKFAGGDTAEAWTFGAKYDANNVYLAMMYAETRNMTPYGNVGIANKTQNFEAVAQYQFDFGLRPSLAYVYSKGKDLGGNDYNNNGHQEYVDQDLVNYVEIGATYYFNKNFSTYVDYKINLLDKDDDFYDNNGIATDDVVGVGLVYQF

SEQ ID NO: 3758 - protein, 162 aa, Escherichia coli; identical to SEQ ID NO: 1965

SEQ ID NO: 3759 - protein, 241 aa, Escherichia coli; identical to SEQ ID NO: 2884

SEQ ID NO: 3760 - protein, 798 aa, Escherichia coli
MYVNDQPIMSQSIAFAVIEGKKNAQACITQKNLLQFHISSPDKNSEKAILLKRDDDLGDCLNLAEMIPQSSIRYDVNDQRLDIDVPQAWIMKNYQNYVDPSLWENGINAAMLSYNLNGYHSESPGRTNDSIYAAFNGGINLGAWRLRASGNYNWMTNVHSDYDFQNRYLQRDLASLRSQLVIGESYTTGETFDSVRIRGIRLYSDSRMLPPVLASFAPIIHGVANTNAKVTVMQNGYKIYETTVPPGAFAIDDLSPSGYGSDLIVTIEEADGTKRTFSQPFSSVVQMLRPGVGRWDISAGQVLKDSIQDEPNLFQASYYYGLNNYLTGYTGIQLTDNNYTAGLLGLGMNTPVGAFSVDVTHSNVSIPDDKTYQGQSYRISWNKLFENTSTSLNIAAYRYSTQHYLGLNDALTLIDEVEHPEQDLEPKSMRNYSRMKNQVTVSINQPLKFEKKDYGSFYLSGSWSDYWASGQNSTNYSIGYSNSASWGSYSISAQRSLNEDGQTDDSIYLSFTIPIENLLGTEHRSSGFQSIDTQLNSDFKGNNQLNISSSGYSDTNRISYSVNTGYMMNKSSDDLSYIGGYASYESPWGTLSGSASASSDNSRQFSLNTDGGFVLHSGGLTFSNDSFSDSDTLAVIQAPGAKGARINYGNSTVDRWGYGVTSALSPYHENRIALDINDLENDVELKSTSTVAVPRQGAVVFADFETVQGQSAIMNIVRSDGKNIPFAADIYDEQNNIIGNVGQGGQAFVRGIGQEGNIRITWIEEGKPVSCFAHYQQNTTSEKIAQSIILNGLRCQIQ

SEQ ID NO: 3761 - protein, 161 aa, Escherichia coli; identical to SEQ ID NO: 2582

SEQ ID NO: 3762 - protein, 203 aa, Escherichia coli; identical to SEQ ID NO: 2201

SEQ ID NO: 3763 - protein, 361 aa, Escherichia coli; identical to SEQ ID NO: 3061

SEQ ID NO: 3764 - protein, 838 aa, Escherichia coli
MPQRHHQGHKRTPKQLALIIKRCLPMVLTGSGMLCTTANAEEYYFDPIMLETTKSGMQTTDLSRFSKKYAQLPGTYQVDIWLNKKKVSQKKITFTANAEQLLQPQFTVEQLRELGIKVDEIPALAEKDDDSVINSLEQIIPGTAAEFDFNHQRLNLSIPQIALYRDARGYVSPSRWDDGIPTLFTNYSFTGSDNRYRQGNRSQRQYLNMQNGANFGPWRLRNYSTWTRNDQASSWNTISSYLQRDIKALKSQLLLGESATSGSIFSSYTFTGVQLASDDNMLPNSQRGFAPTVRGIANSSAIVTIRQNGYVIYQSNVPAGAFEINDLYPSSNSGDLEVTIEESDGTQRRFIQPYSSLPMMQRPGHLKYSATAGRYRADANSDSKEPEFAEATAIYGLNNTFTLYGGLLGSEDYYALGIGIGGTLGALGALSMDINRADTQFDNRHSFHGYQWRTQYIKDIPETNTNIAVSYYRYTNDGYFSFDEANTRNWDYNSRQKSEIQFNISQTIFDGVSLYASGSQQDYWGNNDKNRNISVGVSGQQWGIGYSLNYQYSRYTDQNNDRALSLNLSIPLERWLPRSRVSYQMTSQKDRPTQHEMRLDGSLLDDGRLSYSLEQSLDDDNNHNSSLNASYRSPYGTFSAGYSYGNDSSQYNYGVTGGVVIHPHGVTLSQYLGNAFALIDANGASGVRIQNYPGIATDPFGYAVVPYLTTYQENRLSVDTTQLPDNVDLEQTTQFVVPNRGAMVAARFNANIGYRVLVTVSDRNGKPLPFGALASNDETGQQSIVDEGGILYLSGISSKSQSWTVRWGNQADQQCQFAFSTPDSEPTTSVLQGTAQCH

SEQ ID NO: 3765 - protein, 460 aa, Escherichia coli
MPDHSLFRLRILPWCIALAMSGSYSSVWAEDDIQFDSRFLELKGDTKIDLKRFSSQGYVEPGKYNLQVQLNKQPLAEEYDIYWYAGEDDASKSYACLTPELVAQFGLKEDVAKNLQWSHDAKCLKSGQLEGMEIKADLSQSALVISLPQAYLEYTYPDWDPPSRWDDGISGIVADYSINAQTRHEENGGDDSNEISGNGTVGVNLGPWRMRADWQTNYQHTRSNDDDDEFSGDETQKKWEWSRYYAWRALPSLKAKLALGEDYLRSDIFDGFNYVGGSVSTDDQMLPPNLRGYAPDISGVAHTTAKVTVSQMGRVIYETQVPAGPFRIQDLGDSVSGTLHIRIEEQNGQVQEYDISTASMPYLTRPGQVRYKIMMGRPQEWGHHVEGEFFLVLKLPGGSLTAGRYMAAHWEMKTISLRRLASVAICLHSARSRLMLLTRTPNWIKTPLMAKVRWTVTPSV

SEQ ID NO: 3766 - protein, 900 aa, Escherichia coli
MKLNIFTKSMIGMGLVCSALPALAMEAWNNQQGGNKYQVIFDGKIYENAWWVSSTNCPGKAKANDATNPWRLKRTATAAEISQFGNTLSCEKSGSSSSSTSNTPASNTPANGASATPAQGTVPSNSSVVAWNKQQGGQTWYVVFNGAVYKNAWWVASSNCPGDAKGNDASNPWRYVRAATATEISETSNPQSCTSAPQPAPDVKPAPDVKPAPDVQPAPADKSNDNYAVVAWKGQEGSSTWYVIYNGGIYKNAWWVGAANCPGDAKENDASNPWRYVRAATATEITQYGNPASCSVKPDNNGGAVTPVDPTPETPETPVTPTPDNNEPSTPADSSNDYSLQAWSGQEGSEIYHVIFNGNVYQNAWWVGSEDCPRGTSVENSNNPWRLVRTATAAEMSQYGNPTTCEIDNGGVIIADGFQASKAYSANSIVDYNDAHYKTSVDQDAWGFVPGGDNPWKKYEPAKAWSASTVYVKGDRVVVDGQAYEALFWTQSDNPALIANQNATGSNSRPWKPLGKTQSYSNEELNNAPQFNPETLYASDTLIRFNGENYISQSKVQKVSPSDSNPWRVFVDWTGTKERVGTPKKAWPKHVYAPYVDFTLNTIPDLAALAKSHNVNHFTLAFVVSKDANTFLPTWGTAYGMQNYAQYSKIKALREAGGDVMLSIGGANNAPLAASCKNVDDLMQHYYDIVDNLNLRVLDFDIEGTWVADQASIERRNLAVKKVQDKWKSEGKDIAIWYTLPILPTGLTPEGMNVLSDAKAKGVELAGVNVMTMDYGNAICQSANTEGQNIHGKCATSAIANLHSQLKGLHPNKSDAEIDAMMGTTPMVGVNDVQGEVFYLSDARLVMQDAQKRNLGMVGIWSIARDLPGGTNLSPEFHGLTKEQAPKYAFSEIFAPFTKQ

SEQ ID NO: 3767 - protein, 266 aa, Escherichia coli; identical to SEQ ID NO: 1894

SEQ ID NO: 3768 - protein, 243 aa, Escherichia coli; identical to SEQ ID NO: 3483

SEQ ID NO: 3769 - protein, 446 aa, Escherichia coli; identical to SEQ ID NO: 2176

SEQ ID NO: 3770 - protein, 89 aa, Escherichia coli; identical to SEQ ID NO: 2833

SEQ ID NO: 3771 - protein, 230 aa, Escherichia coli; identical to SEQ ID NO: 3723

SEQ ID NO: 3772 - protein, 826 aa, Escherichia coli
MLRMTPLASAIVALLLGIEAYAAEETFDTHFMIGGMKDQQVANIRLDDNQPLPGQYDIDIYVNKQWRGKYEIIVKDNPQETCLSIEVIKRLGINSDNFASGKQCLTFEQLVQGGSYTWDIGVFRLDFSVPQAWVEELESGYVPPENWERGINAFYTSYYVSQYYSDYKASGNSKSTYVRFNSGLNLLGWQLHSDASFSKTNNNPGVWKSNTLYLERGFAQLLGTLRVGDMYTSSDIFDSVRFSGVRLFRDMQMLPNSKQNFTPRVQGIAQSNALVTIEQNGFVVYQKEVPPGPFAITDLQLAGGGADLDVSVKEADGSVTTYLVPYAAVPNMLQPGVSKYDFAAGRSHIEGASKQSDFVQAGYQYGFNNLLTLYGGSMVANNYYAFTLGTGWNTRIGAISVDATKSHSKQDNGDVFDGQSYQIAYNKFVSQTSTRFGLAAWRYSSRDYRTFNDHVWANNKDNYRRDENDVYDIADYYQNDFGRKNSFSANMSQSLPEGWGSVSLSTLWRDYWGRSGSSKDYQLSYSNNWRRISYILAASQAYDENHHEEKRFNIFISIPFDWGDDVTTPRRQIYMSNSTTFDDQGFASNNTGLSGTVGSRDQFNYGVNLSYQNQGNETTAGANLTWNAPVATVNGSYSQSSTYRQAGASVSGGIVAWSGGVNLANRLSETFAVMNAPGIKDAYVNGQKYRTTNRNGVVVYDGMTPYRENHLMLDVSQSDSEAELRGNRKIAAPYRGAVVLVNFDTDQRKPWFIKALRADGQPLMFGYEVNDIHGHNIGVVGQGSQLFIRTNEVPPSVNVAIDKQQGLSCTITFGKEIDESRNYICQ

SEQ ID NO: 3773 - protein, 746 aa, Escherichia coli; identical to SEQ ID NO: 3031

SEQ ID NO: 3774 - protein, 641 aa, Escherichia coli
MLAVDDDGETMVVTASSVEQNLKDAPASISVITQEDLQRKPVQNLKDVLKEVPGVQLTNEGDNRKGVSIRGLDSSYTLILVDGKRVNSRNAVFRHNDFDLNWIPVDSIERIEVVRGPMSSLYGSDALGGVVNIITKKIGQKWSGTVTVDTTIQEHRDRGDTYNGQFFTSGPLIDGVLGMKAYGSLAKREKDDPQNSTTTDTGETPRIEGFSSRDGNVEFAWTPNQNHDFTAGYGFDRQDRDSDSLDKNRLERQNYSVSHNGRWDYGTSELKYYGEKVENKNPGNSSPITSESNTVDGKYTLPLTAINQFLTVGGEWRHDKLSDAVNLTGGTSSKTSASQYALFVEDEWRIFEPLALTTGVRMDDHETYGEHWSPRAYLVYNATDTVTVKGGWATAFKAPSLLQLSPDWTSNSCRGACKIVGSPDLKPETSESWELGLYYMGEEGWLEGVESSVTVFRNDVKDRISISRTSDVNAAPGYQNFVGFETGANGRRIPVFSYYNVNKARIQGVETELKIPFNDEWKLSINYTYNDGRDVSNGENKPLSDLPFHTANGTLDWKPLALEDWSFYVSGHYTGQKRADSATAKTPGGYTIWNTGAAWQVTKDVKLRAGVLNLGDKDLSRDDYSYNEDGRRYFMAVDYRF

SEQ ID NO: 3775 - protein, 363 aa, Escherichia coli; identical to SEQ ID NO: 3347

SEQ ID NO: 3776 - protein, 732 aa, Escherichia coli; identical to SEQ ID NO: 3068

SEQ ID NO: 3777 - protein, 191 aa, Escherichia coli; identical to SEQ ID NO: 2727

SEQ ID NO: 3778 - protein, 729 aa, Escherichia coli
MLSTQFNRDNQYQASTKPSLLAGCIALALLPSAAFAAPATEETVIVEGSATAPDDGENDYSVTSTSAGTKMQMTQRDIPQSVTIVSQQRMEDQQLQTLGEVMENTLGISKSQADSDRALYYSRGFQIDNYMVDGIPTYFESRWNLGDALSDMALFERVEVVRGATGLMTGTGNPSAAINMVRKHATSREFKGDVSAEYGSWNKERYVADLQSPLTEDGKIRARIVGGYQNNDSWLDRYNSEKTFFSGIVDADLGDLTTLSAGYEYQHIDVNSPTWGGLPRWNTDGSSNSYDRARSTAPDWAYNDKEINKVFMTLKQRFADTWQATLNATHSEVEFDSKMMYVDAYVNKADGMLIGPYSNYGPGFDYVGGTGWNSGKRKVDALDLFADGSYELFGRQHNLMFGGSYSKQNNRYFSSWANIFPDEIGSFYNFNGNFPQTDWSPQSLAQDDTTHMKSLYAATRVTLADPLHLILGARYTNWRVDTLTYSMEKNHTTPYAGLVFDINDNWSTYASYTSIFQPQNDRDSSGKYLAPITGNNYELGLKSDWMNSRLTTTLAIFRIEQDNVAQSTGTPIPGSNGETAYKAVDGTVSKGVEFELNGAITDNWQLTFGATRYIAEDNEGNAVNPNLPRTTVKMFTSYRLPVMPELTVGGGVNWQNRVYTDTVTPYGTFRAEQGSYALVDLFTRYQVTKNFSLQGNVNNLFDKTYDTNVEGSIVYGAPRNFSITGTYQF

SEQ ID NO: 3779 - protein, 213 aa, Escherichia coli; identical to SEQ ID NO: 2232

SEQ ID NO: 3780 - protein, 359 aa, Escherichia coli
MVVNTVASENPDEAGRYSMDVEYGQYSVILLVEGFPPSHAGTITVYEDSQPGTLNDFLGAMSEDDVRPEALRRFELMVEEVARHAEEAKKNAGEAETSARNAGISASQAEESAANADTSAGEASESARQAAESAASAKQSEDASSSSASAAAQKASESSQSAAEAELSRKTAESAAGNAARDATTATEKARESAESAQSAEQSRIAAEEAVNRIPTVVGPPGPKGEQGPAGPQGPKGDKGERGDTGPVGATGERDRQVMLVRQAREGPKGDRGEQGKTGLTGNAGPQGPKGDTGAAGPAGPQGPKGETGAAGPVGATGPQGPKGDPGETQIRFRLGPGNILRQTAMAGSRIQMVRSSPD

SEQ ID NO: 3781 - protein, 565 aa, Escherichia coli; identical to SEQ ID NO: 2678

SEQ ID NO: 3782 - protein, 359 aa, Escherichia coli; identical to SEQ ID NO: 2329

SEQ ID NO: 3783 - protein, 231 aa, Escherichia coli; identical to SEQ ID NO: 3055

SEQ ID NO: 3784 - protein, 512 aa, Escherichia coli; identical to SEQ ID NO: 2973

SEQ ID NO: 3785 - protein, 615 aa, Escherichia coli
MFWRDITLSVWRKKTTGLKTKKRLLPLVLAAALCSSPVWAEEATFTANFKDTDLKSFIETVGANLNKTIIMGPGVQGKVSIRTMTPLNERQYYQLFLNLLEAQGYAVVPMENDVLKVVKSSAAKVEPLPLVGEGSDNYAGDEMVTKVVPVRNVSVRELAPILRQMIDSAGSGNVVNYDPSNVIMLTGRASVVERLTEVIQRVDHAGNRTEEVIPLDNASASEIARVLESLTKNSGENQPATLKSQIVADERTNSVIVSGDPATRDKMRRLIRRLDSEMERSGNSQVFYLKYSKAEDLVDVLKQVSGTLTAAKEEAEGTVGSGREIVSIAASKHSNALIVTAPQDIMQSLQSVIEQLDIRRAQVHVEALIVEVAEGSNINFGVQWASKDAGLMQFANGTQIPIGTLGAAISQAKPQKGSTVISENGATTINPDTNGDLSTLAQLLSGFSGTAVGVVKGDWMALVQAVKNDSSSNVLSTPSITTLDNQEAFFMVGQDVPVLTGSTVGSNNSNPFNTVERKKVGIMLKVTPQINEGNAVQMVIEQEVSKVEGQTSLDVVFGERKLKTTVLANDGELIVLGGLMDDQAGESVAKVPLLGDIPLIGNLFKSTADKKKNVT

SEQ ID NO: 3786 - protein, 331 aa, Escherichia coli; identical to SEQ ID NO: 2700

SEQ ID NO: 3787 - protein, 274 aa, Escherichia coli; identical to SEQ ID NO: 3721

SEQ ID NO: 3788 - protein, 224 aa, Escherichia coli; identical to SEQ ID NO: 3165

SEQ ID NO: 3789 - protein, 851 aa, Escherichia coli; identical to SEQ ID NO: 3458

SEQ ID NO: 3790 - protein, 386 aa, Escherichia coli; identical to SEQ ID NO: 3094

SEQ ID NO: 3791 - protein, 826 aa, Escherichia coli
MLRMPPLASAIVALLIGIEAYAAEETFDTHFMIGGMKDQQVSNIRLEDNQPLPGQYDIDIYVNKQWRGKYEIIVKDNPQETCLSREMIKRLGINTDSFASGKQCLTFKQLIQGGSYTWDIGVFRLDFSVPQAWVEELESGYVPPENWERGINAFYTSYYMSQYYSDYKASGNSKSTYVRFNSGLNLLGWQLHSDASFSKTNNNPGVWKSNTLYLERGFAQLLGTLRVGDMYTSSDIFDSVRFSGVRLFRDMQMLPNSKQNFTPRVQGIAQSNALVTIEQNGFVVYQKEVPPGPFAITDLQLAGGGADLDVSVKEADGSVTTYLVPYAAVPNMLQPGVSKYDFAAGRSHIEGASKQSDFVQVGHQYGFNNLLTLYGGSMVANNYYAFTLGTGWNTRIGAISVDATKSHSKQDNGDVFDGQSYQIAYNKFVSQTSTRFGLAAWRYSSRDYRTFNDHVWANNKDNYRRDENDIYDIADYYQNDFGRKNSFSANMSQSLPEGWGSVSLSTLWRDYWGRSGSSKDYQLSYSNNLRRISYTLAASHAYDENHHEEKRFNIFISIPFDWGDDVTTPRRQIYMSNSTTFDDQGVASNNTGLSGTVGSRDQFNYGVNLSYQYQGNETTAGANLTWNAPVATVNGSYSQSSAYRQAGASVSGGIVAWSGGVNLANRLSETFAVMNAPGIKDAYVNGQKYRTTNRNGVVVYDGMTPYRENYLMLDVSQSDSEAELRGNRKIAAPYRGAVVLVNFDTDQRKPWFIKALRADGQPLTFGYEVNDIHGHNIGVVGQGSQLFIRTNEVPPSVNVAIDKQQGLSCTITFGKEIDESRNYICQ

SEQ ID NO: 3792 - protein, 224 aa, Escherichia coli
MKGLLALLISSMVLPAHAGIVIYGTRIIYPAEHKEVMVQLMNQGNRSSLMQAWIDDGDTSLPPEKIQVPFMLTPPVAKIGANSGQQVKIKIMPNKLPTNKESIFYLNVLDIPPNSPEQEGKNALKFAMQNRIKLFYRPAGIAPVNKVTFKKLLVNRSGNGLVIKNDSANWVTISDVKANNVKVNYETIMIAPLESQSVNVKSNNANNWHLTIIDDHGNYISDKI

SEQ ID NO: 3793 - protein, 237 aa, Escherichia coli
MRKITQALSAVCLLFALNSSAVALASSPSPLNPGTNVAKLAEQAPIHWVSVAQIENSLAGRPPMAVGFDIDDTVLFSSPGFWRGKKTFSPESEDYLKNPVFWEKMNNGWDEFSIPKEVARQLIDMHVRRGDAIFFVTGRSPTKTETVSKTLADNFHIPATNMNPVIFAGDKPGQNTKSQWLQDKNIRIFYGDSDNDITAARDVGARGIRILRASNSTYKPLPQAGAFGEEVIVNSEY

SEQ ID NO: 3794 - protein, 641 aa, Escherichia coli
MLAVDDDGETMVVTASSVEQNLKDAPASISVITQEDLQRKPVQNLKDVLKEVPGVQLTNEGDNRKGVSIRGLDSSYTLILVDGKRVNSRNAVFRHNDFDLNWIPVDSIERIEVVRGPMSSLYGSDALGGVVNIITKKIGQKWSGTVTVDTTVQEHRDRGDTYNGQFFTSGPLIDGVLGMKAYGSLAKREKDDPQNSTTTDTGETPRIEGFSSRDGNVEFAWTPNQNHDFTAGYGFDRQDRDSDSLDKNRLERQNYSVSHNGRWDYGTSELKYYGEKVENKNPGNSSPITSESNTVDGKYTLPLTAINQFLTVGGEWRHDKLSDAVNLTGGTSSKTSASQYALFVEDEWRIFEPLALTTGVRMDDHETYGEHWSPRAYLVYNATDTVTVKGGWATAFKAPSLLQLSPDWTSNSCRGACKIVGSPDLKPETSESWELGLYYMGEEGWLEGVESSVTVFRNDVKDRISISRTSDVNAAPGYQNFVGFETGANGRRIPVFSYYNVNKARIQGVETELKIPFNDEWKLSINYTYNDGRDVSNGENKPLSDLPFHTANGTLDWKPLALEDWSFYVSGHYTGQKRADSATAKTPGGYTIWNTGAAWQVTKDVKLRAGVLNLGDKDLSRDDYSYNEDGRRYFMAVDYRF

SEQ ID NO: 3795 - protein, 161 aa, Escherichia coli; identical to SEQ ID NO: 2582

SEQ ID NO: 3796 - protein, 781 aa, Escherichia coli
MAALGLKEGIAKSLQWTHNDECLKPGQLDGMEVENDLSQSALLLTVPQAYLEYTSSDWDPPSRWDDGIPGLIADYSLNAQTRHQEQGGEDSHDISGNGTVGANLGAWRFRADWQSDYQHTRSNDDDDDSSNSTTSKNWDWSRYYAWRALPSLKAKLSLGEDYLNSDIFDGFNYIGSSVSTDDQMLPPNLRGYAPDVSGVAHSSAKVTISQMGRVLYETQVPAGPFRIQDIGDSVSGTLHVRVEEQNGQVQEYDVTTASMPFLTRQGQVRYKVMMGRPEDWNHKTEGGFFSGGEASWGVADGWSLYGGALADKHYQSAAMGVGRDLAQFGALAFDVTHSHVNLDHDSAYGKGKLDGNSFRVSYAKDFDELNSRVTFAGYRFSEKNFMTMSEYLDANQSDMARTGNDKEMYTITYNQNFAAAGVSIYLNYSHRTYWDRPEQTNYNLMFSHYFNMGSIRNMSISVTGYRYEYDDNADKGMYLSMSIPWSDSSTVTYNGSYGSGSDSSQVGYFKRVDDATHYQVNVGTSEQHGSVDGYLSHDGSLAKVDLSANYHEGEYRSAGIALQGGATLTAHGGALHRTQNMGGTRLLIDADGIANVPVESNGAPVYTNMFGKAVVADINNYYRNQAYIDLNNLPEDAEATQSVVQATLTEGAIGYRKFKVISGQKAMAVLRLRDGSYPPFGAEVKNDEQQQVGIVDDEGNVYLAGVNAGEHMMVFWEGSAQCEIVLPKPLPADLFSGLLLPCEQKGTAAPDSSAPEIKPVIQDQTRQVTPTEAPTSISATQ

SEQ ID NO: 3797 - protein, 368 aa, Escherichia coli; identical to SEQ ID NO: 3332

SEQ ID NO: 3798 - protein, 691 aa, Escherichia coli
MAGFFVRLFVACAFAAQAPLSSAELYFNPRFLADDPQAVADLSRFENGQELPPGTYRVDIYLNNGYMATRDVTFNTGDSEQGIVPCLTRAQLASMGLNMASVAGMNLLADDACVPLTTMVQDATAHLDVGQQRLNLTIPQAFMSNRARGYIPPELWDPGINAGLLNYNFSGNSVQNRIGGNSHYAYLNLQSGLNIGAWRLRDNTTWSYNSSDRSSGSKNKWQHINTWLERDIIPLRSRLTLGDGYTQGDIFDGINFRGAQLASDDNMLPDSQRGFAPVIHGIARGTAQVTIKQNGYDIYNSTVPPGPFTINDIYAAGNSGDLQVTIKEADGSTQIFTVPYSSVPLLQREGHTRYSITAGEYRSGNAQQEKPRFFQSTLLHGLPAGWTIYGGTQLADRYRAFNFGIGKNMGALGALSVDMTQANSTLPDDSQHDGQSVRFLYNKSLNESGTNIQLVGYRYSTSGYFNFADTTYSRMNGYNIETQDGVIQVKPKFTDYYNLAYNKRGKLQLTVTQQLGRSSTLYLSGSHQTYWGTSNVDEQFQAGLNTAFEDINWTLSYSLTKNAWQKGRDQMLALNVNIPFSHWLRSDSKSQWRHASASYSMSHDLNGRMTNLAGVYGTLLEDNNLSYSVQTGYAGGGDGNSGSTGYATLNYRGGYGNANIGYSHSDDIKQLYYGVSGGVLAHANGVTLGQP

SEQ ID NO: 3799 - protein, 424 aa, Escherichia coli
MTTSNWVQYEHTRNSRIPEGLAGGTEGKFNEKAAQDFVDIDLDDVMLHSEVNLPIDFLVNQTLTLGTEWNQQRMKDLSSNTQALTGTNTGGAIDGVSATDRSPYSKAEIFSLFAENNMELTDSTIVTPGLRFDHHSIVGNNWSPALNISQGLGDDFTLKMGIARAYKAPSLYQTNPNYILYSKGQGCYASAGGCYLQGNDDLKAETSINKEIGLEFKRDGWLAGVTWFRNDYRNKIEAGYVAVGQNAVGTDLYQWDNVPKAVVEGLEGSLNVPVSETVMWTNNITYMLKSENKTTGDRLSIIPEYTLNSTLSWQAREDLSMQTTFTWYGKQQPKKYNYKGQPAVGPETKEISPYSIVGLSATWDVTKNVSLTGGVDNLFDKRLWRAGNAQTTGDLAGANYIAGAGAYTYNEPGRTWYMSINTHF

SEQ ID NO: 3800 - protein, 518 aa, Escherichia coli; identical to SEQ ID NO: 2350

SEQ ID NO: 3801 - protein, 747 aa, Escherichia coli; identical to SEQ ID NO: 2072

SEQ ID NO: 3802 - protein, 243 aa, Escherichia coli; identical to SEQ ID NO: 2910

SEQ ID NO: 3803 - protein, 203 aa, Escherichia coli
MKKIAITCALLSSLVASSVWADAASDLKSRLDKVSSFHASFTQKVTDGSGAAVQEGQGDLWVKRPNLFNWHMTQPDESILVSDGKTLWFYNPFVEQATATWLKDATGNTPFMLIARNQSSDWQQYNIKQNGDDFVLTPKASNGNLKQFTINVGRDGTIHQFSAVEQDDQRSSYQLKSQQNGAVDATKFPFPPPQGVTVDDQRK

SEQ ID NO: 3804 - protein, 362 aa, Escherichia coli
MMKRNILAVIVPALLVAGTANAAEIYNKDGNKVDLYGKAVGLHYFSKGNGENSYGGNGDMTYARLGFKGETQINSDLTGYGQWEYNFQGNNSEGADAQTGNKTRLAFAGLKYADVGSFDYGRNYGRVYDALGYTDMLPEFGGDTAYSDDFFVGRVGGVATYRNSNFFGLVDGLSFAVQYLGKNERDTARRSNGDGVGGSISYEYEGFGIVGAYGAADRTNLQEESSLGKGKKAEQWATGLKYDANNIYLAANYGETRNATPITNKFTNTSGFANKTQDVLLVAQYQFDFGLRPSIAYTKSKAKDVEGIGDVDLVNYFEVGATYYFNKNMSTYVDYIINQIDSDNKLGVGSDDTVAVGIVYQF

SEQ ID NO: 3805 - protein, 232 aa, Escherichia coli; identical to SEQ ID NO: 2087

SEQ ID NO: 3806 - protein, 686 aa, Escherichia coli
MFWRDMTLSIWRKKTTGLKTKKRLLPLMLAAALCSSPVWAEEATFTANFKDTDLKSFIETVGANLNKTIIMGPGVQGKVSIRTMTPLNERQYYQLFLNLLEAQGYAVVPMENDVLKVVKSSAAKVEPLPLVGEGSDNYAGDEMVTKVVPVRNVSVRELAPILRQMIDSAGSGNVVNYDPSNVIMLTGRASVVERLTEVIQRVDHAGNRTEEVIPLDNASASEIARVLESLTKNSGENQPATLKSQIVADERTNSVIVSGDPATRDKMRRLIRRLDSEMERSGNSQVFYLKYSKAEDLVDVLKQVSGTLTAAKEEAEGTVGSGREVVSIAASKHSNALIVTAPQDIMQSLQSVIEQLDIRRAQVHVEALIVEVAEGSNINFGVQWGSKDAGLMQFANGTQIPIGTLGAAISAAKPQKGSTVISENGATTINPDTNGDLSTLAQLLSGFSGTAVGVVKGDWMALVQAVKNDSSSNVLSTPSITTLDNQEAFFMVGQDVPVLTGSTVGSNNSNPFNTVERKKVGIMLKVTPQINEGNAVQMVIEQEVSKVEGQTSLDVVFGERKLKTTVLANDGELIVLGGLMDDQAGESVAKVPLLGDIPVIGNLFKSTADKKEKRNLMVFIRPTILRDGMAADGVSQRKYNYMRAEQIYRDEQGLSLMPHTAQPILPAQNQALPPEVRAFLNAGRTR

SEQ ID NO: 3807 - protein, 280 aa, Escherichia coli
MKSPLITTGMICLLGICNFAQATVSPDRTRIIFNASNKSATVRLTNQSKIDPYLAQSWIEDASGKKTRDYISTLPPMERIEPDEQIQIRLMALASLNDLPQDRETLFYYNVREIPPRAKEQNVMQIAMQSRLKLFWRPKAIELKEGEMIPLQKVTITRTAAGLTLNNPTPYHITVGYIGTNGKTLMPGADSIMVVPFTSATQHLSSLPSTFQLGFVADYGGLEMFKVECNSIQSLCQSSPAKKGKIWLRFFVYWRFFACFLTFQLLLLIAIRMGTEEQPS

SEQ ID NO: 3808 - protein, 565 aa, Escherichia coli; identical to SEQ ID NO: 2664

SEQ ID NO: 3809 - protein, 678 aa, Escherichia coli; identical to SEQ ID NO: 2230

SEQ ID NO: 3810 - protein, 386 aa, Escherichia coli
MVDDVPVAQVLQVLAEQEKLNLVVSPDVSGTVSLHLTDVPWKQALQTVVKSAGLITRQEGNILSVHSVAWQNDNIARQEAEQTRAQANLPLENRNITLQYADAGELAKAGEKLLSAKGSMTVDKRTNRLLLRDNKTALSTLEQWVSQMDLPVGQVELSAHIVTINEKSLRELGVKWTLADAQQAGGVGQVTTLGSDLSVATATTHIGFNIGRINGRLLDLELSALEQKQQLDIIASPRLLASHLQPASIKQGSEIPYQVSSGESGATSVEFKEAVLGMEVTPTVLQKGRIRLKLHISQNVPGQVLQQADGEVLAIDKQEIETQVEVKSGETLALGGIFTRKNKSGQDSVPLLGDIPWFGQLFRHDGKEDERRELVVFITPRLVSSE

SEQ ID NO: 3811 - protein, 250 aa, Escherichia coli
MKCIIGNKKWVCGFRDELKVSQNIIRSGILFLLSILFINNASAGGFGLGVTRLIYPAESKQITLSVQNSGDNTSYLIQSWVDDSKTEKKSQDFVITPPLFMLPTRKEASLRIMFLGKTNLPTDRETLYWMNVKAIPPTDEKNTQKNTLQLALQNKIKLFYRPENLPVQPGKARNMLRFKYEGKQLKVINPSPYYLTLTGIKVQGSKLPNMFVPPKSDITVSSPVTLAGEITYQTINDFGATTERQKGIMQ

SEQ ID NO: 3812 - protein, 118 aa, Escherichia coli [sequence omitted]

SEQ ID NO: 3813 - protein, 208 aa, Escherichia coli
MKKIWLALAGLVLAFSASAAQYEDGKQYTTLEKPVAGAPQVLEFFSFFCPHCYQFEEVLHISDNVKKKLPEGVKMTKYHVNFMGGDLGKELTQAWAVAMALGVEDKVTVPLFEGVQKTQTIRSASDIRDVFINAGIKGEEYDAAWNSFVVKSLVAQQEKAAADVQLRGVPAMFVNGKYQLNPQGMDTSTMDVFVQQYADTVKYLSEKK

SEQ ID NO: 3814 - protein, 193 aa, Escherichia coli
MRYLATLLLSLAVLITAGCGWHLRDTTQVPSTMKVMILDSSDPNGPLSRAVRNQLRLNGVELLDKETTRKDVPSLRLGKVSIAKDTASVFRNGQTAEYQMIMTVNATVLIPGRDIYPISAKVFRSFFDNPQMALAKDNEQDMIVKEMYDRAAEQLIRKLPSIRAADIRSDKEQTSTTTDTPATPARVSTTLGN

SEQ ID NO: 3815 - protein, 125 aa, Escherichia coli; identical to SEQ ID NO: 3090

SEQ ID NO: 3816 - protein, 203 aa, Escherichia coli; identical to SEQ ID NO: 2009

SEQ ID NO: 3817 - protein, 682 aa, Escherichia coli
MKNKYIIAPGIAVMCSAVISSGYASSDKKEDTLVVTASGFTQQLRNAPASVSVITSEQLQKKPVSDLVDAVKDVEGISITGGNEKPDISIRGLSGDYTLILVDGRRQSGRESRPNGSGGFEAGFIPPVEAIERIEVIRGPMSSLYGSDAIGGVINIITKPVNNQTWDGVLGLGGIIQEHGKFGNSTTNDFYLSGPLIKDKLGLQLYGGMNYRKEDSISQGTPAKDNKNITATLQFTPTESQKFVFEYGKNNQVHTLTPGESLDAWTMRGNLKQPNSKRETHNSRSHWVAAWNAQGEILHPEIAVYQEKVIREVKSGKKDKYNHWDLNYESRKPEITNTIIDAKVTAFLPENVLTIGGQFQHAELRDDSATGKKTTETQSVSIKQKAVFIENEYAATDSLALTGGLRLDNHEIYGSYWNPRLYAVYNLTDNLTLKGGIAKAFRAPSIREVSPGFGTLTQGGASIMYGNRDLKPETSVTEEIGIIYSNDSGFSASATLFNTDFKNKLTSYDIGTKDPVTGLNTFIYDNVGEANIRGVELATQIPVYDKWHVSANYTFTDSRRKSDDESLNGKSLKGEPLERTPRHAANAKLEWDYTQDITFYSSLNYTGKQIWAAQRNGAKVPRVRNGFTSMDIGLNYLILPDTLINFAVLNVTDRKSEDIDTIDGNWQVDEGRRYWANVRVSF

SEQ ID NO: 3818 - protein, 405 aa, Escherichia coli
MTERELSIIRALGEEFSTVLADLQRTFEGKMASQAQAFEEKLTSLSAVLQKHVTVDEVRPVLQAMVDDAVGAIPVPRDGRDYDPDVLQQAVNDAVANIPQPADGKSLTPDDVRPMLEQMVKEAVSHIPVPRDGRDYDPEVLKQAVNDAVANIPQPADGKSITPDDVRPMLEQMVKEAVSHIPVPRDGRDYDPEVLQKAVNDAVANIPQPADGKSLTPDDVRPMLEQMVKEAVSHIPVPRDGRDYDPDVLQKAVLDAVSALPAPQDGRDATALEILPAIDDQKSFPRGTYATHQGGLWRAYEKTHGMRGWECLVDGVADIDVSMTGERLFSVVVRQSSGQRTEKTFSLPVMLYRGVFRAGETYHPGDTVTWGGSLWHCNSMTEDKPGEAHSSAWTLAAKRGRDAGG

SEQ ID NO: 3819 - protein, 250 aa, Escherichia coli; identical to SEQ ID NO: 3427

SEQ ID NO: 3820 - protein, 518 aa, Escherichia coli; identical to SEQ ID NO: 2349

SEQ ID NO: 3821 - protein, 236 aa, Escherichia coli
MQTTRTPYSVSFMATVLLLLLFACHSTIANAAVALGATRVIYPANQKQVLLPVTNNDPASVYLIQSWIENAGDQKDTQFVITPPLFSMQGKKENTLRIINATNHQLPGDRESLFWVNVKAIPAMEKDQKNENTLQLAIISRIKMFYRPTHLAMAPEEAPAMLRFRRSGSKLTLINPTPYFITVTNMKAGNSNLPNTMVPPKGEVSVDIPHAVTGDISFQTINDYGALTPRIKATMQ

SEQ ID NO: 3822 - protein, 784 aa, Escherichia coli
MKKRIPTLLATMIATALYSQQGLAADLASQCMLGVPSYDRPLVQGDTNDLPVTINADHAKGDYPDDAVFTGSVDIMQGNSRLQADEVQLHQKEAPGQPEPVRTVDALGNVHYDDNQVILKGPKGWANLNTKDTNVWEGDYQMVGRQGRGKADLMKQRGENRYTILDNGSFTSCLPGSDTWSVVGSEIIHDREEQVAEIWNARFKVGPVPIFYSPYLQLPVGDKRRSGFLIPNAKYTTTNYFEFYLPYYRNIAPNMDATITPHYMHRRGNIMWENEFRYLSQAGAGLMELDYLPSDKVYEDEHPNDDSSRRWLFYWNHSGVMDQVWRFNVDYTKVSDPSYFNDFDNKYGSSTDGYATQKFSVGYAVQNFNATVSTKQFQVFSEQNTSSYSAEPQLDVNYYQNDVGPFDTRIYGQAVHFVNTRDDMPEATRVHLEPTINLPLSNNWGSINTEAKLLATHYQQTNLDWYNSRNTTKLDESVNRVMPQFKVDGKMVFERDMEMLAPGYTQTLEPRAQYLYVPYRDQSDIYNYDSSLLQSDYSGLFRDRTYGGLDRIASANQVTTGVTSRIYDDAAVERFNISVGQIYYFTESRTGDDNITWENDDKTGSLVWAGDTYWRISERWGLRGGIQYDTRLDNVATSNSSIEYRRDEDRLVQLNYRYASPEYIQATLPKYYSTAEQYKNGISQVGAVASWPIADRWSIVGAYYYDTNANKQADSMLGVQYSSCCYAIRVGYERKLNGWDNDKQHAVYDNAIGFNIELRGLSSNYGLGTQEMLRSNILPYQNTL

SEQ ID NO: 3823 - protein, 669 aa, Escherichia coli; identical to SEQ ID NO: 3677

SEQ ID NO: 3824 - protein, 200 aa, Escherichia coli; identical to SEQ ID NO: 1784

SEQ ID NO: 3825 - protein, 430 aa, Escherichia coli; identical to SEQ ID NO: 2617

SEQ ID NO: 3826 - protein, 446 aa, Escherichia coli; identical to SEQ ID NO: 2177

SEQ ID NO: 3827 - protein, 274 aa, Escherichia coli; identical to SEQ ID NO: 2301

SEQ ID NO: 3828 - protein, 289 aa, Escherichia coli
MATWHLTDRFDIGGGVRFSHDKSGTQYHGSILGNPFGDQGKSNDDQALGQLSAGYMLTDDWRVYTRVAQGYKPSGYNIVPTAGLDAKPFVAEKSINYELGTRYETADVTLQAATFYTHTKDMQLYSGPVGMQTLSNAGKADATGVELEAKWRFAPGWSWDINGNVIRSEFTNDSELYHGNRVPFVPRYGAGSSVNGVIDTRYGALMPRLAVNLVGPHYFDGDNQLRQGTYATLDSSLGWQATERMNISVYVDNLFDRRYRTYGYMNGSSAVAQVNMGRTVGINTRIDFF

SEQ ID NO: 3829 - protein, 614 aa, Escherichia coli
MIKKASLLTACSVTAFSAWAQDTSPDTLVVTANRFEQPRSTVLAPTTVVTRQDIDRWQSTSVNDVLRRLPGVDITQNGGSGQLSSIFIRGTNASHVLVLIDGVRLNLAGVSGSADLSQFPIALVQRVEYIRGPRSAVYGSDAIGGVVNIITTRDHPGTEISAGWGSNSYQNYDVSTQQQLGDKTRVTLLGDYAHTHGYDVVAYGNTGTQAQPDNDGFLSKTLYGALEHNFTDVWSGFVRGYGYDNRTNYDAYYSPGLPLVDTRKLYSQSWDAGLRYNGELIKSQLITSYSHSKDYNYDPHYGRYDSSATLDDMKQYTVQWANNIIIGHGNIGAGVDWQKQSTAPGTAYVEDGYDQRNTGIYLTGLQQVGDFTFEGAGRSDDNSQFGRHGTWQTSAGWEFIEGYRFIASYGTSYKAPNLGQLYGTYGNPNLNPEKSKQWEGAFEGLTAGVNWRISGYRNDVSDLIDYDDHTLKYYNEGKARIKGVEATANFDTGPLTHTVSYDYVDARNAITDTPLLRRAKQQVKYQLDWQLYDFDWGITYQYLGTRYDKDYSSYPYQTVKMGGVSLWDLAVAYPVTSHLTVRGKIANLFDKDYETVYGYQTAGREYTLSGSYTF

SEQ ID NO: 3830 - protein, 236 aa, Escherichia coli; identical to SEQ ID NO: 3286

SEQ ID NO: 3831 - protein, 760 aa, Escherichia coli
MENNRNFPARQFHSLTFFAGLCIGITPVAQALAAEGQTNADDTLVVEASTPSLYAPQQSADPKFSRPVADTTRTMTVISEQVIKDQGATNLTDALKNVPGVGAFFAGENGNSTTGDAIYMRGADTSNSIYIDGIRDIGSVSRDTFNTEQVEVIKGPSGTDYGRSAPTGSINMISKQPRNDSGIDASASIGSAWFRRGTLDVNQVIGDTTAVRLNVMGEKTHDAGRDKVKNERYGVAPSIAFGLGTANRLYLNYLHVTQHNTPDGGIPTIGLPGYSAPSAGTAALNHSGKVDTHNFYGTDSDYDDSTTDTATMRFEHDINDNTTIRNTTRWSRVKQDYLMTAIMGGASNITQPTSDVNSWTWSRTANTKDVSNKILTNQTNLTSTFYTGSIGHDVSTGVEFTRETQTNYGVNPVTLPAVNIYHPDSSIHPGGLTRNGVNANGQTDTFAIYAFDTLQITRDFELNGGIRLDNYHTEYDSATACGGSGRGAITCPTGVAKGSPVTTVDTAKSGNLVNWKAGALYHLTENGNVYINYAVSQQPPGGNNFALAQSGSGNSANRTDFKPQKANTSEIGTKWQVLDKRLLLTAALFRTDIENEVEQNDDGTYSQYGKKRVEGYEISVAGNITPAWQVIGGYTQQKATIKNGKDVAQDGSSSLPYTPEHAFTLWSQYQATDDISVGAGARYIGSMHKGSDGAVGTPAFTEGYWVADAKLGYRVNRNLDFQLNVYNLFDTDYVASINKSGYRYHPGEPRTFLLTANMHF

SEQ ID NO: 3832 - protein, 438 aa, Escherichia coli
MKRLRRRTRRRWSNWRPRPRKLWRARKRRRVVRRRRRQRRRMPGGQREIRVSRDLRGYRARQARQEQPDPRGHGVNVVNRGYRGQLVQPDRRGREESRVFRGRQVRLVPVVKPVPEEKKGDPGGPPGPKGDTGAKGDTGPAGPAGEKGEPGERGPQGLQGPPGPAGERGPTGEAGPAGQPGHKGDPGPAGPQGPAGERGPQGPQGVAGPVGPAGEPGAKGDKGDPGPAGPQGQPGPQGPAGETGPAGEPGPRGEPGPQGLKGDRGEPGPTGPQGPAGERGPQGPQGVAGPVGPAGEPGAKGDKGDPGGTELLASANTWTQPQTINGDLTVTGNGSFNDVQIRSDKRNKRNLVKLDNALDRLEALTGYLYEIQYSADGWQMSVGLIAQDAQKALPELVTEDDDMISGEKRLRLNYNGIIALLVEGFKALRHEIKELREK

SEQ ID NO: 3833 - protein, 111 aa, Escherichia coli; identical to SEQ ID NO: 3096

SEQ ID NO: 3834 - protein, 368 aa, Escherichia coli; identical to SEQ ID NO: 2371

SEQ ID NO: 3835 - protein, 228 aa, Escherichia coli; identical to SEQ ID NO: 3034

SEQ ID NO: 3836 - protein, 351 aa, Escherichia coli
MKKSTLALVVMGIVASVSVQAAEIYNKDGNKLDVYGKVKAMHYMSDNDSKDGDQSYIRFGFKGETQINVQLTGYGRWEAEFAGNKAESDTAQQKTRLAFAGLKYKDLGSFDYGRNLGALYDVEAWTDMFPEFGGDSSAQTDNFMTKRASGLATYRNTDFFGVIDGLNLTLQYQGKNENRDVKKQNGDGFGTSLTYDFGGSDFAISGAYTNSDRTNEQNLQSRGTGKRAEAWATGLKYDANNIYLATFYSETRKMTPISGGFANKTQNFEAVAQYQFDFGLRPSLGYVLSKGKDIEGIGDEDLVNYVDVGATYYFNKNMSAFVDYKINQLDSDNKLNINNDDIVAVGMTYHF

SEQ ID NO: 3837 - protein, 213 aa, Escherichia coli; identical to SEQ ID NO: 2232

SEQ ID NO: 3838 - protein, 246 aa, Escherichia coli
MFFNTKHTAALCLASCMAFSSSAIADIVISGTRVVYKSEQKSVNVRLENKGNNPLLVQSWLDTGDDNAEPGSITVPFTATPPVSRIDAKRGQTIKLMYTASSALPKDRESVFWFNVLEVPPKPDAAKAANQSLLQLAFRTRIKLFYRPEGLSGISSDAPLALKWSWATSEGKAALRVDNPTPYYVSFSSGDLEANGKRYPLDMTMIAPFSNDVIKVNGMSGRTSSAKVHFFAINDFGGSIEGNANL

SEQ ID NO: 3839 - protein, 363 aa, Escherichia coli
MKVKVLSLLVPALLVAGAANAAEVYNKDGNKLDLYGKVDGLHYFSDDKSVDGDQTYMRLGFKGETQVTDQLTGYGQWEYQIQGNSAENENNSWTRVAFAGLKFQDVGSFDYGRNYGVVYDVTSWTDVLPEFGGDTYGSDNFMQQRGNGFATYRNTDFFGLVDGLNFAVQYQGKNGSVSGEGMTNNGRGALRQNGDGVGGSITYDYEGFGIGGAISSSKRTDDQNSPLYIGNGDRAETYTGGLKYDANNIYLAAQYTQTYNATRVGSLGWANKAQNFEAVAQYQFDFGLRPSLAYLQSKGKNLGRGYDDEDILKYVDVGATYYFNKNMSTYVDYKINLLDDNQFTRDAGINTDNIVALGLVYQF

SEQ ID NO: 3840 - protein, 429 aa, Escherichia coli
MTLKDFSKFVKDEIGFSYNGYYRSGWGTASHGSPKSWAIGSLGRFGNEYSGWFDLQLKQRVYNENGKRVDAIVMMDGNVGQQYSTGWFGDNAGGENFMQFSDMYVTTKGFLPFAPEADFWVGKHGAPKIEIQMLDWKTQRTDAAAGVGLENWKVGPGKIDIALVREDVDDYDRSLQNKQQINTNTIDLRYKDIPLWDKVTLMVSGRYVTANESASEKDNQDNNGYYDWKDTWMFGTSLTQKFDKGGFNEFSFLVANNSIASNFGRYAGASPFTTFNGRYYGYHTGGTAVRLTSQGEAYIGDHFIVANAIVYSFGNDIYSYETGAHSDFESIRAVVRPAYIWDQYNQTGVELGYFTQQNKDANSNKFNESGYKTTLFHTFKVNTSMLTSRPEIRFYATYIKALENELDGFTFEDNKDDQFAVGAQAEIWW

SEQ ID NO: 3841 - protein, 239 aa, Escherichia coli; identical to SEQ ID NO: 2496

SEQ ID NO: 3842 - protein, 162 aa, Escherichia coli; identical to SEQ ID NO: 1967

SEQ ID NO: 3843 - protein, 118 aa, Escherichia coli [sequence omitted]

SEQ ID NO: 3844 - protein, 216 aa, Escherichia coli; identical to SEQ ID NO: 3112

SEQ ID NO: 3845 - protein, 539 aa, Escherichia coli
MAAVCGTSGIASLFSQAAFAADSDIADGQTQRFDFSILQSMAHDLAQTAWRGAPRPLPDTLATMTPQAYNSIQYDAEKSLWHNVENRQLDAQFFHMGMGFRRRVRMFSVDPATHLAREIHFRPELFKYNDAGVDTKQLEGQSDLGFAGFRVFKAPELARRDVVSFLGASYFRAVDDTYQYGLSARGLAIDTYTDSKEEFPDFTAFWFDTVKPGATTFTVYALLDSASITGAYKFTIHCEKNQVIMDVENHLYARKDIKQLGIAPMTSMFSCGTNERRMCDTIHPQIHDSDRLSMWRGNGEWICRPLNNPQKLQFNAYTDNNPKGFGLLQLDRDFSHYQDIMGWYNKRPSLWVEPRNKWGKGTIGLMEIPTTGETLDNIVCFWQPEKAVKAGDEFAFQYRLYWSAQPPVHCPLARVMATRTGMGGFPEGWAPGEHYPEKWARRFAVDFVGGDLKAAAPKGIEPVITLSSGEAKQIEILYIEPIDGYRIQFDWYPTSDSTDPVDMRMYLRCQGDAISETWLYQYFPPAPDKRQYVDDRVMS

SEQ ID NO: 3846 - protein, 328 aa, Escherichia coli
MKKYLALALIAPLLISCSTTKKGDTYNEAWVKDTNGFDILMGQFAHNIENIWGFKEVVIAGPKDYVKYTDQYQTRSHINFDDGTITIETIAGTEPAAHLRRAIIKTLLMGDDPSSVDLYSDVDDITISKEPFLYGQVVDNTGQPIRWEGRASNFADYLLKNRLKSRSNGLRIIYSVTINMVPNHLDKRAHKYLGMVRQASRKYGVDESLILAIMQTESSFNPYAVSRSDALGLMQVVQHTAGKDVFRSQGKSGTPSRSFLFDPASNIDTGTAYLAMLNNVYLGGIDNPTSRRYAVITAYNGGGITAAQAACCESFRMIRFRLPILLTP

SEQ ID NO: 3847 - protein, 259 aa, Escherichia coli
MRQYRLLSPMIKVVIVLFSLLFSTAQAGLVIGGTRFAYPENQSSISVELKNTSDRDMLVKVAVSPDDARQLTGTVESLPSYSETVFIATPPLFVLKPDKNTKIRINRVGGSLSADRESLFILNVAALPTLENSHSVKTDNQLQIAVRNRMKIFYRPSNLSEDPNMSYQKLRWARKNEIVTVYNPGPRYVTLYNLHVDGKVIDGGMVAPFSHRQQSWCKSQGVCEIAWQTLDVYNNVLPAWKVKMNLLQMDVSGLQVKTD

SEQ ID NO: 3848 - protein, 432 aa, Escherichia coli; identical to SEQ ID NO: 2026

SEQ ID NO: 3849 - protein, 711 aa, Escherichia coli
MFTPSFSGLKGRALFSLLFAAPMIHATDSVTTKDGETITVTADANTATEATDGYQPLSTSTATLTDMPMLDIPQVVNTVSDQVLENQNATTLDEALYNVSNVVQTNTLGGTQDAFVRRGFGANRDGSIMTNGLRTVLPRSFNAATERVEVLKGPASTLYGILDPGGLINVVTKRPEKTFHGSVSATSSSFGGGTGQLDITGPIEGTQLAYRLTGEVQDEDYWRNFGKERSTFIAPSLTWFGDNATVTMLYSHRDYKTPFDRGTIFDLTTKQPVNVDRKIRFDEPFNITDGQSDLAQLNAEYHLNSQWTARFDYSYSQDKYSDNQARVTAYDATTGTLTRRVDATQGSTQRMHATRADLQGNVDIAGFYNEILGGVSYEYYDLLRTDMIRCKKAKDFNIYNPVYGNTSKCTTVSASDSDQTIKQENYSAYAQDALYLTDNWIAVAGIRYQYYTQYAGKGRPFNVNTDSRDEQWTPKLGLVYKLTPSVSLFANYSQTFMPQSSIASYIGDLPPESSNAYEVGAKFELFDGITADIALFDIHKRNVLYTESIGDETIAKTAGRVRSRGVEVDLAGALTENINIIASYGYTDAKVLEDPDYAGKPLPNVPRHTGSLFLTYDIHNMPGNNTLTFGGGGHGVSRRSATNGADYYLPGYFVADAFAAYKMKLQYPVTLQLNVKNLFDKTYYTSSIATNNLGNQIGDPREVQFTVKMEF

SEQ ID NO: 3850 - protein, 191 aa, Escherichia coli; identical to SEQ ID NO: 2727

SEQ ID NO: 3851 - protein, 656 aa, Escherichia coli
MRLKKRYLCTVLTLAFTQQAVAAQESDTLTVWSSPVSSTTTTVLDQPTMKALDKQNVAQALSVVPGVVLQKSGSRNEEQVKVRGFDSRQVPVYFDGVPIYVPYDGNLDLARILTNNLGAVEVSKGYSSLLQGPNQMGGAINITTQKPTKPLEASLGYRQGWSRSQDNAYDMHASFAASSDLGYLQVSGSQLKQDFLGLPHGVNNDIAGKHGKMINSSADDKRGIVKLGFTPRENDEYTLTYIKQDGEKDNPPYSGNSGQKSRYWQWPEYDKESFYYQGTTQLNDRFTLKSRLYRDTFENTLMMYNSLADLKNKKGSYSHYSDYSDGAGLQLAADVRENDLLSFAVNWKDDVHREKGAPHAAYDRYEDRTWSLASEYQWAAADNVDVVAGISYDWRDSVEAKKHEKDGSITHYDDNNQSAFNWQVMGKYHFANEDTLALSYYDRTRFPTLKERYTTSKPAYNQIAIVNPQLKPERARGVDLTWNGAFTHDWGFEVSVYYNRVSDAILSHNIDADTIQNQNSGTVDYSGLDAGIKGKISNILDVGFCYALIHADAKRKDIGKITDLPTQTMTAWMTLKPWEPLSVTLSEEARSSSYSNSDGSQKAAGFAVTHIRADYTLGHGFSVNASVNNLFDTKYAYSEGFIEEGRNFWAGIEYTF

SEQ ID NO: 3852 - protein, 660 aa, Escherichia coli
MSRPQFTSLRLSLLALAVSATLPTFAFATETMTVTATGNARSSFEAPMMVSVIDTSAPENQTATSATDLLRHVPGITLDGTGRTNGQDVNMRGYDHRGVLVLVDGVRQGTDTGHLNGTFLDPALIKRVEIVRGPSALLYGSGALGGVISYDTVDAKDLLQEGQSSGFRVFGTGGTGDHSLGLGASAFGRTENLDGIVAWSSRDRGDLRQSNGETAPNDESINNMLAKGTWQIDSAQSLSGLVRYYNNDAREPKNPQTVEASDSSNPMVDRSTIQRDAQLSYKLAPQGNDWLNADAKIYWSEVRINAQNTGSSGEYREQITKGARLENRSTLFADSFASHLLTYGGEYYRQEQHPGGATTGFPQAKIDFSSGWLQDEITLRDLPITLLGGTRYDSYRGSSDGYKDVDADKWSSRAGMTINPTNWLMLFGSYAQAFRAPTMGEMYNDSKHFSIGRFYTNYWVPNPNLRPETNETQEYGFGLRFDDLMLSNDALEFKASYFDTKAKDYISTPVDFAAATTMSYNVPNAKIWGWDVMTKYTTDLFSLDVAYNRTRGKDTDTGEYISSINPDTVTSTLNIPIAHSGFSVGWVGTFADRSTHISSSYSKQPGYGVNDFYVSYQGQQALKGVTTTLVLGNAFDKEYWSPQGIPQDGRNGKIFVSYQW

SEQ ID NO: 3853 - protein, 729 aa, Escherichia coli
MLSTQFNRDNQHQAIIKPSLLAGCIALALLPSAAFAAPVTEETVIVEGSATAPDDGENDYNVTSTSAGTKMQMTQRDIPQSVTIVSQQRMEDQQLQTLGEVMENTLGISKSQADSDRALYYSRGFQIDNYMVDGIPTYFESRWNLGDALSDMALFERVEVVRGATGLMTGTGNPSAAINMVRKHATSREFKGDVSAEYGSWNKERYVADLQSPLTEDGKIRARIVGGYQNNDSWLDRYNSEKTFFSGIVDADLGDLTMLSAGYEYQRIDVNSPTWGGLPRWNTDGSSNSYDRARSTAPDWAYNDKEINKVFMTLKQRFADTWQATLNATHSEVEFDSKMMYVDAYVNKADGMLVGPYSNYGPGFDYVGGTGWNSGKRKVDALDLFADGSYELFGRQHNLMFGGSYSKQNNRYFSSWANIFPDEIGSFYNFNGNFPKTDWSPQSLAQDDTTHMKSLYAATRVTLADPLHLILGARYTNWRVDTLTYSMEKNHTTPYAGLVFDINDNWSTYASYTSIFQPQNDRDSSGKYLTPITGNNYELGLKSDWMNSRLTTTLAIFRIEQDNVAQSTGTPIPGSNGETAYKAVDGTVSKGVEFELNGAITDNWQLTFGATRYIAEDNEGNAVNPNLPRTTVKMFTSYRLPVMPELTVGGGVNWQNRVYTDTVTPYGTFRAEQGSYALVDLFTRYQVTKNFSLQGNVNNLFDKTYDTNVEGSIVYGAPRNFSITGTYQF

SEQ ID NO: 3854 - protein, 654 aa, Escherichia coli
MDSAMKGLNKITCCLLAALLMPCAGHAENEQYGANFNNADIRQFVEIVGQHLGKTILIDPSVQGTISVRSNDTFSQQEYYQFFLSILDLYGYSVITLDNGFLKVVRSANVKTSPGMIADSSRPGVGDELVTRIVPLENVPARDLAPLLRQMMDAGSVGNVVHYEPSNVLILTGRASTINKLIEVIKRVDVIGTEKQQIIHLEYASAEDLAEILNQLISESHGKSQMPALLSAKIVADKRTNSLIISGPEKARQRITSLLKSLDVEESEEGNTRVYYLKYAKATNLVEVLTGVSEKLKDEKGNSRKPSSTSAMDNVAITADEQTNSLVITADQSVQEKLATVIARLDIRRAQVLVEAIIVEVQDGNGLNLGVQWANKNVGAQQFTNTGLPVFNAAQGVADYKKNGGITSANPAWDMFSAYNGMAAGFFNGDWGVLLTALASNNKNDILATPSIVTLDNKLASFNVGQDVPVLSGSQTTSGDNVFNTVERKTVGTKLKVTPQVNEGDAVLLEIEQEVSSVDSSSNSTLGPTFNTRTIQNAVLVKTGETVVLGGLLDDFSKEQVSKVPLLGDIPLVGQLFRYTSTERAKRNLMVFIRPTIIRDDDVYRSLSKEKYTRYRQEQQLRIDGKSKALIGSEDLPVLDENTFNSHAPAPSSR

SEQ ID NO: 3855 - protein, 250 aa, Escherichia coli
MSYKLSCPMLVSTALMALLTTASLTAHASVTPDRTRLVFNESDKSISVTLRNNTEKLPYLAQSWLEDEKGNKITSPLAVLPPVQRIDAMMNGQVKIQALPDIHTLPSDRESLFYYNVREIPPKSGKANTLQIALQTRIKLFWRPKALEKIDMRRPWQFKVTLTRSGQDYTVNNPTPYHVIISDASTQKKGLTAAGFKPLVMPPKTSQPLKAKMASAPVLTYINDYGARMPLIFRCEGNTCKVDEDQSSKG

SEQ ID NO: 3856 - protein, 203 aa, Escherichia coli; identical to SEQ ID NO: 2008

SEQ ID NO: 3857 - protein, 747 aa, Escherichia coli
MAPSKTAQPKHSLRKIAVVVATAVSGMSVYAQAAVEPKEDTITVTAAPAPQESAWGPAATIAARQSATGTKTDTPIQKVPQSISVVTAEEMALHQPKSVKEALSYTPGVSVGTRGASNTYDHLIIRGFAAEGQSQNNYLNGLKLQGNFYNDAVIDPYMLERAEIMRGPVSVLYGKSSPGGLLNMVSKRPTTEPLKEVQFKAGTDSLFQTGFDFSDALDDDGVYSYRLTGLARSANAQQKGSEEQRYAIAPAFTWRPDDKTNFTFLSYFQNEPETGYYGWLPKEGTVEPLPNGKRLPTDFNEGAKNNTYSRNEKMVGYSFDHEFNDTFTVRQNLRFAENKTSQNSVYGYGVCSDPANAYSKQCAALAPADKGHYLARKYVVDDEKLQNFSVDTQLQSKFATGDIDHTLLTGVDFMRMRNDINAWFGYDDSVPLLDLYNPVNTDFDFNAKDPDNSGPYRILNKQKQTGVYVQDQAQWDKVLVTLGGRYDWADQESLNRVAGTTDKRDDKQFTWRGGVNYLFDNGVTPYFSYSESFEPSSQVGKDGNIFAPSKGKQYEVGVKYVPEDRPIVVTGAVYNLTKTNNLMADPEGSFFSVEGGEIRARGVEIEAKAALSASVNVVGSYTYTDAEYTTDTTYKGNTPAQVPKHMASLWADYTFFDGPLSGLTLGTGGRYTGSSYGDPANSFKVGSYTVVDALVRYDLARVGMAGSNVALHVNNLFDREYVASCFNTYGCFWGAERQVVATATFRF

SEQ ID NO: 3858 - protein, 200 aa, Escherichia coli; identical to SEQ ID NO: 1785

SEQ ID NO: 3859 - protein, 478 aa, Escherichia coli; identical to SEQ ID NO: 2405

SEQ ID NO: 3860 - protein, 193 aa, Escherichia coli; identical to SEQ ID NO: 2246

SEQ ID NO: 3861 - protein, 331 aa, Escherichia coli
MKKPVVIGLAVVVLAAVVAGGYWWYQTRQDNGLTLYGNVDIRTVNLSFRVGGRVESLAVDEGDAIKAGQVLGELDHKPYEIALMQAKAGVSVAQAQYDLMLAGYRDEEIAQAAAAVKQAQAAYDYAQNFYNRQQGLWKSRTISANDLENARSSRDQAQATLKSAQDKLRQYRSGNREQDIAQAKASLEQAQAQLAQAELNLQDSTLIAPSDGTLLTRAVEPGTVLNEGGTVFTVSLTRPVWVRAYVDERNLDQAQPGRKVLLYTDGRPNKPYHGQIGFVSPTAEFTPKTVETPDLRTDLVYRLRIVVTDADDALRQGMPVTVQFGDEAGHE

SEQ ID NO: 3862 - protein, 360 aa, Escherichia coli
MKKLTVAISAVAASVLMAMSAQAAEIYNKDSNKLDLYGKVNAKHYFSSNDADDGDTTYVRLGFKGETQINDQLTGFGQWEYEFKGNRAESQGSSKDKTRLAFAGLKFGDYGSIDYGRNYGVAYDIGAWTDVLPEFGGDTWTQTDVFMTGRTTGVATYRNNDFFGLVDGLNFAAQYQGKNDRTDVTEANGDGFGFSTTYEYEGFGVGATYAKSDRTNDQVIYGNNSLNASGQNAEVWAAGLKYDANNIYLATTYSETQNMTVFGNNHIANKAQNFEVVAQYQFDFGLRPSVAYLQSKGKDLGAWGDQDLVEYIDVGATYYFNKNMSTFVDYKINLIDKSDFTKASGVATDDIVAVGLVYQF

SEQ ID NO: 3863 - protein, 700 aa, Escherichia coli
MKIFSVRQTVLPALLVLSPVVFAADEQTMIVSAAPQVVSDLDTPPAVSVVDGEEMRLATPRINLSESLTGVPGLQVQNRQNYAQDLQLSIRGFGSRSTYGIRGIRLYVDGIPATMPDGQGQTSNIDLSSVQNVEVLRGPFSALYGNASGGVMNVTTQTGHQPPTIEASSYYGSFGSWRYGLKATGATGDGTQPGDVDYTVSTTRFTTHGYRDHSGAQKNLANAKLGVRIDDASKLSLIFNSVDIKADDPGGLTEAEWKANPQQAPRAEQYDTRKTIKQTQAGLRYERSLSAQDDMSVMMYAGERETTQYQSIPMAPQLNPSHAGGVITLQRHYQGIDSRWTHRGELGVPVTFTTGLNYENMSENRKGYNNFRLNRGVPEYGQKGELRRDERNLMWNVDPYLQTQWQLTDKLSLDAGVRYSSVWFDSNDHYVTPGNGDDSGDASYHKWLPAGSLKYAMTDAWNVYLAAGRGFETPTINELSYRADGQSGMNFGLKPSTNDTIEIGSKTRIGDGLLSLALFQTDTDDEIVVDSSSGGRTTYKNAGKTRRQGAELAWDQRFAGDFRVKASWTWLDATYRSNVCNEQDCNGNRMPGIARNMAFASIGYIPEDGWYAGTEARYMGDIMADDENTAKAPSYTLVGLFTGYKYNYHNLTVDLFGRVDNLFDKEYVGSVIVNESNGRYYEPAPGRNYGVGINIAWRFE

SEQ ID NO: 3864 - protein, 111 aa, Escherichia coli; identical to SEQ ID NO: 3419

SEQ ID NO: 3865 - protein, 591 aa, Escherichia coli; identical to SEQ ID NO: 3668

SEQ ID NO: 3866 - protein, 207 aa, Escherichia coli; identical to SEQ ID NO: 2211

SEQ ID NO: 3867 - protein, 721 aa, Escherichia coli
MDEIPALAEKDDDSVINSLEQIIPGTAAEFDFNHQRLNLSIPQIALYRDAKGYVSPSRWDDGIPTLFTNYSFTGSDNRYRQGNRSQRQYLNMQNGANFGPWRLRNYSTWTRNDQASSWNTISSYLQRDIKALKSQLLLGESATSGSIFSSYTFTGVQLASDDNMLPNSQRGFAPTVRGIANSSAIVTIRQNGYVIYQSNVPAGAFEINDLYPSSNSGDLEVTIEESDGTQRRFIQPYSSLPMMQRPGHLKYSATAGRYRADANSDSKEPEFAEATAIYGLNNTFTLYGGLLGSEDYYALGIGIGGTLGALGALSMDINRADTQFDNRHSFHGYQWRTQYIKDIPETNTNIAVSYYRYTNDGYFSFDEANTRNWDYNSRQKSEIQFNISQTIFDGVSLYASGSQQDYWGNNDKNRNISVGVSGQQWGIGYSLNYQYSRYTDQNNDRALSLNLSIPLERWLPRSRVSYQMTSQKDRPTQHEMRLDGSLLDDGRLSYSLEQSLDDDNNHNSSLNASYRSPYGTFSAGYSYGNDSSQYNYGVTGGVVIHPHGVTLSQYLGNAFALIDANGASGVRIQNYPGIATDPFGYAVVPYLTTYQENRLSVDTTQLPDNVDLEQTTQFVVPNRGAMVAARFNANIGYRVLVTVSDRNGKPLPFGALASNDETGQQSIVDEGGILYLSGISSKSQSWTVRWGNQADQQCQFAFSTPDSEPTTSVLQGTAQCH

SEQ ID NO: 3868 - protein, 866 aa, Escherichia coli
MTIKPTKNYHNHLTRIATFCALLYCNSAFCAELVEYDHTFLMGQNASNIDLSRYSEGNPAIPGVYDVSVYVNDQPIINQSITFIEIEGKKNAQACITLKNLLQFHINSPDINNEKAVLLARDETLGNCLNLTEIIPQASVRYDVNEQRLDIDVPQAWVMKNYQNYVDPSLWENGINAAMLSYNLNGYHSETPGRRNDSIYAAFNGGMNLGAWRLRASGNYNWMTDSGSNYDFKNRYIQRDIASLRSQLILGESYTTGETFDSVSIRGIRLYSDSRMLPPTLASFAPIIHGVANTNAKVTITQGGYKIYETTVPPGAFVIDDLSPSGYGSDLIVTVEESDGSKRTFSQPFSSVVQMLRPGVGRWDISGGQVLKDDIQDEPNLFQASYYYGLNNYLTGYTGIQITDNNYTAGLLGLGLNTSVGAFSFDVTHSNVRIPDDKTYQGQSYRVSWNKLFEETSTSLNIAAYRYSTQNYLGLNDALTLIDEVKHPEQDLEPKSMRNYSRMKNQVTVSINQPLKFEKKDYGSFYLSGSWSDYWASGQNRSNYSIGYSNSASWGSYSVSAQRSWNEDGDTDDSVYLSFTIPIEKLLGTEQRTSGFQSIDTQMSSDFKGNNQLNVSSSGYSDNARVSYSVNTGYTMNKASKDLSYVGGYASYESPWGSLAGSVSANSDNSRQVSLSTDGGFVLHSGGLTFSNDSFSDSDTLAVVQAPGAQGARINYGNSTIDRWGYGVTSALSPYHENRIALDINDLENDVELKSTSAVAVPRQGSVVFADFETVQGQSAIMNITRSDGKNIPFAADIYDEQGNVIGNVGQGGQAFVRGIEQQGNISIKWLEESKPVSCLAHYQQSSEAEKIAQSIILNGIRCQIQ

SEQ ID NO: 3869 - protein, 266 aa, Escherichia coli; identical to SEQ ID NO: 1894

SEQ ID NO: 3870 - protein, 739 aa, Escherichia coli
MPDHSLFRLRILPWCIALAMSGSYSSVWAEDDIQFDSRFLELKGDTKIDLKRFSSQGYVEPGKYNLQVQLNKQPLAEEYDIYWYAGEDDASKSYACLTPELVAQFGLKEDVAKNLQWSHDAKCLKSGQLEGMEIKADLSQSALVISLPQAYLEYTYPDWDPPSRWDDGISGIVADYSINAQTRHEENGGDDSNEISGNGTVGVNLGPWRMRADWQTNYQHTRSNDDDEFSGDETQKKWEWSRYYAWRALPSLKAKLALGEDYLRSDIFDGFNYVGGSVSTDDQMLPPNLRGYAPDISGVAHTTAKVTVSQMGRVIYETQVPAGPFRIQDLGDSVSGTLHIRIEEQNGQVQEYDISTASMPYLTRPGQVRYKIMMGRPQEWGHHVEGEFFSGAEASWGIANGWSLYGGALGDENYQSAALGAGRDLSTFGAVAFDVTHSHTKLDKDTAYGKGSLDGNSFRVSYSKDFDQLNSRVTFAGYRFSEENFMTMSEYLDASDSGMVRTGNDKEMYTATYNQNFRDAGVSVYLNYTRHTYWDREEQTNYNIMLSHYFNMGSIRNVSISMTGYRYEYDNQADKGMYISLSMPWGDNSTVSYNGNYGSGTDSSQVGYFSRVDDATHYQLNVGTSDKHTSVDGYYSHDGSLAQVDLSANYHEGQYTSAGLSLQGGATLTAHGGALHRTQNMGGTRLLIDADGVADVPVEGNGAAVYTNMFGKAVVSDVNNYYRNQAYIDLNKLPENAEV

SEQ ID NO: 3871 - protein, 863 aa, Escherichia coli
MHIRKHRLAGFFVRLFVACAFAAQAPLSSAELYFNPRFLADDPQAVADLSRFENGQELPPGTYRVDIYLNNGYMATRDVTFNTGDSEQGIVPCLTRAQLASMGLNTASVSGMNLLADDACVPLTSMIHDATAHLDVGQQRLNLTIPQAFMSNRARGYIPPELWDPGINAGLLNYNFSGNSVQNRIGGNSHYAYLNLQSGLNIGAWRLRDNTTWSYNSSDRSSGSKNKWQHINTWLERDIIPLRSRLTLGDGYTQGDIFDGINFRGVQLASDDNMLPDSQRGFAPVIHGIARGTAQVTIKQNGYDIYNSTVPPGPFTINDIYAAGNSGDLQVTIKEADGSTQIFTVPYSSVPLLQREGHTRYSITAGEYRSGNAQQEKPRFFQSTLLHGLPAGWTIYGGTQLADRYRAFNFGIGKNMGALGALSVDMTQANSTLPDDSQHDGQSVRFLYNKSLNESGTNIQLVGYRYSTSGYFNFADTTYSRMNGYNIETQDGVIQVKPKFTDYYNLAYNKRGKLQLTVTQQLGRSSTLYLSGSHQTYWGTSNVDEQFQAGLNTAFEDINWTLSYSLTKNAWQKGRDQMLALNVNIPFSHWLRSDSKSQWRHASASYSMSHDLNGRMTNLAGVYGTLLEDNNLSYSVQTGYAGGGDGNSGSTGYATLNYRGGYGNANIGYSHSDDIKQLYYGVSGGVLAHANGVTLGQPLNDTVVLVKAPGAKDAKVENQTGVRTDWRGYAVLPYATEYRENRVALDTNTLADNVDLDNAVANVVPTRGAIVRAEFKARVGIKLLMTLTHNNKPLPFGAMVTSESSQSSGIVADNGQVYLSGMPLAGKVQVKWGEEENAHCVANYQLPPESQQQLLTQLSAECR

SEQ ID NO: 3872 - protein, 368 aa, Escherichia coli
MNKTITALAIMMASFAANASVLPETPVPFKSGTGAIDNDTVYIGLGSAGTAWYKLDTQAKDKKWTALAAFPGGPRDQATSAFIDGNLYVFGGIGKNSKGLTQVFNDVHKYNPKTNSWVKLMSHAPMGMAGHVTFVHNGKAYVTGGVNQNIFNGYFEDLNEAGKDSATIDKINAHYFDKKAEDYFFNKFLLSFDPSTQQWSYAGESPWYGTAGAALVNKGDKTWLINGEAKPGLRTDAVFELDFTGNNLKWNKLAPVSSPDGVAGGFAGISNDSLIFAGGAGFKGSRENYQNGKNYAHEGLKKSYSTDIHLWHNGKWDKSGELSQGRAYGVSLPWNNSLLIIGGETAGGKAVTDSVLISVKDNKVTVQN

SEQ ID NO: 3873 - protein, 823 aa, Escherichia coli
MTPLASAIVALLLGIEAYAAEETFDTHFMIGGMKDQQVANIRLDDNQPLPGQYDIDIYVNKQWRGKYEIIVKDNPQETCLSIEVIKRLGINSDNFASGKQCLTFEQLVQGGSYTWDIGVFRLDFSVPQAWVEELESGYVPPENWERGINAFYTSYYVSQYYSDYKASGNSKSTYVRFNSGLNLLGWQLHSDASFSKTNNNPGVWKSNTLYLERGFAQLLGTLRVGDMYTSSDIFDSVRFSGVRLFRDMQMLPNSKQNFTPRVQGIAQSNALVTIEQNGFVVYQKEVPPGPFAITDLQLAGGGADLDVSVKEADGSVTTYLVPYAAVPNMLQPGVSKYDFAAGRSHIEGASKQSDFVQAGYQYGFNNLLTLYGGSMVANNYYAFTLGTGWNTRIGAISVDATKSHSKQDNGDVFDGQSYQIAYNKFVSQTSTRFGLAAWRYSSRDYRTFNDHVWANNKDNYRRDENDVYDIADYYQNDFGRKNSFSANMSQSLPEGWGSVSLSTLWRDYWGRSGSSKDYQLSYSNNWRRISYILAASQAYDENHHEEKRFNIFISIPFDWGDDVTTPRRQIYMSNSTTFDDQGFASNNTGLSGTVGSRDQFNYGVNLSYQNQGNETTAGANLTWNAPVATVNGSYSQSSTYRQAGASVSGGIVAWSGGVNLANRLSETFAVMNAPGIKDAYVNGQKYRTTNRNGVVVYDGMTPYRENHLMLDVSQSDSEAELRGNRKIAAPYRGAVVLVNFDTDQRKPWFIKALRADGQPLMFGYEVNDIHGHNIGVVGQGSQLFIRTNEVPPSVNVAIDKQQGLSCTITFGKEIDESRNYICQ

SEQ ID NO: 3874 - protein, 834 aa, Escherichia coli
MYKKLKLTTISELIKNIYCSLSVLIIGCASAYAVEFNKDLIEAEDRENVNLSQFETDGQLPVGKYSLNALINNKRTPIHLDLQWVLIDNQTAVCLTPEQLTLLGFTDEIIEEAQQNLIDGCYPIEKEKQITTYLDKGKMQLSISAPQAWLKYKDANWTPPELWDHGIAGAFLDYNLYASHYAPHQGDNSQNISSYGQAGVNLGAWRLRTDYQYDQSFNNGKSQANNLDFPRIYLFRPIPAINAKLTIGQYDTESSIFDSFHFSGVSLKSDENMLPPDLRGYAPQITGVAQTNAKVTVSQNNRIIYQENVPPGPFAITNLFNTLQGQLDVKVEEEDGQVTQWQVASNSIPYLTRKGQIRYTTAMGKPTSVGGDSLQQPFFWTGELSWGWLNNVSLYGGSVLTNRDYQSLAAGVGFNLNSLGSLSFDVTRSDAQLHNQDKETGYSYRANYSKRFESTGSQLTFAGYRFSDKNFVTMNEYINDTNHYTNYQNEKESYIVTFNQYLESLRLNTYVSLARNTYWDASSNVNYSLSLSRDFDIGPLKNVSTSLTFSRINWEEDNQDQLYLNISIPWGTSRTLSYGMQRNQDNKISHTASWYDSSDRNNSWSVSASGDNDEFKDMKASLRASYQHNTENGRLYLSGTSQRDSYYSLNASWNGSFTATRHGAAFHDYSGSADSRFMIDADGAEDIPLNNKRAVTNRYGIGVIPSVSSYITTSLSVDTRNLPENVDIENSVITTTLTEGAIGYAKLDTRKGYQIMGVIRLADGSHPPLGISVKDKTSHKELGLVADGGFVYLNGIQDDSKLTLRWGDKSCFIQPPNSSNLTTGTVILPCISQN

SEQ ID NO: 3875 - protein, 819 aa, Escherichia coli
MDTVNIYRLSFVSCLVVAMPCALAVEFNLNVLDKSMRDRIDISLLKEKGVIAPGEYFVSVAVNNNQISNGQKINWHKNDDKTIPCINDLLVDKFGLKPEVRQSLPLINQCVDFSSRPEMLFNFDQANQQLNITIPQAWLAWHSENWTPPSTWKEGVAGVLMDYNLFASSYRPQDGSSSTNLNAYGTAGINTGAWRLRSDYQLNQTDSDDNHEQSGEISRTYLFRPLPQLGSKLTLGETDFSSNIFDGFSYTGAALASDDRMLPWELRGYAPQISGIAQTNATVTISQSGRVIYQKKVPPGPFIIDDLNQSVQGTLDVKVTEEDGRVNNFQVSAASTPFLTRQGQVRYKLAAGQPRPSMSHQTENETFFSNEVSWGMLSNTSLYGGLLLSGDDYHSAAIGIGQNMLWLGALSFDVTWASSHFDTQQDERGLSYRFNYSKQVDATNSTISLAAYRFSDRHFHSYANYLDHKYNDSDAQDEKQTISLSVGQPITPLNLNLYANLLHQTWWNADASTTANITAGFNVDIGDWRDISISTSFNTTHYEDKDRDNQIYLSISLPFGNGGRVGYDMQNSSHSTTHRMSWNDTLDERNSWGMSAGLQSDRPDNGAQVSGNYQHLSSAGEWDISGTYAANDYSSVSSSWSGSFTATQYGAAFHRRSSTNEPRLMVSTDGVADIPVQGNLDYTNHFGIAVVPLISSYQPSTVAVNMNDLPDGVTVAENVIKETWIEGAIGYKSLASRSGKDVNVIIRNASGQFPPLGADIRQDDSGISVGMVGEEGHAWLSGVAENQKFTVVWGDSQHCSLHLPEHMEDTANRLILPCH

SEQ ID NO: 3876 - protein, 161 aa, Escherichia coli; identical to SEQ ID NO: 2582

SEQ ID NO: 3877 - protein, 820 aa, Escherichia coli
MKIPTTTDIPQRYTWCLAGICYSSLAILPSFLSYAESYFNPAFLLENGTSVADLSRFERGNHQPAGVYRVDLWRNDEFIGSQDIVFESTTENTGDKSGGLMPCFNQVLLERIGLNSSAFPELAQQQNNKCINLLKAVPDATINFDFAAMRLNITIPQITLLSSAHGYIPPEEWDEGIPALLLNYNFTGNRGNGNDSYFFSELSGINIGPWRLRNNGSWNYFRGNGYHSEQWNNIGTWVQRAIIPLKSELVMGDGNTGSDIFDGVGFRGVRLYSSDNMYPDSQQGFAPTVRGIARTAAQLTIRQNGFIIYQSYVSPGAFEITDLHPTSSNGDLDVTIDERDGNQQNYTIPYSTVPILQREGRFKFDLTAGDFRSGNSQQSSPFFFQGTALGGLPQEFTAYGGTQLSANYTAFLLGLGRNLGNWGAVSLDVTHARSQLADDSRHEGDSIRFLYAKSMNTFGTNFQLMGYRYSTQGFYTLDDVAYRRMEGYEYDYDYDGEHRDEPIIVNYHNLRFSRKDRLQLNISQSLNDFGSLYISGTHQKYWNTSDSDTWYQVGYTSSWVGISYSLSFSWNESVGIPDNERIVGLNVSVPFNVLTKRRYTRENALDRAYASFNANRNSNGQNSWLAGVGGTLLEGHNLSYHVSQGDTSNNGYTGSATANWQAAYATLGVGYNYDRDQHDVNWQLSGGVVGHENGITLSQPLGDTNVLIKAPGAGGVRIENQTGILTDWRGYAVMPYATVYRYNRIALDTNTMGNSIDVEKNISSVVPTQGALVRANFDTRIGVRALITVTQGGKPVPFGSLVRENSIGITSMWVMTGKFI

SEQ ID NO: 3878 - protein, 365 aa, Escherichia coli
MKKLTVAISAVAASVLMAMSAQAAEIYNKDSNKLDLYGKVNAKHYFSSNDADDGDTTYVRLGFKGETQINDQLTGFGQWEYEFKGNRAESQGSSKDKTRLAFAGLKFGDYGSIDYGRNYGVAYDIGAWTDVLPEFGGDTWTQTDVFMTGRTTGVATYRNNDFFGLVDGLNFAAQYQGKNDRSDFDNYTEGNGDGFGFSATYEYEGFGIGATYAKSDRTDTQVNAGKVLPEVFASGKNAEVWAAGLKYDANNIYLATTYSETQNMTVFADHFVANKAQNFEAVAQYQFDFGLRPSVAYLQSKGKDLGVWGDQDLVKYVDVGATYYFNKNMSTFVDYKINLLDKNDFTKALGVSTDDIVAVGLVYQF

SEQ ID NO: 3879 - protein, 523 aa, Escherichia coli
MFWRDITLSVWRKKTTGLKTKKRLLPLVLAAALCSSPVWAEEATFTANFKDTDLKSFIETVGANLNKTIIMGPGVQGKVSIRTMTPLNERQYYQLFLNLLEAQGYAVVPMENDVLKVVKSSAAKVEPLPLVGEGSDNYAGDEMVTKVVPVRNVSVRELAPILRQMIDSAGSGNVVNYDPSNVIMLTGRASVVERLTEVIQRVDHAGNRTEEVIPLDNASASEIARVLESLTKNSGENQPATLKSQIVADERTNSVIVSGDPATRDKMRRLIRRLDSEMERSGNSQVFYLKYSKAEDLVDVLKQVSGTLTAAKEEAEGTVGSGREIVSIAASKHSNALIVTAPQDIMQSLQSVIEQLDIRRAQVHVEALIVEVAEGSNINFGVQWASKDAGLMQFANGTQIPIGTLGAAISQAKPQKGSTVISENGATTINPDTNGDLSTLAQLLSGFSGTAVGVVKGDWMALVQAVKNDSSSNVLSTPSITTLDNQEAFFMVGQDVPVLTGSTVGSNNSNPFNTVERKKSASC

SEQ ID NO: 3880 - protein, 729 aa, Escherichia coli
MLSTQFNRDNQYQASTKPSLLAGCIALALLPSAAFAAPATEETVIVEGSATAPDDGENDYSVTSTSAGTKMQMTQRDIPQSVTIVSQQRMEDQQLQTLGEVMENTLGISKSQADSDRALYYSRGFQIDNYMVDGIPTYFESRWNLGDALSDMALFERVEVVRGATGLMTGTGNPSAAINMVRKHATSREFKGDVSAEYGSWNKERYVADLQSPLTEDGKIRARIVGGYQNNDSWLDRYNSEKTFFSGIVDADLGDLTTLSAGYEYQRIDVNSPTWGGLPRWNTDGSSNSYDRARSTAPDWAYNDKEINKVFMTLKQRFADTWQATLNATHSEVEFDSKMMYVDAYVNKADGMLVGPYSNYGPGFDYVGGTGWNSGKRKVDALDLFADGSYELFGRQHNLMFGGSYSKQNNRYFSSWANIFPDEIGSFYNFNGNFPQTDWSPQSLAQDDTTHMKSLYAATRVTLADPLHLILGARYTNWRVDTLTYSMEKNHTTPYAGLVFDINDNWSTYASYTSIFQPQNDRDSSGKYLAPITGNNYELGLKSDWMNSRLTTTLAIFRIEQDNVAQSTGTPIPGSNGETAYKAVDGTVSKGVEFELNGAITDNWQLTFGATRYIAEDNEGNAVNPNLPRTTVKMFTSYRLPVMPELTVGGGVNWQNRVYTDTVTPYGTFRAEQGSYALVDLFTRYQVTKNFSLQGNVNNLFDKTYDTNVEGSIVYGTPRNFSITSTYQF

SEQ ID NO: 3881 - protein, 678 aa, Escherichia coli
MVPSTFSRLKAARCLPVVLAALIFAGCGTHTPDQSTAYMQGTAQADSAFYLQQMQQSSDDTRINWQLLAIRALVKEGKTGQAVELFNQLPQELNDSQRREKTLLAVEIKLAQKDFAGAQNLLAKITPADLEQNQQARYWQAKIDASQGRPSIDLLRALIAQEPLLGAKEKQQNIDATWQALSSMTQEQANTLVINADENILQGWLDLQRVWFDNRNDPDMMKAGIADWQKRYPNNPGAKMLPTQLVNVKAFKPASTNKIALLLPLNGQAAVFGRTIQQGFEAAKNIGTQPVAAQVAAAPAADVAEQPQPQTVDGVASPAQASVSDLTGEQPAAQPAPVSTPAATTTAVSAPANPSAELKIYDTSSQPLSQILSQVQQDGASIVVGPLLKNNVEELLKSNTPLNVLALNQPENIENRVNICYFALSPEDEARDAARHIRDQGKQAPLVLIPRSSLGDRVANAFAQEWQKLGGGTVLQQKFGSTSELRAGVNGGSGIALTGTPITPRATTDSGMTTNNPTLQTTPTDDQFTNNGGRVDAVYIVATPGEIAFIKPMIAMRNGSQSGAMLYASSRSAQGTAGPDFRLEMEGLQYSEIPMLAGGNLPLMQQALSAVNNDYSLARMYAMGVDAWSLANHFSQMRQVQGFEINGNTGSLTANPDCVINRKLSWLQYQQGQVVPAS

SEQ ID NO: 3882 - protein, 430 aa, Escherichia coli
MKQALRVAFGFLILWASVLHAEVRIVIDSGVDSGRPIGVVPFQWAGPGAAPEDIGGIVAADLRNSGKFNPLDRARLPQQPGSAQEVQPAAWSALGIDAVVVGQVTPNPDGSYNVAYQLVDTGGAPGTVLAQNSYKVNKQWLRYAGHTASDEVFEKLTGIKGAFRTRIAYVVQTNGGQFPYELRVSDYDGYNQFVVHRSPQPLMSPAWSPDGSKLAYVTFESGRSALVIQTLANGSVRQVASFPRHNGAPAFSPDGSKLAFALSKTGSLNLYVMDLASGQIRQVTDGRSNNTEPTWFPDSQNLAFTSDQAGRPQVYKVNINGGAPQRITWEGSQNQDADVSSDGKFMVMVSSNGGQQHIAKQDLATGGVQVLSSTFLDETPSLAPNGTMVIYSSSQGMGSVLNLVSTDGRFKARLPATDGQVKFPAWSPYL

SEQ ID NO: 3883 - protein, 700 aa, Escherichia coli; identical to SEQ ID NO: 3128

SEQ ID NO: 3884 - protein, 438 aa, Escherichia coli
MGSRGLIRKILAISGVGKYIKDDIGFSYQGYFRSGWGTGNHGSPQTYAAGSLGRFGNEMSGWFDLTLNQRVYNQDGKTANAVVTYDGNVGEQYNDAWFGDSANENIMQFSDIYLTTRGFLPFAPEADFWVGKHKLPQYEIQMLDWKTLTTDVAAGVGIENWALGVGLFDMSLSRDDVDVYSRDFSRTSQMNTNSVDVRYRNIPLWDDATLSLMAKYSAPNKTDQQQDNENDNSYFEMKDSWMLTSVLRQNLQRDTFNEFTLQVANNSYASSFASFSDASNTMAHGRYYYGDHTNGIAWRLISQGEMYLTDNIIMANALVYSHGEDVYSYESGAHSDFDSIRTVIRPAWIWNTWNQTGLELGWFKQQNKTQQGVTLNESAYKTTLWHALKVGESILGSRPEIRFYGTYINILDNELSNFKFNENSKDEFMAGIQAEVWW

SEQ ID NO: 3885 - protein, 118 aa, Escherichia coli [sequence omitted]

SEQ ID NO: 3886 - protein, 208 aa, Escherichia coli; identical to SEQ ID NO: 1949

SEQ ID NO: 3887 - protein, 170 aa, Escherichia coli [sequence omitted]

SEQ ID NO: 3888 - protein, 230 aa, Escherichia coli; identical to SEQ ID NO: 3348

SEQ ID NO: 3889 - protein, 747 aa, Escherichia coli; identical to SEQ ID NO: 2072

SEQ ID NO: 3890 - protein, 446 aa, Escherichia coli; identical to SEQ ID NO: 2176

SEQ ID NO: 3891 - protein, 237 aa, Escherichia coli; identical to SEQ ID NO: 3605

SEQ ID NO: 3892 - protein, 162 aa, Escherichia coli; identical to SEQ ID NO: 1973

SEQ ID NO: 3893 - protein, 363 aa, Escherichia coli
MKVKVLSLLVPALLVAGAANAAEVYNKDGNKLDLYGKVDGLHYFSDNKDVDGDQTYMRLGFKGETQVTDQLTGYGQWEYQIQGNSAENENNSWTRVAFAGLKFQDVGSFDYGRNYGVVYDVTSWTDVLPEFGGDTYGSDNFMQQRGNGFATYRNTDFFGLVDGLNFAVQYQGKNGSVSGEGMTNNGREALRQNGDGVGGSITYDYEGFGIGAAVSSSKRTDDQNSPLYIGNGDRAETYTGGLKYDANNIYLAAQYTQTYNATRVGSLGWANKAQNFEAVAQYQFDFGLRPSLAYLQSKGKNLGRGYDDEDILKYVDIGATYYFNKNMSTYVDYKINLLDDNQFTRDAGINTDNIVALGLVYQF

SEQ ID NO: 3894 - protein, 192 aa, Escherichia coli
MKSKKYFIILLALAAIAGLGTHAAWSSNGLPRIDNKTLARLAQQHPVVVLFRHAERCDRSTNQCLSDKTGITVKGTQDARELGNAFSADIPDFDLYSSNTVRTIQSATWFSAGKKLTVDKRLLQCGNEIYSAIKDLQSKAPDKNIVIFTHNHCLTYIAKNKRDATFKPDYLDGLVMHVEKGKVYLDGEFVNH

SEQ ID NO: 3895 - protein, 774 aa, Escherichia coli
MTPLRVFRKTTPLVNAIRLSLLPLAGLSFSAFAAQVNIAPGSLDKALNQYAAHSGITLSVDASLTRGKQSNGLHGDYDVESGLQQLLDGSGLQVKPLGNNSWTLEPAPAPKEDALTVVGDWLGDARENDVFEHAGARDVIRREDFAKTGATTMREVLNRIPGVSAPENNGTGSHDLAMNFGIRGLNPRLASRSTVLMDGIPVPFAPYGQPQLSLAPVSLGNMDAIDVVRGGGAVRYGPQSVGGVVNFVTRAIPQDFGIEACVEGQLSPTSSQNNPKETHNLMVGGTADNGFGTALLYSGTRGSDWREHSATRIDDLMLKSKYAPDEVHTFNSLLQYYDGEADMPGGLSRADYDADRWQSTRSYDRFWGRRKLASLGYQFQPDSQHKFNIQGFYTQTLRSGYLEQGKRITLSPRNYWVRGIEPRYSQIFMIGPSAHEVGVGYRYVNESTHEMRYYTATSSGQLPSGSSPYDRDTRSGTEAHAWYLDDKIDIGNWTITPGMRFEHIESYQNNAITGTHEEVSYNAPLPALNVLYHLTDSWNLYANTEGSFGTVQYSQIGKAVQSGNVEPEKARTWELGTRYDDGALTAEMGLFLINFNNQYDSNQTNDTVTARGKTRHTGLETQARYDLGTLTPTLDNVSIYASYAYVNAEIREKGDTYGNLVPFSPKHKGTLGVDYKPGNWTFNLNSDFQSSQFADNANTVKESADGSTGRIPGFMLWGARVAYDFGPQMADLNLAFGVKNIFDQDYFIRSYDDNNKGIYAGQPRTLYMQGSLKF

SEQ ID NO: 3896 - protein, 227 aa, Escherichia coli
MSAQASVTPDRTRLIFNESDKSISVTLRNNDPKLPYLAQSWIEDEKGNKISSPLTVLPPVQRIDSMMNGQVKVQGMPDINKLPADRESLFYFNVREIPPKTNKANTLQIALQTRIKLFWRPKALENVSMKNPWQYKVTLTRNGQEFTVNNPTPYYVIFSNASTQKNGNPAAGFSPIVMSPKTSAPLNVKMGSVPVLTYVNDYGARMPLFFTCNGNSCQVDEEQSRKG

SEQ ID NO: 3897 - protein, 222 aa, Escherichia coli
MLIIFYLIISASAHAAGGIALGATRIIYPADAKQTAVWIRNSHTNERFLVNSWIENSSGVKEKSFIITPPLFVSEPKSENTLRIIYTGPPLAADRESLFWMNVKTIPSVDKNALNGRNVLQLAILSRMKLFLRPIQLQELPAEAPDTLKFSRSGNYINVHNPSPFYVTLVNLQVGSQKWGNAMAAPRVSSQIPLPSGVQGKLKFQTVNDYGSVTPVREVNLN

SEQ ID NO: 3898 - protein, 111 aa, Escherichia coli; identical to SEQ ID NO: 3096

SEQ ID NO: 3899 - protein, 551 aa, Escherichia coli; identical to SEQ ID NO: 2446

SEQ ID NO: 3900 - protein, 472 aa, Escherichia coli
MSTIHTPLTYNEINGKPFGLDYELAKQFADYLGVKLKVTVRQNISQLFDDLDNGNADLLAAGLVYNSERVKNYQPGPTYYSVSQQLVYKVGQYRPRTLGNLTAEQLTVAPGHVVVNDLQTLKDTKFPELSWKVDDKKGSAELMEDVIEGKLDYTIADSVAISLFQRVHPELAVALDITDEQPVTWFSPLDGDNTLSAALLDFFNEMNEDGTLARIEEKYLGHGDDFDYVDTRTFLRAVDAVLPQLKPLFEKYAEEIDWRLLAAIAYQESHWDAQATSPTGVRGMMMLTKNTAQSLGITDRTDAEQSISGGVRYLQDMMSKVPESVPENERIWFALAAYNMGYAHMLDARALTAKTKGNPDSWADVKQRLPLLSQKPYYSKLTYGYARGHEAYAYVENIRKYQISLVGYLQEKEKQATEAAMQLAQDYPAVSPTELGKEKFPFLSFLSQSSSNYLTHSPSLLFSRKGSEEKQN

SEQ ID NO: 3901 - protein, 366 aa, Escherichia coli
MKLKIVAVVVTGLLAANVAHAAEVYNKDGNKLDLYGKVTALRYFTDDKRDDGDKTYARLGFKGETQINDQMIGFGHWEYDFKGYNDEANGSRGNKTRLAYAGLKISEFGSLDYGRNYGVGYDIGSWTDMLPEFGGDTWSQKDVFMTYRTTGVATYRNYDFFGLIEGLNFAAQYQGKNERTDNSHLYGADYTRANGDGFGISSTYVYDGFGIGAVYTKSDRTNAQERAAANPLNASGKNAELWATGIKYDANNIYFAANYAETLNMTTYGDGYISNKAQSFEVVAQYQFDFGLRPSLAYLKSKGRDLGRYGDQDMIEYIDVGATYFFNKNMSTYVDYKINLIDESDFTRAVDIRTDNIVATGITYQF

SEQ ID NO: 3902 - protein, 828 aa, Escherichia coli; identical to SEQ ID NO: 2388

SEQ ID NO: 3903 - protein, 360 aa, Escherichia coli; identical to SEQ ID NO: 3354

SEQ ID NO: 3904 - protein, 784 aa, Escherichia coli; identical to SEQ ID NO: 2244

SEQ ID NO: 3905 - protein, 641 aa, Escherichia coli; identical to SEQ ID NO: 3104

SEQ ID NO: 3906 - protein, 199 aa, Escherichia coli
MIYDASRKEAALPVANKGAETPYLLQSWVDNIDGTSRAPFIITPPLFRLEAGDDSSLRIIKTADNLPENKESLFYINVRAIPAKKKSDDVNANELTLVFKTRIKMFYRPAHLKGRVNDAWTSLEFKRSDHSLNIYNPTEYYVVFAGLAVDKTDLTSKIEYIAPGEHKQLPLPASGGKNVKWAAINDYGGSSGTETRPLQ

SEQ ID NO: 3907 - protein, 191 aa, Escherichia coli
MKKSLLGLTFASLMFSAGSAVAADYKIDKEGQHAFVNFRIQHLGYSWLYGTFKDFDGTFTFDEKNPAADKVNVKINTTSVDTNHAERDKHLRSADFLNTEKYPQATFTSTSVKKDGDELDITGDLTLNGVTKPVTLEAKLIGQGDDPWGGKRAGFEAEGKIKLKDFNIKTDLGPASQEVDLIISVEGVQQK

SEQ ID NO: 3908 - protein, 387 aa, Escherichia coli
MKRKVLAMLVPALLVAGAANAAEIYNKNGNKLDLYGKVDARHTFSDNPGDDGDETIIELGFKGETQITDQLTGYGQALTKTKASDTEGSDNTYVKLAFAGLKFGEMGSFDYGRNYGVIYDVEAWTDMLPVFGGDSYTWTDNFMAGRANGVATYRNSDFFGLVEGLNFALQYQGNNEGSNAGEDQEGTKNGHEDVRFQNGDGFGLSTSYDFDFGLSLGAAYSNSDRTNSQVALGGYHYNEYSKFAGGDTAEAWTFGAKYDANNVYLAMMYAETRNMTPYGNVGIANKTQNFEAVAQYQFDFGLRPSLAYVYSKGKDLGGNDYNNNGHQEYVDQDLVNYVEIGATYYFNKNFSTYVDYKINLLDKDDDFYDNNGIATDDVVGVGLVYQF

SEQ ID NO: 3909 - protein, 243 aa, Escherichia coli; identical to SEQ ID NO: 2910

SEQ ID NO: 3910 - protein, 203 aa, Escherichia coli; identical to SEQ ID NO: 2201

SEQ ID NO: 3911 - protein, 746 aa, Escherichia coli
MNKKIHSLALLVNLGIYGVAQAQEPTDTPVSHDDTIVVTAAEQNLQAPGVSTITADEIRKNPVARDVSEIIRTMPGVNLTGNSTSGQRGNNRQIDIRGMGPENTLILIDGKPVSSRNSVRQGWRGERDTRGDTSWVPPEMIERIEVLRGPAAARYGNGAAGGVVNIITKKGSGEWHGSWDAYFNAPEHKEEGATKRTNFSLTGPLGDEFSFRLYGNLDKTQADAWDINQGHQSARAGTYATTLPAGREGVINKDINGVVRWDFAPLQSLELEAGYSRQGNLYAGDTQNTNSDAYTRSKYGDETNRLYRQNYALTWNGGWDNGVTTSNWVQYEHTRNSRIPEGLAGGTEGKFNEKATQDFVDIDLDDVMLHSEVNLPIDFLVNQTLTLGTEWNQQRMKDLSSNTQALTGANTGGAIDGVSATDRSPYSKAEIFSLFAENNMELTDSTIVTPGLRFDHHSIVGNNWSPALNISQGLGDDFTLKMGIARAYKAPSLYQTNPNYILYSKGQGCYASAGGCYQQGNDDLKAETSINKEIGLEFKRDGWLAGVTWFRNDYRNKIEAGYVAVGQNAVGTDLYQWDNVPKAVVEGLEGSLNVPVSETVMWTNNITYMLKSENKTTGDRLSIIPEYTLNSTLSWQAREDLSMQTTFTWYGKQQPKKYNYKGQPAVGPETKEISPYSIVGLSATWDVTKNVSLTGGVDNLFDKRLWRAGNAQTTGDLAGANYIAGAGAYTYNEPGRTWYMSVNTNF

SEQ ID NO: 3912 - protein, 331 aa, Escherichia coli; identical to SEQ ID NO: 2700

SEQ ID NO: 3913 - protein, 224 aa, Escherichia coli; identical to SEQ ID NO: 3165

SEQ ID NO: 3914 - protein, 512 aa, Escherichia coli; identical to SEQ ID NO: 2974

SEQ ID NO: 3915 - protein, 351 aa, Escherichia coli; identical to SEQ ID NO: 2519

SEQ ID NO: 3916 - protein, 226 aa, Escherichia coli; identical to SEQ ID NO: 3085

SEQ ID NO: 3917 - protein, 236 aa, Escherichia coli; identical to SEQ ID NO: 3286

SEQ ID NO: 3918 - protein, 432 aa, Escherichia coli; identical to SEQ ID NO: 2026

SEQ ID NO: 3919 - protein, 216 aa, Escherichia coli
MAMMVAGRAEAGVALGATRVIYPAGQKQVQLAVTNNDENSTYLIQSWVENADGVKDGRFIVTPPLFAMKGKRENTLRILDATNNQLPQDRESLFWMNVKAIPSMDKSKLTENTLQLAIISRIKLYYRPAKLALPPDQAAEKLRFRRSANSLTLINPTPYYLTVTELNAGTRVLENALVPPMGESTVKLPSDAGSNITYRTINDYGALTPKMTGVME

SEQ ID NO: 3920 - protein, 240 aa, Escherichia coli
MKGLPLLLLVASLCSHAALQPDRTRIVFNANDKATSLRVDNRSDKLPYLAYSWLENEKGEKSDDLLVALPPIQRLEPKATTQVRIVKQASTTKLPGDRETLFFYNMREIPPAPEKNSDHAVLQVAIQSRIKVFWRPAALRKKAGEKVELQLQVSQQGNQLTLKNPTAYYLTIAYLGRNEKGVLPGFKTVMVAPFSTVNTNTGNYSGSQFYLGYMDDYGALRMTTLNCSGQCHLQAVEAKK

SEQ ID NO: 3921 - protein, 193 aa, Escherichia coli; identical to SEQ ID NO: 2246

SEQ ID NO: 3922 - protein, 505 aa, Escherichia coli
MSAAVMLTLYTSSSWAFSIDDVAKQAQSLAGKGYEAPKSNLPSVFRDMKYADYQQIQFNHDKAYWNNLKTPFKLEFYHQGMYFDTPVKINEVTATAVKRIKYSPDYFTFGDVQHDKDTVKDLGFAGFKVLYPINSKDKNDEIVSMLGASYFRVIGAGQVYGLSARGLAIDTALPSGEEFPRFKEFWIERPKPTDKRLTIYALLDSPRATGAYKFVVMPGRDTVVDVQSKIYLRDKVGKLGVAPLTSMFLFGPNQPSPANNYRPELHDSNGLSIHAGNGEWIWRPLNNPKHLAVSSFSMENPQGFGLLQRGRDFSRFEDLDDRYDLRPSAWVTPKGEWGKGSVELVEIPTNDETNDNIVAYWTPDQLPEPGKEMNFKYTITFSRDEDKLHAPDNAWVQQTRRSTGDVKQSNLIRQPDGTIAFVVDFTGAEMKKLPEDTPVTAQTSIGDNGEIVESTVRYNPVTKGWRLVMRVKVKDAKKTTEMRAALVNADQTLSETWSYQLPANE

SEQ ID NO: 3923 - protein, 760 aa, Escherichia coli
MENNRNFPARQFHSLTFFAGLCIGITPVAQALAAEGQTNADDTLVVEASTPSLYAPQQSADPKFSRPVADTTRTMTVISEQVIKDQGATNLTDALKNVPGVGAFFAGENGNSTTGDAIYMRGADTSNSIYIDGIRDIGSVSRDTFNTEQVEVIKGPSGTDYGRSAPTGSINMISKQPRNDSGIDASASIGSAWFRRGTLDVNQVIGDTTAVRLNVMGEKTHDAGRDKVKNERYGVAPSIAFGLGTANRLYLNYLHVTQHNTPDGGIPTIGLPGYSAPSAGTAALNHSGKVDTHNFYGTDSDYDDSTTDTATMRFEHDINDNTTIRNTTRWSRVKQDYLMTAIMGGASNITQPTSDVNSWTWSRTANTKDVSNKILTNQTNLTSTFYTGSIGHDVSTGVEFTRETQTNYGVNPVTLPAVNIYHPDSSIHPGGLTRNGANANGQTDTFAIYAFDTLQITRDFELNGGIRLDNYHTEYDSATACGGSGRGAITCPAGVAKGSPVTTVDTAKSGNLVNWKAGALYHLTENGNVYINYAVSQQPPGGNNFALAQSGSGNSANRTDFKPQKANTSEIGTKWQVLDKRLLLTAALFRTDIENEVEQNDDGTYSQYGKKRVEGYEISVAGNITPAWQVIGGYTQQKATIKNGKDVAQDGSSSLPYTPEHAFTLWSQYQATDDISVGAGARYIGSMHKGSDGAVGTPAFTEGYWVADAKLGYRVNRNLDFQLNVYNLFDTDYVASINKSGYRYHPGEPRTFLLTANMHF

SEQ ID NO: 3924 - protein, 361 aa, Escherichia coli; identical to SEQ ID NO: 3061

SEQ ID NO: 3925 - protein, 614 aa, Escherichia coli; identical to SEQ ID NO: 1884

SEQ ID NO: 3926 - protein, 224 aa, Escherichia coli; identical to SEQ ID NO: 3035

SEQ ID NO: 3927 - protein, 231 aa, Escherichia coli
MSSIAWGAIIPDRTRIIMNESDKGEALKLTNQSKNLPYLAQTWIEDTKGNKSRDFIVTAPPMVRLNPSEQIQIRMISQEKIAQLPNDRETLFYFNVREIPPKTDKKNVMQVTMQHALKLFWRPKAIELEDDGVMSYEKVEIIRRNDGSIRFNNKMPYHVTLGYIGTNGITMLPQTQSLMVTPYSHADTQFKNVPSAFQVGYINDFGGLSFYEINCPTVNNSCNVSVAKRDK

SEQ ID NO: 3928 - protein, 232 aa, Escherichia coli; identical to SEQ ID NO: 2087

SEQ ID NO: 3929 - protein, 266 aa, Escherichia coli; identical to SEQ ID NO: 1892

SEQ ID NO: 3930 - protein, 368 aa, Escherichia coli; identical to SEQ ID NO: 2370

SEQ ID NO: 3931 - protein, 869 aa, Escherichia coli
MKIPTTTDIPQRYTWCLAGICYSSLAILPSFLSYAESYFNPAFLLENGTSVADLSRFERGNHQPAGVYRVDLWRNDEFIGSQDIVFESTTENTGDKSGGLMPCFNQVLLERIGLNSSAFPELAQQQNNKCINLLKAVPDATINFDFAAMRLNITIPQIALLSSAHGYIPPEEWDEGIPALLLNYNFTGNRGNGNDSYFFSELSGINIGPWRLRNNGSWNYFRGNGYHSEQWNNIGTWVQRAIIPLKSELVMGDGNTGSDIFDGVGFRGVRFYSSDNMYPDSQQGFAPTVHGIARTAAQLTIRQNGFIIYQSYVSPGAFEITDLHPTSSNGDLDVTIDERDGNQQNYTIPYSTVPILQREGRFKFDLTAGDFRSGNSQQSSPFFFQGTALGGLPQEFTAYGGTQLSANYTAFLLGLGRNLGNWGAVSLDVTHARSQLADDSRHEGDSIRFLYAKSMNTFGTNFQLMGYRYSTQGFYTLDDVAYRRMEGYEYDYDYDGEHRDEPIIVNYHNLRFSRKDRLQLNISQSLNDFGSLYISGTHQKYWNTSDSDTWYQVGYTSSWVGISYSLSFSWNESVGIPDNERIVGLNVSVPFNVLTKRRYTRENALDRAYASFNANRNSNGQNSWLAGVGGTLLEGHNLSYHVSQGDTSNNGYTGSATANWQAAYGTLGVGYNYDRDQHDVNWQLSGGVVGHENGITLSQPLGDTNVLIKAPGAGGVRIENQTGILTDWRGYAVMPYATVYRYNRIALDTNTMGNSIDVEKNISSVVPTQGALVRANFDTRIGVRALITVTQGGKPVPFGSLVRENSTGITSMVGDDGQVYLSGAPLSGELLVQWGDGANSRCIAHYVLPKQSLQQAVTVISAVCTHPGS

SEQ ID NO: 3932 - protein, 816 aa, Escherichia coli; identical to SEQ ID NO: 3562

SEQ ID NO: 3933 - protein, 368 aa, Escherichia coli
MNKTITALAIIMASFAANASVLPETPVPFKSGTGAIDNDTVYIGLGSAGTAWYKLDTQAKDKKWTALAAFPGGPRDQATSAFIDGNLYVFGGIGKNSEGLTQVFNDVHKYNPKTNSWVKLMSHAPMGMAGHVTFVHNGKAYVTGGVNQNIFNGYFEDLNEAGKDSTTIDKINAHYFDKKAEDYFFNKFLLSFDPSTQQWSYAGESPWYGTAGAAVVNKGDKTWLINGEAKPGLRTDAVFELDFTGNNLKWNKLAPVASPDGVAGGFAGMSNDSLIFAGGAGFKGSRENYQNGKNYAHEGLKKSYSADIHLWHNGKWDKSGELSQGRAYGVSLPWNNSLLIIGGETAGGKAVTDSVLISVKDNKVTVQN

SEQ ID NO: 3934 - protein, 897 aa, Escherichia coli
MKLNIFTKSMIGMGLVCSALPALAMEAWNNQQGGNKYQVIFDGKIYENAWWVSSTNCPGKAKANDATNPWRLKRTATAAEISQFGNTLSCEKSGSSSSSNSNTPASNTPANGGSATPAQGTVPSNSSVVAWNKQQGGQTWYVVFNGAVYKNAWWVASSNCPGDAKGNDASNPWRYVRAATATEISETSNPQSCTSAPQPAPDVKPAPDVKPAPDVQPAPADKSNDNYAVVAWKGQEGSSTWYVIYNGGIYKNAWWVGAANCPGDAKENDASNPWRYVRAATATEISQYGNPGSCSVKPDNNGGTVTPVDPTPETPVTPTPDNSEPSTPADSGNDYSLQAWSGQEGSEIYHVIFNGNVYKNAWWVGSKDCPRGTSAENSNNPWRLERTATAAELSQYGNPTTCEIDNGGVIVADGFQASKAYSADSIVDYNDAHYKTSVDQDAWGFVPGGDNPWKKYEPAKAWSASTVYVKGDRVVVDGQAYEALFWTQSDNPALVANQNATGSNSRPWKPLGKAQSYSNEELNNAPQFNPETLYASDTLIRFNGVNYISQSKVQKVSPSDSNPWRVFVDWTGTKERVGTPKKAWPKHVYAPYVDFTLNTIPDLAALAKNHNVNHFTLAFVVSKDANTCLPTWGTAYGMHNYAQYSKIKALREAGGDVMLSIGGANNAPLAASCKNVDDLMQHYYDIVDNLNLKVLDFDIEGTWVADQASIERRNLAVKKVQDKWKSEGKDIAIWYTLPILPTGLTPEGMNVLSDAKAKGVELAGVNVMTMDYGNAICQSANTEGQNIHGKCATSAIANLHSQLKGLHPNKSDAEIDAMMGTTPMVGVNDVQGEVFYLSDARLVMQDAQKRNLGMVGIWSIARDLPGGTNLSPEFHGLTKEQAPKYAFSEIFAPFTKQ

SEQ ID NO: 3935 - protein, 207 aa, Escherichia coli; identical to SEQ ID NO: 2211

SEQ ID NO: 3936 - protein, 881 aa, Escherichia coli
MPDHSLFRLRILPWCIALAMSGSYSSVWAEDDIQFDSRFLELKGDTKIDLKRFSSQGYVEPGKYNLQVQLNKQPLAEEHDIYWYAGEDDASKTYACLTPELVAQFGLKEDVAKNLQWSHDGKCLKPGQLEGMEIKADLSQSALVISLPQAYLEYTWPDWDPPSRWDDGISGIIADYSITAQTRHEENGGDDSNEISGNGTVGVNLGPWRVRADWQTDYQHTRSNDDDDEFSGDDTQKKWEWSRYYAWRALPSLKAKLALGEDYLNSDIFDGFNYVGGSVSTDDQMLPPNLRGYAPDISGVAHTTAKVTVSQMGRVIYETQVPAGPFRIQDLGDSISGTLHVRIEEQNGQVQEYDISTASMPYLTRPGQVRYKVMMGRPQEWGHHVEGGFFSGAEASWGIANGWSLYGGALGDKNYQSAALGIGRDLSTFGAVAFDVTHSHTKLDKDTAYGKGSLDGNSFRVSYSKDFDQLNSRVTFAGYRFSEENFMTMSEYLDASDSEMVRTGNDKEMYTATYNQNFRDAGVSVYLNYTRHTYWDREEQTNYNIMLSHYFNMGSIRNMSVSLTGYRYEYDNRADKGMYISLSMPWGDNSTVSYNGNYGSGTDSSQVGYFSRVDDATHYQLNVGTSDKHTSVDGYYSHDGSLAQVDLSANYHEGQYTSAGLSLQGGATLTAQGGALHRTQNMGGTRLLIDADGVADVPVEGNGAAVYTNMFGKAVVSDVNNYYRNQAYIDLNKLPENAEATQSVVQATLTEGAIGYRKFAVISGQKAMAVLRLQDGSHPPFGAEVKNDNQQTVGLVDDDGNVYLAGVKPGEHMSVFWSGVAHCDINLPDPLPADLFNGLLLPCQHKGNVAPVVPDDIKPVIQEQTQQVTPGNPPVSISANQ

SEQ ID NO: 3937 - protein, 838 aa, Escherichia coli
MPQRHHQGHKRTPKQLALIIKRCLPMVLTGSGMLCTTANAEEYYFDPIMLETTKSGMQTTDLSRFSKKYAQLPGTYQVDIWLNKKKVSQKKITFTANAEQLLQPQFTVEQLRELGIKVDEIPALAEKDDDSVINSLEQIIPGTAAEFDFNHQRLNLSIPQIALYRDARGYVSPSRWDDGIPTLFTNYSFTGSDNRYRQGNRSQRQYLNMQNGANFGPWRLRNYSTWTRNDQTSSWNTISSYLQRDIKALKSQLLLGESATSGSIFSSYTFTGVQLASDDNMLPNSQRGFTPTVRGIANSSAIVTIRQNGYVIYQSNVPAGAFEINDLYPSSNSGDLEVTIEESDGTQRRFIQPYSSLPMMQRPGHLKHSATAGRYRADANSDSKEPEFAEATAIYGLNNTFTLYGGLLGSEDYYALGIGIGGTLGALGALSMDINRADTQFDNQHSFHGYQWRTQYIKDIPETNTNIAVSYYRYTNDGYFSFNEANTRNWDYNSRQKSEIQFNISQTIFDGVSLYASGSQQDYWGNNDKNRNISVGVSGQQWGVGYSLNYQYSRYTDQNNDRALSLNLSIPLERWLPRSRVSYQMTSQKDRPTQHEMRLDGSLLDDGRLSYSLEQSLDDDNNHNSSLNASYRSPYGTFSAGYSYGNDSSQYNYGVTGGVVIHPHGVTLSQYLGNAFALIDANGASGVRIQNYPGIATDPFGYAVVPYLTTYQENRLSVDTTQLPDNVDLEQTTQFVVPNRGAMVAARFNANIGYRVLVTVSDRNGKPLPFGALASNDETGQQSIVDEGGILYLSGISSKSQSWTVRWGNQADQQCQFAFSTPDSEPTTSVLQGTAQCH

SEQ ID NO: 3938 - protein, 869 aa, Escherichia coli
MKIPTTTDIPQRYTWCLAGICYSSLAILPSFLSYAESYFNPAFLLENGTSVADLSRFERGNHQPAGVYRVDLWRNDEFIGSQDIVFESTTVNTGDKSGGLMPCFNQALLERIGLNSSAFPELAQQQNNKCINLLKAVPDATINFDFAAMRLNITIPQIALLSSAHGYIPPEEWDEGIPALLLNYNFTGNRGNGNDSYFFSELSGINIGPWRLRNNGSWNYFRGNGYHSEQWNNIGTWVQRAIIPLKSELVMGDGNTGSDIFDGVGFRGVRLYSSDNMYPDSQQGFAPTVRGIARTAAQLTIRQNGFIIYQSYVSPGAFEITDLHPTSSNGDLDVTIDERDGNQQNYTIPYSTVPILQREGRFKFDLTAGDFRSGNSQQSSPFFFQGTALGGLPQEFTAYGGTQLSANYTAFLLGLGRNLGNWGAVSLDVTHARSQLADDSRHEGDSIRFLYAKSMNTFGTNFQLMGYRYSTQGFYTLDDVAYRRMEGYEYDYDYDGEHRDEPIIVNYHNLRFSRKDRLQLNISQSLNDFGSLYISGTHQKYWNTSDSDTWYQVGYTSSWVGISYSLSFSWNESVGIPDNERIVGLNVSVPFNVLTKRRYTRENALDRAYASFNANRNSNGQNSWLAGVGGTLLEGHNLSYHVSQGDTSNNGYTGSATANWQATYGTLGVGYNYDRDQHDVNWQLSGGVVGHENGITLSQPLGDTNVLIKAPGAGGVRIENQTGILTDWRGYAVMPYATVYRYNRIALDTNTMGNSIDVEKNISSVVPTQGALVRANFDTRIGVRALITVTQGGKPVPFGSLVRENSTGITSMVGDDGQVYLSGAPLSGELLVQWGDGANSRCIAHYVLPKQSLQQAVTVISAVCTHPGS

SEQ ID NO: 3939 - protein, 816 aa, Escherichia coli
MLRTTRWVAAIIFLYSFPGYAEETFDTHFMIGGMRGEKVSEYRFDNKQPLPGNYELDVYVNHQWRGKQDITIPESPAKPCLPKVLLTTLGVKTDNLNTEDNCILLDEAVHGGQYQWDISEHRLNLTIPQAYINELERGYVPPESWDRGIDAFYTSYNLSQYRSYDSNNNSNTASYGRFNSGLNLFSWQLHSDASYSKPDDMKGKWQSNTLYLERGWSQILSTVQIGENYTSSLIFDSLRFSGIRLFRDMQMLPDSMQSFTPLVQGVAQSNALITVSQNGYTIYQKEVPPGPFTIADLQLSGSGSDLDVSIKEADGSVRSFLVPYSSVPNMLQPGVSNFDFIAGRSQIYGVKNQEDFLEANYIYGLNNLLTLYGGTILSDNYNAITLGNGWNTPLGAISFDATRSSSKLNNDTRHEGTSYQVAYNKYLLQTATHFSVAAWRYASQDYRTFSDHLYENDKINHQSDDDDFYDIGRKNSLSANIMQPLSNNLGNVSLSALWRNYWGRSGNAKDYQFSYSNSWQRISYTFSASQSYDENDKEEERFNLFISIPFYWGDDIAKTRHQINLSNSTSFSKDGYSSNNTGITGIAGEHDQLNYGIYVNQQQQNNDTSLGTNLSWRTPIATIDGSYSHSKNAWQSGGSISSGLVVWPGGINITNQLSDTFAILDAPGLEGAHINGQKYNRTNSKGQVVYDLMIPHRENHLVLDIANSESETELQGNRQIIAPYRGAVSYVQFTTDQRKPWYIQALRPDGSPLTFGYDVLDLQENNIGVVGQGSRLFIRVDEIPTGIKVALNDEQNLFCTITFQHVIDENKTYICQ

SEQ ID NO: 3940 - protein, 205 aa, Escherichia coli
MPDFRLIRLLPLAALVLTACSVTTPKGPGKSPDSPQWRQHQQDVRNLNQYQTRGAFAYISDQQKVYARFFWQQTGQDRYRLLLTNPLGSTELELNAQPGNVQLVDNKGQRYTADDAEEMIGKLTGMPIPLNSLRQWILGLPGDATDYKLDDQYRLSEITYSQNGKNWKVVYGGYDTKTQPAMPANMELTDGGQRIKLKMDNWIVK

SEQ ID NO: 3941 - protein, 266 aa, Escherichia coli; identical to SEQ ID NO: 3338

SEQ ID NO: 3942 - protein, 869 aa, Escherichia coli; identical to SEQ ID NO: 2903

SEQ ID NO: 3943 - protein, 161 aa, Escherichia coli; identical to SEQ ID NO: 2582

SEQ ID NO: 3944 - protein, 161 aa, Escherichia coli; identical to SEQ ID NO: 2582

SEQ ID NO: 3945 - protein, 866 aa, Escherichia coli
MKTKTSTKRHNLTRIAMYCSIMYSGATIGAESVEYDPTFLMGGNASSIDVSRYSDGNPTLPGVYDVSIYVNEQPVANLEIPFIAIPDKKNAQACITLKNLLQLHIKTPPADEENTILLPRDETLGNCLDLSLAIPKSSVNYDPSEQRLDINVPQAWVMKNYQNYVDPSLWENGINAATLSYNINAYRSENSNYTNDSVYTSFNGGVNLGAWRLRSSGNYSWRNDAGSNVEFMNRYVQRDITAIRSQLIMGESYTTGETFDSVSIRGIRLYSDSRMLPPVLANFAPTIRGVANTNAKVSITQSGYKIYETTVPPGPFVIDDLSPSGYGSDLIVTIEEADGSKRTFSQPFSSVIQMLRPGVSRWDISGGQINKDDLHHEPNLLQATYYRGLSNLFTGYTGFQVTDNHYAAGLLGIGMNTSVGAISFDVTHSSVDIPDDKRYQGQSYRISWNKFFDLTDTSLNIAAYRYSTQDYLGLNDALTLIDEVEHPTQDLDPKTMRNYGRMKNQFTVSINQPLRFGKDDYGSFYTSGSWSDYWGGSKSRSNYSVGYSNSASWGSYSISAQRSWDEYSQTENSIYLSFSIPIEKLMGTEHRDSGFQSIDTQLSTNMDGNNQFNMSSSGYSNDNRVSYSVNAGYGMNKTGKDLSNIGGYASYESPWGTLAGSVSATSDNNRQYSVNTDGGFVLHSGGLTFSNDSFSDNDTIALVKAPGAKGARINYGNNTVDRWGYGVTSALSPYQENKIALDTENLENDIEMKSTSTVAVPRQGSVIFAGFETNQGQSAIMNIKRSDGKGIPFAADIHDETNAIIGNVGQGGQAFVRGIQQQGTIKITWLEASMPKTCIAQYQQPNVTSEKIQQTIILNNILCQLQ

SEQ ID NO: 3946 - protein, 863 aa, Escherichia coli
MHIRKHRLAGFFVRLFVACAFAVQAPLSSAELYFNPRFLADDPQAVADLSRFENGQELPPGTYRVDIYLNNGYMATRDVTFNTGDSEQGIVPCLTRAQLASMGLNTASVAGMNLLADDACVPLTTMVQDATAHLDVGQQRLNLTIPQAFMSNRARGYIPPELWDPGINAGLLNYNFSGNSVQNRIGGNSHYAYLNLQSGLNIGAWRLRDNTTWSYNSSDRSSGSKNKWQHINTWLERDIIPLRSRLTLGDGYTQGDIFDGINFRGAQLASDDNMLPDSQRGFAPVIHGIARGTAQVTIKQNGYDIYNSTVPPGPFTINDIYAAGNSGDLQVTIKEADGSTQIFTVPYSSVPLLQREGHTRYSITAGEYRSGNAQQEKPRFFQSTLLHGLPAGWTIYGGTQLADRYRAFNFGIGKNMGALGALSVDMTQANSTLPDDSQHDGQSVRFLYNKSLNESGTNIQLVGYRYSTSGYFNFADTTYSRMNGYNIETQDGVIQVKPKFTDYYNLAYNKRGKLQLTVTQQLGRSSTLYLSGSHQTYWGTSNVDEQFQAGLNTAFEDINWTLSYSLTKNAWQKGRDQMLARNVNIPFSHWLRSDSKSQWRHASASYSMSHDLNGRMTNLAGVYGTLLEDNNLSYSVQTGYAGGGDGNSGSTGYATLNYRGGYGNANIGYSHSDDIKQLYYGVSGGVLAHANGVTLGQPLNDTVVLVKAPGAKDAKVENQTGVRTDWRGYAVLPYATEYRENRVALDTNTLADNVDLDNAVANVVPTRGAIVRAEFKARVGIKLLMTLTHNNKPLPFGAMVTSESSQSSGIVADNGQVYLSGMPLAGKVQVKWGEEENAHCVANYQLPPESQQQLLTQLSAECR

SEQ ID NO: 3947 - protein, 237 aa, Escherichia coli; identical to SEQ ID NO: 1814

SEQ ID NO: 3948 - protein, 816 aa, Escherichia coli
MNIYRLSFISCLVMAIPSALAVEFNLNVLDKSMRDRIDISLLKGKGGIAPGEYFVSVAVNNNQISNGQKIDWKKNGDQTIPCINDLLVDKFGLKPEVRQSLPRLNQCVDFSSRPEILFIFDQASQQLNITIPQAWLAWHSDNWTPPSTWKEGVAGVLMDYNLFASSYRPQDGSNSTNLNAYGTAGINAGAWRLRSDYQLNQTDSDDNHEQSGEISRTYLFRPLPQLGSKLTLGETDFSSNIFDGFSYTGAALASDDRMLPWELRGYAPQISGIAQTNATVTVSHSGRVIYQKKVPPGPFIIDDLNQSVQGTLDVKVTEEDGRVNNFQVSAASTPFLTRQGQVRYKLAAGQPRTSMSHQTENETFFSNEVSWGMLSNTSLYGGLLISGDNYHSAAMGIGQNMLWLGALSFDVTWASSQFDTQQDERGLSYRFNYSKQVDATNSTISLAAYRFSDRHFHSYANYLDHKYNDNDAQDEKQTISLSVGQPITPLNLNLYANLLHQTWWNADASTTANITAGFNVDIGNWRDISISTSFNTTHYEDKDRDNQIYLSISLPFGNGGRVGYDMQNSNHSTTHRMSWNDTLDERNSWGMSTGLQSDRPDNGAQVSGNYQHLSSAGEWDISGTYAANDYSSVSSSWSGSFTATQYGAAFHRRSSTNEPRLMVSTDGVADIPVQGNLDYTNHFGIAVVPLISSYQPSTVAVNMNDLPDGVTVADNVIKETWIEGAIGYKSLASRSGKDVNLIIRNASGQFPPLGADIRQEDSGISVGMVGEEGHAWLSGVAENQQFTVIWGDSQRCSIHLPEHMEDTANRLILPCH

SEQ ID NO: 3949 - protein, 816 aa, Escherichia coli
MNIYRLSFVSCLVMAMPCALAVEFNLNVLDKSMRDRIDISLLKEKGVIAPGEYFVSVAVNNNQISNGQKINWQKKGDKTIPCINDSLVDKFGLKPDIRQSLPQIDRCIDFSSRPEMLFNFDQANQQLNISIPQAWLAWHSENWAPPSTWKEGVAGVLMDYNLFASNYRPQDGSSSTNLNAYGTTGINAGSWRLRSDYQLNNTDSEDSHEQSGGISRTYLFRPLPQLGSKLTLGETDFSSNIFDGFSYTGAALASDDRMLPWELRGYAPQISGIAQTNATVTISQSGRVIYQKKVPPGPFIIDDLNQSVQGTLDVKVTEEDGRVNNFQVSAASTPFLTRQGQVRYKLAAGQPRPSMSHQTENETFFSNEVSWGMLSNTSLYGGLLLSGDDYHSAAMGIGQNMLWLGALSFDVTWASSHFDTQQDERGLSYRFNYSKQVDATNSTISLAAYRFSDRHFHSYANYLDHKYNDSDAQDEKQTISLSVGQPITPLNLNLYANLLHQTWWNADASTTANITAGFNVDIGDWRDISISTSFNTTHYEDKDRDNQIYLSISLPFGNGGRVGYDMQNSSHSTTHRMSWNDTLDERNSWGMSAGLQSDRPDNGAQVSGNYQHLSSAGEWDISGTYAANDYSSVSSSWSGSFTATQYGAAFHRRSSTNEPRLMVSTDGMADIPVQGNLDYTNHFGIAVVPLISSYQPSTVAVNMNDLPDGVTVAENVIKETWIEGAIGYKSLASRSGKDVNVIIRNASGQFPPLGADIRQDDSGISVGMVGEEGHAWLSGVAENQKFTVVWGDSQHCSLHLPEHMEDTANRLILPCH

SEQ ID NO: 3950 - protein, 207 aa, Escherichia coli; identical to SEQ ID NO: 2211

SEQ ID NO: 3951 - protein, 826 aa, Escherichia coli
MLRMTPLASAIVALLLGIEAYAAEETFDTHFMIGGMKDQQVANIRLDDNQPLPGQYDIDIYVNKQWRGKYEIIVKDNPQETCLSREIIKRLGINTDNFASGKQCLTFEQLVQGGSYTWDIGVFRLDFSVPQAWVEELESGYVPPENWERGINAFYTSYYVSQYYSDYKASGNSKSTYVRFNSGLNLLGWQLHSDASFSKTNSNPGVWKSNTLYLERGFAQLLGTLRVGDMYTSSDIFDSVRFSGVRLFRDMQMLPNSKQNFTPRVQGIAQSNALVTIEQNGFVVYQKEVPPGPFAITDLQLAGGGADLDVSVKEADGSVTTYLVPYAAVPNMLQPGVSKYDFAAGRSHIEGASKQSDFVQAGYQYGFNNLLTLYGGSMVANNYYAFTLGTSWNTRIGAISVDATKSHSKQDNGDVFDGQSYQIAYNKFVSQTSTRFGLAAWRYSSRDYRTFNDHVWANNKDNYRRDENDIYDIADYYQNDFGRKNSFSANMSQSLPEGWGSVSLSTLWRDYWGRSGSSKDYQLSYSNNLRRISYTLAASQAYDENHHEEKRFNIFISIPFDWGDDVTTPRRQIYMSNSTTFDDQGFASNNTGLSGTVGNRDQFNYGVNLSHQHQGNETTAGANLTWNAPVATVNGSYSQSSTYRQAGASVSGGIVAWSGGVNLANRLSETFAVMNAPGIKDAYVNGQKYRTTNRNGVVVYDGMTPYRENHLMLDVSQSDSEAELRGNRKIAAPYRGAVVLVNFDTDQRKPWFIKALRTDGQPLTFGYEVNDIHGHNIGVVGQGSQLFIRTNEVPPSVNVAIDKQQGLSCTITFGKEIDESRNYICQ

SEQ ID NO: 3952 - protein, 826 aa, Escherichia coli; identical to SEQ ID NO: 3563

SEQ ID NO: 3953 - protein, 866 aa, Escherichia coli
MTIKPTKNYHNHLTRIATFCALLYCNSAFCAELVEYDHTFLMGQNASNIDLSRYSEGNPAIPGMYDVSVYVNDQPIINQSITFIEIEGKKNAQACITLKNLLQFHINSPDINNEKAVLLARDETLGNCLNLTKIIPQASVRYDVNEQRLDIDVPQAWVMKNYQNYVDPSLWENGINAAMLSYNLNGYHSETPGRRNDSIYAAFNGGMNLGAWRLRASGNYNWMTDSGSNYDFKNRYIQRDIASLRSQLILGESYTTGETFDSVSIRGIRLYSDSRMLPPTLASFAPIIHGVANTNAKVTITQGGYKIYETTVPPGAFVIDDLSPSGYGSDLIVTVEESDGSKRTFSQPFSSVVQMLRPGVGRWDISGGQVLKDDIQDEPNLFQASYYYGLNNYLTGYTGIQITDNNYTAGLLGLGLNTSVGAFSFDVTHSNVRIPDDKTYQGQSYRVSWNKLFEETSTSLNIAAYRYSTQNYLGLNDALTLIDEVKHPEQDLEPKSMRNYSRMKNQVTVSINQPLKFEKKDYGSFYLSGSWSDYWASGQNRSNYSIGYSNSASWGSYSVSAQRSWNEDGDTDDSVYLSFTIPIEKLLGTEQRTSGFQSIDTQMSSDFKGNNQLNVSSSGYSDNARVSYSVNTGYTMNKASKDLSYVGGYASYESPWGTLAGSVSANSDNSRQVSLSTDGGFVLHSGGLTFSNDSFSDSDTLAVVQAPGAQGARINYGNSTIDRWGYGVTSALSPYHENRIALDINDLENDVELKSTSAVAVPRQGSVVFADFETVQGQSAIMNITRSDGKNIPFAADIYDEQGNVIGNVGQGGQAFVRGIEQQGNISIKWLEESKPVSCLAHYQQSSEAEKIAQSIILNGIRCQIQ

SEQ ID NO: 3954 - protein, 843 aa, Escherichia coli
MNLVMRGMKDRIPFAVNNITCVILLSLFCNAASAVEFNTDVLDAADKKNIDFTRFSEAGYVLPGQYLLDVIVNGQSISPASLQISFVEPQSSGDKAEKKLPQACLTSDMVRLMGLTAESLDKVVYWHDGQCADFHGLPGVDIRPDTGAGVLRINMPQAWLEYSDATWLPPSRWDDGIPGLMLDYNLNGTVSRNYQGGDSHQFSYNGTVGGNLGPWRLRADYQGSQEQSRYNGEKTTNRNFTWSRFYLFRAIPRWRANLTLGENNINSDIFRSWSYTGASLESDDRMLPPRLRGYAPQITGIAETNARVVVSQQGRVLYDSMVPAGPFSIQDLDSSVRGRLDVEVIEQNGRKKTFQVDTASVPYLTRPGQVRYKLVSGRSRGYGHETEGPVFATGEASWGLSNQWSLYGGAVLAGDYNALAAGAGWDLGVPGTLSADITQSVARIEGERTFQGKSWRLSYSKRFDNADADITFAGYRFSERNYMTMEQYLNARYRNDYSSREKEMYTVTLNKNVADWNTSFNLQYSRQTYWDIRKTDYYTVSVNRYFNVFGLQGVAVGLSASRSKYLGRDNDSAYLRISVPLGTGTASYSGSMSNDRYVNMAGYTDTFNDGLDSYSLNAGLNSGGGLTSQRQINAYYSHRSPLANLSANIASLQKGYTSFGVSASGGATITGKGAALHAGGMSGGTRLLVDTDGVGGVPVDGGQVVTNRWGTGVVTDISSYYRNTTSVDLKRLPDDVEATRSVVESALTEGAIGYRKFSVLKGKRLFAILRLADGSQPPFGASVTSEKGRELGMVADEGLAWLSGVTPGETLSVNWDGKIQCQVNVPETAISDQQLLLPCTPQK

SEQ ID NO: 3955 - protein, 826 aa, Escherichia coli; identical to SEQ ID NO: 2758

SEQ ID NO: 3956 - protein, 879 aa, Escherichia coli
MPEHSFLRLRGLSWWIALAISGSPFNALADDTIQFDGRFLDLKGNTKIDLGRFSQKGYVEPGKYNLRVHVNNQPLPDDYDIYWYATENDPNKSYACLSPELVAQFGLKEDIAKNLQWIRDGQCLNTALLAGTEISGDLGQSALLVSVPQAYLEYTDSEWDPPSRWDDGIPGLIADYSINAQTRHENGGDDTNDISGNGTVGVNVGPWRLRADWQSDYQHTRSNDDGDTDDSGTQKNWEWSRYYAWRALPSLKAKLSLGEDYLNSDIFDGFSYIGGSISTDDQMLPPNLRGYAPDISGVAHTTAKVTVTQMGRVIYETQVPAGPFRIQDIGDSVSGTLHVRIEEQNGQVQEYDVSTASMPFLTRPGQVRYKVTMGRPQNWDHQVAGSFFSGGEASWGIANGWSLYGGALADENYQSAALGLGRDLALLGALAFDVTHSRVQLDDNSVYGNKTLDGNSYRVSYAKDFDELNSRVTFAGYRFSEKNYMTMSEYLDANDDDRARTGNDKEMYTVTYNQNFTDARVSVYLNYSHHTYWDRQDQTNYNMMLSHYFNLGSLRNLSVSLTGYRYEYDKSADKGVYLSLSLPWGDNSTISYNGNYGSGADSNQVSLYHRIDDASHYTVSAGTSENHSSVDGYYSHDGTLAKVDLSANYHEGQYTSAGISLQGGATLTAHGGALHRTQNMGGTRLLIDADGVANVPVEGNGSAVYTNMFGKAVVADVNDYYRNQAYIDLNKLPENAEATKSVVQATLTEGAIGYRKFAVISGEKAMAVLRLQDGSHPPFGAEVKNDNQQQVGLVDDEGNVYLAGVKPGEHMTVFWEGESHCDISLPDPLPNDLFNGLLLPCQQKGGSSPVIPHDIQPVIQEQTQQVTPMEPPMSVSSNQ

SEQ ID NO: 3957 - protein, 878 aa, Escherichia coli
MSYLNLRLYQRNTQCLHIRKHRLAGFFVRLVVACAFAAQAPLSSADLYFNPRFLADDPQAVADLSRFENGQELPPGTYRVDIYLNNGYMATRDVTFNTGDSEQGIVPCLTRAQLASMGLNTASVAGMNLLADDACVPLTTMVQDATAHLDVGQQRLNLTIPQAFMSNRARGYIPPELWDPGINAGLLNYNFSGNSVQNRIGGNSHYAYLNLQSGLNIGAWRLRDNTTWSYNSSDRSSGSKNKWQHINTWLERDIIPLRSRLTLGDGYTQGDIFDGINFRGAQLASDDNMLPDSQRGFAPVIHGIARGTAQVTIKQNGYDIYNSTVPPGPFTINDIYAAGNSGDLQVTIKEADGSTQIFTVPYSSVPLLQREGHTRYSITAGEYRSGNAQQEKPRFFQSTLLHGLPAGWTIYGGTQLADRYRAFNFGIGKNMGALGALSVDMTQANSTLPDDSQHDGQSVRFLYNKSLNESGTNIQLVGYRYSTSGYFNFADTTYSRMNGYNIETQDGVIQVKPKFTDYYNLAYNKRGKLQLTVTQQLGRTSTLYLSGSHQTYWGTSNVDEQFQAGLNTAFEDINWTLSYSLTKNAWQKGRDQMLALNVNIPFSHWLRSDSKSQWRHASASYSMSHDLNGRMTNLAGVYGTLLEDNNLSYSVQTGYAGGGDGNSGSTGYATLNYRGGYGNANIGYSHSDDIKQLYYGVSGGVLAHANGVTLGQPLNDTVVLVKAPGAKDAKVENQTGVRTDWRGYAVLPYATEYRENRVALDTNTLADNVDLDNAVANVVPTRGAIVRAEFKARVGIKLLMTLTHNNKPLPFGAMVTSESSQSSGIVADNGQVYLSGMPLAGKVQVKWGEEENAHCVANYQLPPESQQQLLTQLSAECR

SEQ ID NO: 3958 - protein, 860 aa, Escherichia coli; identical to SEQ ID NO: 3544

SEQ ID NO: 3959 - protein, 863 aa, Escherichia coli
MIMAAVPGQKLVHCNNKYKNTGHQGMPQRHHQGHKRTPKQLALIIKRCLPMVLTGSGMLCTTANAEEYYFDPIMLETTKSGMQTTDLSRFSKKYAQLPGTYQVDIWLNKKKVSQKKITFTANAEQLLQPQFTVEQLRELGIKVDEIPALAEKDDDSVINSLEQIIPGTAAEFDFNHQRLNLSIPQIALYRDARGYVSPSRWDDGIPTLFTNYSFTGSDNRYRQGNRSQRQYLNMQNGANFGPWRLRNYSTWTRNDQASSWNTISSYLQRDIKALKSQLLLGESATSGSIFSSYNFTGVQLASDDNMLPNSQRGFAPTVRGIANSSAIVTIRQNGYVIYQSNVPAGAFEINDLYPSSNSGDLEVTIEESDGTQRRFIQPYSSLPMMQRPGHLKYSATAGRYRADANSDSKEPEFAEATAIYGLNNTFTLYGGLLGSEDYYALGIGIGGTLGALGALSMDINRADTQFDNQHSFHGYQWRTQYIKDIPETNTNIAVSYYRYTNDGYFSFDEANTRNWDYNSRQKSEIQFNISQTIFDGVSLYASGSQQDYWGNNEKNRNISVGVSGQQWGIGYSLNYQYSRYTDQNNDRALSLNLSIPLERWLPRSRVSYQMTSQKDRPTQHEMRLDGSLLDDGRLSYSLEQSLDDDNNHNSSVNASYRSPYGTFSAGYSYGNDSSQYNYGVTGGVVIHPHGVTLSQYLGNAFALIDANGASGVRIQNYPGIATDPFGYAVVPYLTTYQENRLSVDTTQLPDNVDLEQTTQFVVPNRGAMVAARFNANIGYRVLVTVSDRNGKPLPFGALASNDDTGQQSIVDEGGILYLSGISSKSQSWTVRWGNQADQQCQFAFSTPDSEPTTSVLQGTAQCH

SEQ ID NO: 3960 - protein, 834 aa, Escherichia coli; identical to SEQ ID NO: 3118

SEQ ID NO: 3961 - protein, 871 aa, Escherichia coli; identical to SEQ ID NO: 3519

SEQ ID NO: 3962 - protein, 368 aa, Escherichia coli; identical to SEQ ID NO: 2374

SEQ ID NO: 3963 - protein, 851 aa, Escherichia coli
MPSFIGGLVVFVSAAFNAQAETWFDPAFFKDDPSMVADLSRFEKGQKITPGVYRVDIVLNQTIVDTRNVNFVEITPEKGIAACLTTESLDAMGVNTDAFPAFKQLDKQACVPLAEIIPDASVTFNVNKLRLEISVPQIAIKSNARGYVPPERWDEGINALLLGYSFSGANSIHSSADSDSGDSYFLNLNSGVNLGPWRLRNNSTWSRSSGQTAEWKNLSSYLQRAVIPLKGELTVGDDYTAGDFFDSVSFRGVQLASDDNMLPDSLKGFAPVVRGIAKSNAQITIKQNGYTIYQTYVSPGAFEISDLYSTSSSGDLLVEIKEADGSVNSYSVPFSSVPLLQRQGRIKYAVTLAKYRTNSNEQQESKFAQATLQWGGPWGTTWYGGGQYAEYYRAAMFGLGFNFGDFGAISFDATQAKSTLADQSEHKGQSYRFLYAKTLNHLGTNFQLMGYRYSTSGFYTLSDTMYKHMDGYEFNDGDDEDTPMWSRYYNLFYTKRGKLQVNISQQLGEYGSFYLSGSQQTYWHTDQQDRLLQFGYNTQIKDLSLGISWNYSKSRGQPDADQVFALNFSLPLNLLLPRSNDSYTRKKNYAWMTSNTSIDNEGHTTQNLGLTETLLDDGNLSYSVQQGYNSEGKTANGSASMDYKGAFADARVGYNYSDNGSQQQLNYALSGSLVAHSQGITLGQSLGETNVLIAAPGAENTRVANSTGLKTDWRGYTVVPYATSYRENRIALDAASLKRNVDLENAVVNVVPTKGALVLAEFNAHAGARVLMKTSKQGIPLRFGAIATLDGVQANSGIIDDDGSLYMAGLPAKGTISVRWGEAPDQICHINYELTEQQINSAITRMDAICR

SEQ ID NO: 3964 - protein, 266 aa, Escherichia coli
MAKSLFRALVALSFLAPLWLNAAPRVITLSPANTELAFAAGITPVGVSSYSDYPPQAQKIEQVSTWQGMNLERIVALKPDLVIAWRGGNAERQVDQLASLGIKVMWVDATSIEQIANALRQLAPWSPQPDKAEQAAQSLLDQYAQLKAQYADKPKKRVFLQFGINPPFTSGKESIQNQVLEVCGGENIFKDSRIPWPQVSREQVLARSPQAIVITGGPDQIPKIKQYWGEQLKIPVIPLTSDWFERASPRIILAAQQLCNALSQVD

SEQ ID NO: 3965 - protein, 367 aa, Escherichia coli; identical to SEQ ID NO: 2431

SEQ ID NO: 3966 - protein, 614 aa, Escherichia coli; identical to SEQ ID NO: 1883

SEQ ID NO: 3967 - protein, 89 aa, Escherichia coli; identical to SEQ ID NO: 2810

SEQ ID NO: 3968 - protein, 512 aa, Escherichia coli; identical to SEQ ID NO: 2813

SEQ ID NO: 3969 - protein, 227 aa, Escherichia coli; identical to SEQ ID NO: 3570

SEQ ID NO: 3970 - protein, 236 aa, Escherichia coli
MQTTRTPYSISFMATVLLLLLFACHSTVANAAVALGATRVIYPANQKQVLLPVTNNDPASVYLIQSWIENAGDQKDTQFVITPPLFSMQGKKENTLRIINATNHQLPGDRESLFWVNVKAIPAMEKDQKNENTLQLAIISRIKMFYRPTNLAMAPEEAPAMLRFRRSGSNLTLINPTPYFITVTNMKAGNSNLPNTMVPPKGEVSVDIPHAATGDISFQTINDYGALTPRIKATMQ

SEQ ID NO: 3971 - protein, 715 aa, Escherichia coli
MLYNIPCRIYILSTLSLCISGIVSTATATSSETKISNEETLVVTTNRSASNLWESPATIQVIDQQTLQNSTNASIADNLQDIPGVEITDNSLAGRKQIRIRGEASSRVLILIDGQEVTYQRAGDNYGVGLLIDESALERVEVVKGPYSVLYGSQAIGGIVNFITKKGGDKLASGVVKAVYNSATAGWEESIAVQGSIGGFDYRINGSYSDQGNRDTPDGRLPNTNYRNNSQGVWLGYNSGNHRFGLSLDRYRLATQTYYEDPDGSYEAFSVKIPKLEREKVGVFYDTDVDGDYLKKIHFDAYEQTIQRQFANEVKTTQPVPSPMIQALTVHNKTDTHDKQYTQAVTLQSHFSLPANNELVTGAQYKQDRVSQRSGGMTSSKSLTGFINKETRTRSYYESEQSTVSLFAQNDWQFADHWTWTMGVRQYWLSSKLTRGDGVSYTAGIISDTSLARESASDHEMVTSTSLRYSGFDNLELRAAFAQGYVFPTLSQLFMQTSAGGSVTYGNPDLKAEHSNNFELGARYNGNQWLIDSAVYYSEAKDYIASLICDGSIVCNGNTNSSRSSYYYYDNIDRAKTWGLEISAEYNGWVFSPYISGNLIRRQYETSTLKTTNTGEPAINGRIGLKHTLVMGQANIISDVFIRAASSAKDDSNGTETNVPGWATLNFAVNTEFGNEDQYRINLALNNLTDKRYRTAHETIPAAGFNAAIGFVWNF

SEQ ID NO: 3972 - protein, 208 aa, Escherichia coli; identical to SEQ ID NO: 1949

SEQ ID NO: 3973 - protein, 162 aa, Escherichia coli; identical to SEQ ID NO: 1969

SEQ ID NO: 3974 - protein, 362 aa, Escherichia coli; identical to SEQ ID NO: 2998

SEQ ID NO: 3975 - protein, 659 aa, Escherichia coli; identical to SEQ ID NO: 2942

SEQ ID NO: 3976 - protein, 232 aa, Escherichia coli; identical to SEQ ID NO: 2087

SEQ ID NO: 3977 - protein, 650 aa, Escherichia coli; identical to SEQ ID NO: 3057

SEQ ID NO: 3978 - protein, 774 aa, Escherichia coli
MTPLRVFRKTTPLVNAIRLSLLPLAGLSFSAFAAQVNIAPGSLDKALNQYAAHSGFTLSVDASLTRGKQSNGLHGDYDVESGLQQLLDGSGLQVKPLGNNSWTLEPAPAPKEDALTVVGDWLGDARENDVFEHAGARDVIRREDFAKTGATTMREVLNRIPGVSAPENNGTGSHDLAMNFGIRGLNPRLASRSTVLMDGIPVPFAPYGQPQLSLAPISLGNMDAIDVVRGGGAVRYGPQSVGGVVNFVTRAIPQDFGIEAGVEGQLSPTSSQNNPKETHNLMVGGTADNGFGTALLYSGTRGSDWREHSATRIDDLMLKSKYAPDEVHTFNSLLQYYDGEADMPGGLSRADYDADRWQSTRPYDHFWGRRKLASLGYQFQPDSQHKFNIQGFYTQTLRSGYLEQGKRITLSPRNYWVRGIEPRYSQIFMIGPSAHEVGVGYRYVNESTHEMRYYTATSSGQLPSGSSPYDRDTRSGTEAHAWYLDDKIDIGNWTITPGMRFEHIESYQNNAITGTHEEVSYNAPLPALNVLYHLTDSWNLYANTEGSFGTVQYSQIGKAVQSGNVEPEKARTWELGTRYDDGALTAEMGLFLINFNNQYDSNQTNDTVTARGKTRHTGLETQARYDLGTLTPTLDNVSIYASYAYVNAEIREKGDTYGNLVPFSPKHKGTLGVDYKPGNWTFNLNSDFQSSQFADNANTVKESADGSTGRIPGFMLWGARVAYDFGPQMADLNLAFGVKNIFDQDYFIRSYDDNNKGIYAGQPRTLYMQGSLKF

SEQ ID NO: 3979 - protein, 729 aa, Escherichia coli
MLSTQFNRDNQYQAITKPSLLAGCIALALLPSAAFAAPATEETVIVEGSATAPDDGENDYSVTSTSAGTKMQMTQRDIPQSVTIVSQQRMEDQQLQTLGEVMENTLGISKSQADSDRALYYSRGFQIDNYMVDGIPTYFESRWNLGDALSDMALFERVEVVRGATGLMTGTGNPSAAINMVRKHATSREFKGDVSAEYGSWNKERYVADLQSPLTEDGKIRARIVGGYQNNDSWLDRYNSEKTFFSGIVDADLGDLTTLSAGYEYQRIDVNSPTWGGLPRWNTDGSSNSYDRARSTAPDWAYNDKEINKVFMTLKQRFADTWQATLNATHSEVEFDSKMMYVDAYVNKADGMLVGPYSNYGPGFDYVGGTGWNSGKRKVDALDLFADGIYELFGRQHNLMFGGSYSKQNNRYFSSWANIFPDEIGSFYNFNGNFPQTDWSPQSLAQDDTTHMKSLYAATRVTLADPLHLILGARYTNWRVDTLTYSMEKNHTTPYAGLVFDINDNWSTYASYTSIFQPQNDRDSSGKYLAPITGNNYELGLKSDWMNSRLTTTLAIFRIEQDNVAQSTGTPIPGSNGETAYKAVDGTVSKGVEFELNGAITDNWQLTFGATRYIAEDNEGNAVNPNLPRTTVKMFTSYRLPVMPELTVGGGVNWQNRVYTDTVTPYGTFRAEQGSYALVDLFTRYQVTKNFSLQGNVNNLFDKTYDTNVEGSIVYGAPRNFSITGTYQF

SEQ ID NO: 3980 - protein, 478 aa, Escherichia coli; identical to SEQ ID NO: 2404

SEQ ID NO: 3981 - protein, 121 aa, Escherichia coli
MDAVLSVQGASAPVKKKSFFSKFTRLNMLRLARAVIPAAVLMMFFPQLAMAAGSSGQDLMASGNTTVKATFGKESSVVKWVVLAEVLVGAVMYMMTKNVKFLAGFAIISVFIAVGMAIVGL

SEQ ID NO: 3982 - protein, 510 aa, Escherichia coli
MKKLKINYLFIGILALLLAVALWPSIPWFGKADNRIAAIQARGELRVSTIHTPLTYNEINGKPFGLDYELAKQFADYLGVKLKVTVRQNISQLFDDLDNGNADLLAAGLVYNSERVKNYQPGPTYYSVSQQLVYKVGQYRPRTLGNLTAEQLTVAPGHVVVNDLQTLKETKFPELSWKVDDKKGSAELMEDVIEGKLDYTIADSVAISLFQRVHPELAVALDITDEQPVTWFSPLDGDNTLSAALLDFFNEMNEDGTLARIEEKYLGHGDDFDYVDTRTFLRAVDAVLPQLKPLFEKYAEEIDWRLLAAIAYQESHWDAQATSPTGVRGMMMLTKNTAQSLGITDRTDAEQSISGGVRYLQDMMSKVPESVPENERIWFALAAYNMGYAHMLDARALTAKTKGNPDSWADVKQRLPLLSQKPYYSKLTYGYARGHEAYAYVENIRKYQISLVGYLQEKEKQATEAAMQLAQDYPAVSPTELGKEKFPFLSFLSQSSSNYLTHSPVMLPTY

SEQ ID NO: 3983 - protein, 359 aa, Escherichia coli; identical to SEQ ID NO: 2329

SEQ ID NO: 3984 - protein, 229 aa, Escherichia coli
MALLIFAVLSLLVAGELQAGVVVGGTRFIFPADRESISILLTNTSQESWLINSKINRPTRWAGGEASTVPAPLLAAPPLILLKPGTTGTLRLLRTESDILPVDRETLFELSIASVPSGKVENQSVKVAMRSVFKLFWRPEGLPGDPLEAYQQLRWTRNSQGVQLTNPTPYYINLIQVSVNGKALSNVGVVPPKSQRQTSWCQAIAPCHVAWRAINDYGGLSAKKEQNLP

SEQ ID NO: 3985 - protein, 193 aa, Escherichia coli; identical to SEQ ID NO: 2246

SEQ ID NO: 3986 - protein, 237 aa, Escherichia coli; identical to SEQ ID NO: 2816

SEQ ID NO: 3987 - protein, 89 aa, Escherichia coli; identical to SEQ ID NO: 2812

SEQ ID NO: 3988 - protein, 828 aa, Escherichia coli; identical to SEQ ID NO: 2388

SEQ ID NO: 3989 - protein, 162 aa, Escherichia coli; identical to SEQ ID NO: 1973

SEQ ID NO: 3990 - protein, 539 aa, Escherichia coli; identical to SEQ ID NO: 3146

SEQ ID NO: 3991 - protein, 700 aa, Escherichia coli
MKIFSVRQTVLPALLALSPVVFAADEQTMIVSAAPQVVSELDTPAAVSVVDGEEMRLATPRINLSESLTSVPGLQVQNRQNYAQDLQLSIRGFGSRSTYGIRGIRLYVDGIPATMPDGQGQTSNIDLSSVQNVEVLRGPFSALYGNASGGVMNVTTQTGQQPPTIEASSYYGSFGSWRYGLKATGATGDGTQPGDVDYTVSTTRFTTHGYRDHSGAQKNLANAKLGVRIDEASKLSLIFNSVDIKADDPGGLTKAEWKANPQQAPRAEQYDTRKTIKQTQAGLRYERSLSSRDDMSVMMYAGERETTQYQSIPMAPQLNPSHAGGVITLQRHYQGIDSRWTHRGELGVPVTFTTGLNYENMSENRKGYNNFRLNSGMPEYGQKGELRRDERNLMWNIDPYLQTQWQLSEKLSLDADVRYSSVWFDSNDHYVTPGNGDDSGDASYHKWLPAGSLKYAMTDAWNIYLAAGRGFETPTINELSYRADGQSGMNLGLKPSTNDTIEIGSKTRIGDGLLSLALFQTDTDDEIVVDSSSGGRTTYKNAGKTRRQGAELAWDQRFAGDFRVNASWTWLDATYRSNVCNEQDCNGNRMPGIARNMGFASIGYVPEDGWYAGTEARYMGDIMADDENTAKAPSYTLVGLFTGYKYNYHNLTVDLFGRVDNLFDKEYVGSVIVNESNGRYYEPSPGRNYGVGMNIAWRFE

SEQ ID NO: 3992 - protein, 760 aa, Escherichia coli
MENNRNFPARQFHSLTFFAGLCIGITPVAQALAAEGQANADDTLVVEASTPSLYAPQQSADPKFSRPVADTTRTMTVISEQVIKDQGATNLTDALKNVPGVGAFFAGENGNSTTGDAIYMRGADTSNSIYIDGIRDIGSVSRDTFNTEQVEVIKGPSGTDYGRSAPTGSINMISKQPRNDSGIDASASIGSAWFRRGTLDVNQVIGDTTAVRLNVMGEKTHDAGRDKVKNERYGVAPSVAFGLGTANRLYLNYLHVTQHNTPDGGIPTIGLPGYSAPSAGTAALNHSGKVDTHNFYGTDSDYDDSTTDTATMRFEHDINDNTTIRNTTRWSRVKQDYLMTAIMGGASNITQPTSDVNSWTWSRTANTKDVSNKILTNQTNLTSTFYTGSIGHDVSTGVEFTRETQTNYGVNPVTLPAVNIYHPDSSIHPGGLTRNGANANGQTDTFAIYAFDTLQITRDFELNGGIRLDNYHTEYDSATACGGSGRGAITCPVGVAKGSPVTTVDTARSGNLVNWKAGALYHLTENGNVYINYAVSQQPPGGNNFALAQSGSGNSANRTDFKPQKANTSEIGTKWQVLDKRLLLTAALFRTDIENEVEQNDDGTYSQYGKKRVEGYEISVAGNITPAWQVIGGYTQQKATIKNGKDVAQDGSSSLPYTPEHAFTLWSQYQATDDISVGAGARYIGSMHKGSDGAVGTPAFTEGYWVADAKLGYRVNRNLDFQLNVYNLFDTDYVASINKSGYRYHPGEPRTFLLTANMHF

SEQ ID NO: 3993 - protein, 678 aa, Escherichia coli
MVPSTFSRLKAARCLPVVLAALIFAGCGTHTPDQSTAYMQGTAQADSAFYLQQMQQSSDDTRINWQLLAIRALVKEGKTGQAVELFNQLPQELNDAQRREKTLLAVEIKLAQKDFAGAQNLLAKITPADLEQNQQARYWQAKIDASQGRPSIDLLRALIAQEPLLGAKEKQQNIDATWQALSSMTQEQANTLVINADENILQGWLDLQRVWFDNRNDPDMMKAGIADWQKRYPNNPGAKMLPTQLVNVKAFKPASTNKIALLLPLNGQAAVFGRTIQQGFEAAKNIGTQPVAAQIAAAPAADVAEQPQPQTVDGVASPAQASVSDLTGEQPAAQPVPVSAPATSTAAVSAPANPSAELKIYDTSSQPLSQILSQVQQDGASIVVGPLLKNNVEELLKSNTPLNVLALNQPENIENRVNICYFALSPEDEARDAARHIRDQGKQAPLVLIPRSSLGDRVANAFAQEWQKLGGGTVLQQKFGSTSELRAGVNGGSGIALTGSPITLRATTDSGMTTNNPTLQTTPTDDQFTNNGGRVDAVYIVATPGEIAFIKPMIAMRNGSQSGATLYASSRSAQGTAGPDFRLEMEGLQYSEIPMLAGGNLPLMQQALSAVNNDYSLARMYAMGVDAWSLANHFSQMRQVQGFEINGNTGSLTANPDCVINRNLSWLQYQQGQVVPVS

SEQ ID NO: 3994 - protein, 351 aa, Escherichia coli; identical to SEQ ID NO: 2872

SEQ ID NO: 3995 - protein, 241 aa, Escherichia coli; identical to SEQ ID NO: 2922

SEQ ID NO: 3996 - protein, 111 aa, Escherichia coli
MKKQIEGMTMKKVLALVVAAAMGLSSAAFAAETATTPAPTATTTKAAPAKTTHHKKQHKAAPAQKAQAAKKHHKNAKTEQKAPEQKAQAAKKHAKKHSHQQPAKPAAQPAA

SEQ ID NO: 3997 - protein, 828 aa, Escherichia coli; identical to SEQ ID NO: 2388

SEQ ID NO: 3998 - protein, 367 aa, Escherichia coli
MKVKVLSLLVPALLVAGAANAAEVYNKDGNKLDLYGKVDGLHYFSDDKSVDGDQTYMRLGFKGETQVTDQLTGYGQWEYQIQGNSAENENNSWTRVAFAGLKFQDVGSFDYGRNYGVVYDVTSWTDVLPEFGGDTYGSDNFMQQRGNGFATYRNTDFFGLVDGLNFAVQYQGKNGSVSGEGMTNNGRGALRQNGDGVGGSITYDYEGFGIGGAISSSKRTDDQNSPLYIGNGDRAETYTGGLKYDANNIYLAAQYTQTYNATRVGSLGWANKAQNFEAVAQYQFDFGLRPSVAYLQSKGKNLGTIGTRNYDDEDILKYVDVGATYYFNKNMSTYVDYKINLLDDNQFTRDAGINTDNIVALGLVYQF

SEQ ID NO: 3999 - protein, 208 aa, Escherichia coli; identical to SEQ ID NO: 1949

SEQ ID NO: 4000 - protein, 518 aa, Escherichia coli; identical to SEQ ID NO: 2349

SEQ ID NO: 4001 - protein, 243 aa, Escherichia coli
MSRKSCLIRLFKTTVSCKLFTAIILSVFLVQPALTYAGVVIGGTRVVYLSNNPDKSISVFSKEEKIPYLIQAWVDPFNKEDKSKAPFTVIPPVSRLEPAQEKVLRIIHTKGVSLPDDRESVFWLNIKNIPPSASNKAANSLEIAVKTRIKLFWRPASIRLIPEDAAPKVKWHREGRNLIVENPNPIHISVMDVIVDGHDVPLNMIRPFETLTLPLPANSAGGQMIWRFINDYGAVSDPIKMTL

SEQ ID NO: 4002 - protein, 412 aa, Escherichia coli
MKQWIAALLLMLIPGVQAAKPQKVTLMVDDVPVAQVLQALAEQEKLNLVVSPDVRGTVSLHLTDVPWKQALQTVVKSAGLITRQEGNILSVHSVAWQNDNIARQEAEQARAQANLPLENRNITLQYADAGELAKAGEKLLSAKGSMTVDKRTNRLLLRDNKAALSALEQWVAQMDLPVGQVELSAHIVTINEKSLRELGVKWTLADAQQAGGVGQVTTLGSDLSVATATTHVGFNIGRINGRLLDLELSALEQKQQLDIIASPRLLASHLQPASIKQGSEIPYQVSSGESGATSVEFKEAVLGMEVTPTVLQKGRIRLKLHISQNVPGQVLQQADGEVLAIDKQEIETQVEVKSGETLALGGIFTRKNKSGQDSVPLLGDIPWFGQLFRHDGKEDERRELVVFITPRLVSSE

SEQ ID NO: 4003 - protein, 274 aa, Escherichia coli; identical to SEQ ID NO: 2317

SEQ ID NO: 4004 - protein, 230 aa, Escherichia coli
MMTKIKLLMLIIFYLIISASAHAAGGIALGATRIIYPADAKQTAVWIRNSHTNERFLVNSWIENSSGVKEKSFIITPPLFVSEPKSENTLRIIYTGPPLAADRESLFWMNVKTIPSVDKNALNGRNVLQLAILSRMKLFLRPIQLQELPAEAPYTLKFSRSGNYINVHNPSPFYVTLVNLQVGSQKLGNAMAAPRVNSQIPLPSGVQGKLKFQTVNDYGSVTPVREVNLN

SEQ ID NO: 4005 - protein, 678 aa, Escherichia coli
MVPSTFSRLKAARCLPVVLAALIFAGCGTHTPDQSTAYMQGTAQADSAFYLQQMQQSSDDTRINWQLLAIRALVKEGKTGQAVELFNQLPQELNDSQRREKTLLAAEIKLAQKDFAGAQNLLAKITPADLEQNQQARYWQAKIDASQGRPSIDLLRALIAQEPLLGAKEKQQNIDATWQALSSMTQEQANTLVINADENILQGWLDLQRVWFDNRNDPDMMKAGIADWQKRYPNNPGAKMLPTQLVNVKAFKPASTNKIALMLPLNGQAAVFGRTIQQGFEAAKNIGTQPVAAQVAAAPAADVAEQPQPQTVDGVASPAQASVSDLTGEQPAAQPVPVSAPAATTAAVSAPANPSAELKIYDTSSQPLSQILSQVQQDGASIVVGPLLKNNVEELLKSNTPLNVLALNQPENIENRVNICYFALSPEDEARDAARHIRDQGKQAPLVLIPRSSLGDRVANAFAQEWQKLGGGTVLQQKFGSTSELRAGVNGGSGIALTGSPITPRATTDSGMTTNNPTLQTTPTDDQFTNNGGRVDAVYIVATPGEIAFIKPMIAMRNGSHSGATLYASSRSAQGTAGPDFRLEMEGLQYSEIPMLAGGNLPLMQQALSAVNNDYSLARMYAMGVDAWSLANHFSQMRQVQGFEINGNTGSLTANPDCVINRKLSWLQYQQGQVVPAS

SEQ ID NO: 4006 - protein, 446 aa, Escherichia coli; identical to SEQ ID NO: 2176

SEQ ID NO: 4007 - protein, 203 aa, Escherichia coli; identical to SEQ ID NO: 2201

SEQ ID NO: 4008 - protein, 430 aa, Escherichia coli; identical to SEQ ID NO: 2617

SEQ ID NO: 4009 - protein, 227 aa, Escherichia coli
MRIITALLMSFFILPVHAGVVIYGTRIIYPEKNREVLVQLMNQSKNASLIQAWIDDGNTTIAPEKIQVPFILTPPVSRVAGGSGQQLKIRKMPNNLPHNKESLFYLNVLDIPPNNPQNAGKNKIKLALQNRIKLLWRPSGIAPVDKKSLSQLNIKKKNNAISINNETANWITVTTIKAQNVKVNNESILLPPFSNNDITLKNNHASEYELTVVDDYGNNIHSKIAAR

SEQ ID NO: 4010 - protein, 259 aa, Escherichia coli
MHQFPLSSLMINVLICILICCTNAQAGVVVGGTRFVYPEKQSSISVELKNTASKDMLVKISVTPDDGRQLKGTLESQPLLPDKAFIATPPLLVLKQDKNTKIRINRVGGQLPIDRESLFILNIAVLPAQEQNSQLKNENQLQVAVRNRMKIFYRPETLSGNPLDAYQQLRWSRNNEAVTVFNPTPWYVTLYNLSIDGKSINGGMVAPFSHRQQDWCQRQGYCEINWQTLDLYNNALPVWSVKLNVLQNNAIMGAVAIHG

SEQ ID NO: 4011 - protein, 170 aa, Escherichia coli; identical to SEQ ID NO: 2565

SEQ ID NO: 4012 - protein, 752 aa, Escherichia coli
MARSKTAQPKHSLRKIAVVVATAVSGMSVYAQAAVEPKEDTITVTAAPAPQESAWGPAATIAARQSATGTKTDTPIQKVPQSISVVTAEEMALHQPKSVKEALSYTPGVAVGTRGASNTYDYLIIRGFAADGQSQNNYLNGLKMQGNFYNDAVIDPYMLERAEIMRGPVSVLYGKSSPGGLLNMVSKRPTTEPLKEIQFKAGTDSLFQTGFDFSDALDDDGVYSYRLTGIARSANAQQKGAEEQRYAIAPAFTWRPDDKTNFTFLSYFQNEPETGYYGWLPKEGTVEPLPNGKRLPTDFNEGAKNNTYSRNEKMVGYSFDHEFNDTFTVRQNLRFAQNKVSQKSVYGYGMCSDPLYTKDDDALKASPCLSIPQSEWNHTLTRQYVIDNEKLENFSVDTQLQSKFATGSVEHTLLTGVDFMRMRNDIDSWFGYAGSVAPSDIYNLDRSDFDFGAHPDPSGPYRVLLKQKQTGLYVQDQAQWDKVLVTLGGRYDWAEQSSFNRDYGNKSDRDDKQFTWRGGVNYLFDNGVTPYFSYSESFEPASLTDANGDLFAPSKGKQYEVGVKYVPEDRPIVLTGALYQLTKTNNLMADPNNPNFSIEGGEIRARGVELEAKAALSASVNVVGSYTYTDAEYTTDTTYKGNTPAQVPKHMASLWADYTFFDGPLSGLTLGTGGRYTGSSYGDPANSFKVGSYTVVDALVRYDLARVGMAGSNVALHVNNLFDREYVASCFNTYGCFWGAERQVVATATFRF

SEQ ID NO: 4013 - protein, 517 aa, Escherichia coli; identical to SEQ ID NO: 2462

SEQ ID NO: 4014 - protein, 366 aa, Escherichia coli
MKLKIVAVVVTGLLAANVAHAAEVYNKDGNKLDLYGKVTALRYFTDDKRDDGDKTYARLGFKGETQINDQMIGFGHWEYDFKGYNDEANGSRGNKTRLAYAGLKISEFGSLDYGRNYGVGYDIGSWTDMLPEFGGDTWSQKDVFMTYRTTGVATYRNYDFFGLIEGLNFAAQYQGKNERTDNGHLYGADYTRANGDGFGISSTYVYDGFGIGAVYTKSDRTNAQERAAANPLNASGKNAELWATGIKYDANNIYFAANYAETLNMTTYGDGYISNKAQSFEVVAQYQFDFGLRPSLAYLKSKGRDLGRYGDQDMIEYIDVGATYFFNKNMSTYVDYKINLIDESDFTRAVDIRTDNIVATGITYQF

SEQ ID NO: 4015 - protein, 729 aa, Escherichia coli
MLSTQFNRDNQHQTTSKPSLLAACIALALLPSAAFAAPATEETVIVEGSATAPDDGENDYSVTSTSAGTKMQMTQRDIPQSVTIVSQQRMEDQQLQTLGEVMENTLGISKSQADSDRALYYSRGFQIDNYMVDGIPTYFESRWNLGDALSDMALFERVEVVRGATGLMTGTGNPSAAINMVRKHATSREFKGDVSAEYGSWNKERYVADLQSPLTEDGKIRARIVGGYQNNDSWLDRYNSEKTFFSGIVDADLGDLTTLSAGYEYQRIDVNSPTWGGLPRWNTDGSSNSYDRARSTAPDWAYNDKEINKVFMTLKQRFADTWQATLNATHSEVEFDSKMMYVDAYVNKADGMLVGPYSNYGPGFDYVGGTGWNSGKRKVDALDLFADGSYELFGRQHNLMFGGSYSKQNNRYFSSWANIFPDEIGSFYNFNGNFPQTDWSPQSLAQDDTTHMKSLYAATRVTLADPLHLILGARYTNWRVDTLTYSMEKNHTTPYAGLVFDINDNWSTYASYTSIFQPQNDRDSSGKYLAPITGNNYELGLKSDWMNSRLTTTLAIFRIEQDNVAQSTGTPIPGSNGETAYKAVDGTVSKGVEFELNGAITDNWQLTFGATRYIAEDNEGNAVNPNLPRTTVKMFTSYRLPVMPELTVGGGVNWQNRVYTDTVTPYGTFRAEQGSYALVDLFTRYQVTKNFSLQGNVNNLFDKTYDTNVEGSIVYGAPRNFSITGTYQF

SEQ ID NO: 4016 - protein, 614 aa, Escherichia coli
MIKKASLLTACSVTAFSAWAQDTSPDTLVVTANRFEQPRSTVLAPTTVVTRQDIDRWQSTSVNDVLRRLPGVDITQNGGSGQLSSIFIRGTNASHVLVLIDGVRLNLAGVSGSADLSQFPIALVQRVEYIRGPRSAVYGSDAIGGVVNIITTRDEPGTEISAGWGSNSYQNYDVSTQQQLGDKTRVTLLGDYAHTHGYDVVAYGNTGTQAQTDNDGFLSKTLYGALEHNFTDAWSGFVRGYGYDNRTNYDAYYSPGSPLLDTRKLYSQSWDAGLRYNGELIKSQLITSYSHSKDYNYDPHYGRYDSSATLDEMKQYTVQWANNVTVGHGNIGAGVDWQKQTTTPGTGYVEDGYDQRNTGIYLTGLQQVGDFTFEGAARSDDNSQFGRHGTWQTSAGWEFIEGYRFIASYGTSYKAPNLGQLYGFYGNPNLNPEKSKQWEGAFEGLTAGVNWRISGYRNDVSDLIDYDDHTLKYYNEGKARIKGVEATANFDTGPLTHTVSYDYVDARNAITDTPLLRRAKQQVKYQLDWQLYDFDWGITYQYLGTRYDKDYSSYPYQTVKMGGVSLWDLAVAYPVTSHLTVRGKIANLFDKDYETVYGYQTAGREYTLSGSYTF

SEQ ID NO: 4017 - protein, 402 aa, Escherichia coli
MKIIITREYIMKRKVLAMLVPALLVAGAANAAEVYNKDGNKLDLYGKVAGLHYFSDDAGSDGDMSYARIGFKGETQIADQFTGYGQWEFNIGANGPESDKGNTATRLAFAGLGFGQNGTFDYGRNYGVVYDIEAWTDMLPEFGGDTYAGADNFMNGRANGVATYRNNGFFGQVDGLNFALQYQGNNEDDGLFGQEGSGNGNGRKLAKENGDGFGMSTSYDFDFGLSLGAAYSNSDRTDNQVHKGWHNTRDGDRSDTTAGGETAEAWTVGAKYDANNVYLAAMYAETRNMTGYGKADAIANKTQNFEVVAQYQFDFGLRPSIAYLQSKGKDLGGWAHDGNGDPRYTNKDLVKYVDIGATYYFNKNMSTYVDYKINLLDNDDDFYEANGIATDDIVAVGLVYQF

SEQ ID NO: 4018 - protein, 360 aa, Escherichia coli
MKKLTVAISAVAASVLMAMSAQAAEIYNKDSNKLDLYGKVNAKHYFSSNDADDGDTTYARLGFKGETQINDQLTGFGQWEYEFKGNRAESQGSSKDKTRLAFAGLKFGDYGSIDYGRNYGVAYDIGAWTDVLPEFGGDTWTQTDVFMTGRTTGVATYRNNDFFGLVDGLNFAAQYQGKNDRTDVTEANGDGFGFSTTYEYEGFGVGATYAKSDRTDGQVAYGKSKFNASGKNAEVWAAGLKYDANNIYLATTYSETQNMTVFGNNHIANKAQNFEAVAQYQFDFGLRPSVAYLQSKGKDLGVHGDRDLVKYVDVGATYYFNKNMSTFVDYKINLIDDSKFTKTAGIDTDDIVAVGLVYQF

SEQ ID NO: 4019 - protein, 231 aa, Escherichia coli; identical to SEQ ID NO: 2868

SEQ ID NO: 4020 - protein, 240 aa, Escherichia coli
MAAIFMAASINIRGIKMKGLLSLLISSMIFPVHAGMVIFGTRIIYPAEQKEVMVQLMNQGNRSSLMQAWIDDGDTSLPPEKIQVPFMLTPPVVKVAANSGQQIKIKIMPNKLPSNKESIFYLNVLDIPPNSPEDEGKNALKFAMQNRIKLFYRPAGIAPVNKTTFKKLRVSRSGNNVVIKNDSPNWVTISDVKANNVKVNYETIMIAPQESQNVSEKNNNANGWQLTIIDDHGNYISDKI

SEQ ID NO: 4021 - protein, 208 aa, Escherichia coli; identical to SEQ ID NO: 1949

SEQ ID NO: 4022 - protein, 351 aa, Escherichia coli; identical to SEQ ID NO: 2872

SEQ ID NO: 4023 - protein, 250 aa, Escherichia coli
MSDLLCSAKLGATTLALLLSAASLSAQASVTPDRTRLIFNESDKSISVTLRNNDPKLPYLAQSWIEDEKGNKISSPLTVLPPVQRIDSMMNGQVKVQGMPDINKLPADRESMFYFNVREIPPKSDKPNTLQIALQTRIKLFWRPKALENTSMKSPWQHKVTLTRSGQAFTVNNPTPYYVIISNASAQKNGNPATGFSPLVIEPKTTVPLNVKMDSVPVLTYVNDFGARMPLFFRCDGNTCQVDKVQSLKG

SEQ ID NO: 4024 - protein, 367 aa, Escherichia coli; identical to SEQ ID NO: 2433

SEQ ID NO: 4025 - protein, 678 aa, Escherichia coli; identical to SEQ ID NO: 2902

SEQ ID NO: 4026 - protein, 122 aa, Escherichia coli; identical to SEQ ID NO: 2915

SEQ ID NO: 4027 - protein, 659 aa, Escherichia coli
MFRLNPFVRVGLCLSAISCAWPVLAVDDDGETMVVTASSVEQNLKDAPASISVITQEDLQRKPVQNLKDVLKEVPGVQLTNEGDNRKGVSIRGLDSSYTLILVDGKRVNSRNAVFRHNDFDLNWIPVDSIERIEVVRGPMSSLYGSDALGGVVNIITKKIGQKWSGTVTVDTTIQEHRDRGDTYNGQFFTSGPLIDGVLGMKAYGSLAKREKDDPQNSTTTDTGDTPRIEGFSSRDGNVEFAWTPNQNHDFTAGYGFDRQDRDSDSLDKNRLERQNYSVSHNGRWDYGTSELKYYGEKVENKNPGNSSPITSESNTVDGKYTLPLTAINQFLTVGGEWRHDKLSDAVNLTGGTSSKTSASQYALFVEDEWRIFEPLALTTGVRMDDHETYGEHWSPRAYLVYNATDTVTVKGGWATAFKAPSLLQLSPDWTSNSCRGACKIVGSPDLKPETSESWELGLYYMGEEGWLEGVESSVTVFRNDVKDRISISRTSDVNAAPGYQNFVGFTANGVPVFSYYNVNKARIQGVETELKIPFNDEWKLSLNYTYNDGRDVSNGENKPLSDLPFHTANGTLDWKPLALEDWSFYVSGHYTGQKRADSATAKTPGGYTIWNTGAAWQVTKDVKLRAGVLNLGDKDLSRDDYSYNEDGRRYFMAVDYRF

SEQ ID NO: 4028 - protein, 567 aa, Escherichia coli
MKIKLRITIILISALCIFNGLLTPGAYAATANGYVANKENLRSFFETVSSYAGKPTIVSKLAMKKQISGNFDLTEPYALIERLSAQMGLIWYDDGKAIYIYDSSEMRNALINLRKVSTNEFNNFLKKSGLYNSRYEIKGGGNGTFYVSGPPVYVDLVVNAAKLMEQNSDGIEIGRNKVGIIHLVNTFVNDRTYELRGEKIVIPGMAKVLSTLLNNNIKQSTGVNVLSEISSRQQLKNVSRMPPFPGAEEDDDLQVEKIISTAGAPETDDIQIIAYPDTNSLLVKGTVSQVDFIEKLVATLDIPKRHIELSLWIIDIDKTDLEQLGADWSGTIKIGSSLSASFNNSGSISTLDGTQFIATIQALAQKRRAAVVARPVVLTQENIPAIFDNNRTFYTKLVGERTAELDEVTYGTMISVLPRFASRNQIELLLNIEDGNEINSDKTNVDDLPQVGRTLISTIARVPQGKSLLIGGYTRDTNTYESRKIPILGSIPFIGKLFGYEGTNANNIVRVFLIEPREIDERMMNNANEAAVDARAITQQMAKNKEINDELLQKWIKTYLNREVVGG

SEQ ID NO: 4029 - protein, 700 aa, Escherichia coli
MKIFSVRQTVLPALLVLSPVVFAADEQTMIVSAAPQVVSELDTPAAVSVVDGEEMRLATPRINLSESLTSVPGLQVQNRQNYAQDLQLSIRGFGSRSTYGIRGIRLYVDGIPATMPDGQGQTSNIDLSSVQNVEVLRGPFSALYGNASGGVMNVITQTGQQPPTIEASSYYGSFGSWRYGLKATGAMGDGTQPGDVDYTVSTTRFTTHGYRDHSGAQKNLANAKLGVRIDDASKLSLIFNSVDIKADDPGGLTEAEWKANPQQAPRAEQYDTRKTIKQTQAGLRYERSLSAQDDMSVMMYAGERETTQYQSIPMAPQLNPSHAGGVITLQRHYQGIDSRWTHRGELGVPLTFTTGLNYENMSENRKGYNNFRLNSGVPEYGQKGELRRDERNLMWNVDPYLQTQWQLSEKLSLDAGVRYSSVWFDSNDHYVTPGNGDDSGDASYHKWLPAGSLKYAMTDAWNIYLAAGRGFETPTINELSYRADGQSGMNFGLKPSTNDTIEIGSKTRIGDGLLSLALFQTDTDDEIVVDSSSGGRTTYKNAGKTRRQAAELAWDQRFAGDFRVKASWTWLDATYRSNVCNEQDCNGNRMPGIARNMGFASIGYVPEDGWYAGTEARYMGDIMADDENTAKAPSYTLVGLFTGYKYNYHNLTVDLFGRVDNLFDKEYVGSVIVNESNGRYYEPAPGRNYGVGMNIAWRFE

SEQ ID NO: 4030 - protein, 539 aa, Escherichia coli; identical to SEQ ID NO: 3050

SEQ ID NO: 4031 - protein, 231 aa, Escherichia coli
MSKRTFAVILTLLCSFCIGQALAGGIVLQRTRVIYDASRKEAALPVANKGAETPYLLQSWVDNIDGKSRAPFIITPPLFRLEAGDDSSLRIIKTADNLPENKESLFYINVRTIPAKKKSDDVNANELTLVFKTRIKMFYRPAHLKGRVNDAWKSLEFKRSDHSLNIYNPTEYYVVFAGLAVDKIDLTSKIEYIAPGEHKQLPLPASGGKNVKWAAINDYGGSSGTETRPLQ

SEQ ID NO: 4032 - protein, 118 aa, Escherichia coli [sequence omitted]

SEQ ID NO: 4033 - protein, 230 aa, Escherichia coli; identical to SEQ ID NO: 2995

SEQ ID NO: 4034 - protein, 673 aa, Escherichia coli; identical to SEQ ID NO: 2919

SEQ ID NO: 4035 - protein, 828 aa, Escherichia coli; identical to SEQ ID NO: 2381

SEQ ID NO: 4036 - protein, 446 aa, Escherichia coli [sequence omitted]

SEQ ID NO: 4037 - protein, 121 aa, Escherichia coli
MNTVLSVQGASAPVKKKSFFSKFTRLNMLRLARAVIPVAVLMMLFPELAMASAGKGTDLMAKGNDTVKATFGKDSSIVKWVVLAEVLVGAVMYMMTKNVKFLVGFAIISVFIAVGMTVVGL

SEQ ID NO: 4038 - protein, 696 aa, Escherichia coli
MRITTLASVVIPCLGFSASSIAAAEDVMIVSASGYEKKLTNAAASVSVISQEELQSSQYHDLAEALRSVEGVDVESGTGKTGGLEISIRGMPASYTLILIDGVRQGGSSDVTPNGFSAMNTGFMPPLAAIERIEVIRGPMSTLYGSDAMGGVVNIITRKNADKWLSSVNAGLNLQESNKWGNSSQFNFWSSGPLVDDSVSLQVRGSTQQRQGSSVTSLSDTAATRIPYPTESQNYNLGARLDWKASEQDVLWFDMDTTRQRYDNRDGQLGSLTGGYDRTLRYERNKISAGYDHTFTFGTWKSYLNWNETENKGRELVRSVLKRDKWGLAGQPRELKESNLILNSLLLTPLGESHLVTVGGEFQSSSMKDGVVLASTGETFRQKSWSVFAEDEWHLTDALALTAGSRYEHHEQFGGHFSPRAYLVWDVADAWTLKGGVTTGYKAPRMGQLHKGISGVSGQGKTNLLGNPDLKPEESVSYEAGVYYDNPAGLNANVTGFMTDFSNKIVSYSINDNTNSYVNSGKARLHGVEFAGTLPLWSEDVTLSLNYTWTRSEQRDGDNKGAPLSYTPEHMVNAKLNWQITEEVASWLGARYRGKTPRFTQNYSSLSAVQKKVYDEKGEYLKAWTVVDAGLSWKMTDALTLNAAVNNLLNKDYSDVSLYSAGKSTLYAGDYFQTGSSTTGYVIPERNYWMSLNYQF

SEQ ID NO: 4039 - protein, 567 aa, Escherichia coli; identical to SEQ ID NO: 3518

SEQ ID NO: 4040 - protein, 360 aa, Escherichia coli; identical to SEQ ID NO: 4018

SEQ ID NO: 4041 - protein, 213 aa, Escherichia coli; identical to SEQ ID NO: 2232

SEQ ID NO: 4042 - protein, 654 aa, Escherichia coli
MDCVMKGLNKITCCLLAALLMPCAGHAENEQYGANFNNADIRQFVEIVGQHLGKTILIDPSVQGTISVRSNDTFSQQEYYQFFLSILDLYGYSVITLDNGFLKVVRSANVKTSPGMIADSSRPGVGDELVTRIVPLENVPARDLAPLLRQMMDAGSVGNVVHYEPSNVLILTGRASTINKLIEVIKRVDVIGTEKQQIIHLEYASAEDLAEILNQLISESHGKSQMPALLSAKIVADKRTNSLIISGPEKARQRITSLLKSLDVEESEEGNTRVYYLKYAKATNLVEVLTGVSEKLKDEKGNARKPSSSGAMDNVAITADEQTNSLVITADQSVQEKLATVIARLDIRRAQVLVEAIIVEVQDGNGLNLGVQWANKNVGAQQFTNTGLPIFNAAQGVADYKKNGGITSANPAWDMFSAYNGMAAGFFNGDWGVLLTALASNNKNDILATPSIVTLDNKLASFNVGQDVPVLSGSQTTSGDNVFNTVERKTVGTKLKVTPQVNEGDAVLLEIEQEVSSVDSSSNSTLGPTFNTRTIQNAVLVKTGETVVLGGLLDDFSKEQVSKVPLLGDIPLVGQLFRYTSTERAKRNLMVFIRPTIIRDDDVYRSLSKEKYTRYRQEQQQRIDGKSKALVGSEDLPVLDENTFNSHAPAPSSR

SEQ ID NO: 4043 - protein, 243 aa, Escherichia coli
MTFMKGLPLLLLVASLCSHAALQPDRTRIVFNANDKATSLRVDNRSDKLPYLAYSWLENEKGEKSDDLLVALPPIQRLEPKATTQVRIVKQASTAKLPGDRETLFFYNMREIPPAPEKNSDHAVLQVAIQSRIKVFWRPAALRKKAGEKVELQLQVSQQGNQLTLKNPTAYYLTIAYLGRNEKGVFPGFKTVMIAPFSTVNTNTGSYSGSQFYLGYMDDYGALRMTTLNCSGECRLQAVEAKK

SEQ ID NO: 4044 - protein, 243 aa, Escherichia coli
MTFMKGLPLLLLIASLCSYAALQPDRTRIVFNANDKATSLRVDNRSDKLPYLAYSWLENEKGEKSDDLLVALPPIQRLEPKATTQVRIVKQASTAKLPGDRETLFFYNMREIPPSPEKNSGHAVLQVAIQSRIKVFWRPSALRKKAGEKVELQLQVSQQGNQLNLKNPTGYYLTIAYLGRNEQGVLPGFKTVMVAPFSTVITNTGSYSGSQFYLGYMDDYGALRMTTLNCNGHCRLQAVEAKK

SEQ ID NO: 4045 - protein, 432 aa, Escherichia coli; identical to SEQ ID NO: 2026

SEQ ID NO: 4046 - protein, 162 aa, Escherichia coli; identical to SEQ ID NO: 1965

SEQ ID NO: 4047 - protein, 229 aa, Escherichia coli
MKSVLLLLTILFVQSVEAGIMPASSRIIYRDGDREKTLMLVNTNDYPVLVQSWVDNGEGSPEAASPPFVVLPPVFRLAARRTQGLRIIYNHDPLPQDRESAFWLNLYEMPPETPHQDPTHLTLAMNTQLKIFYRPKSVTMTPQEAMRKISWHLGNDGSSSYIELNNPTPLNISFTSISIGATKVQQESDMMIKPFSQRRYWLASNNVSGVVAATYLDDNGAQIKQQLAQ

SEQ ID NO: 4048 - protein, 224 aa, Escherichia coli; identical to SEQ ID NO: 3578

SEQ ID NO: 4049 - protein, 236 aa, Escherichia coli; identical to SEQ ID NO: 3286

SEQ ID NO: 4050 - protein, 331 aa, Escherichia coli; identical to SEQ ID NO: 2705

SEQ ID NO: 4051 - protein, 412 aa, Escherichia coli; identical to SEQ ID NO: 2908

SEQ ID NO: 4052 - protein, 203 aa, Escherichia coli; identical to SEQ ID NO: 2015

SEQ ID NO: 4053 - protein, 224 aa, Escherichia coli
MTVSLTAILLSCSSAWAAGKGGIGLAATRLVYSEGEEQISLGVRNTSPDVPYLIQSWVMTPDNKKSADFIITPPLFVLNPANENLLRIMYIGAPLAKDRETLFFTSVRAVPSTTKRKEGNTLKIATQSVIKLFWRPKGLAYPLGEAPAKLRCTSSADMVTVSNPTPYFITLTDLKIGGKVVKNQMISPFDKYQFSLPKGAKNSSVTYRTINDYGAETPQLNCKS

SEQ ID NO: 4054 - protein, 517 aa, Escherichia coli; identical to SEQ ID NO: 2462

SEQ ID NO: 4055 - protein, 331 aa, Escherichia coli; identical to SEQ ID NO: 2705

SEQ ID NO: 4056 - protein, 362 aa, Escherichia coli; identical to SEQ ID NO: 2434

SEQ ID NO: 4057 - protein, 732 aa, Escherichia coli
MMRKKYMPRALGPLLLVVLSPAVAQQNDDNEIIVSASRSNRTVAEMAQTTWVIENAELEQQIQGGKELKDALAQLIPGLDVSSQSRTNYGMNMRGRPLVVLIDGVRLNSSRSDSRQLDSVDPFNIDHIEVISGATALYGGGSTGGLINIVTKKGQPETMMEFEAGTKSGFNSSKDHDERIAGAVSGGNDHISGRLSVAYQKFGGWFDGNGDATLLDNTQTGLQHSNRLDIMGTGTLNIDESRQLQLITQYYKSQGDDNYGLNLGKGFSAISGSSTPYVSKGLNSDRIPGTERHLISLQYSDSDFLRQELVGQVYYRDESLRFYPFPTVNANKQATAFSSSQQDTDQYGMKLTLNSQLMDGWQITWGLDAEHERFTSNQMFFDLAQASASGGLNNHKIYTTGRYPSYDITNLAAFLQSSYDINDIFTVSGGVRYQYTENRVDDFIDYTQQQKIAAGKAISADAIPGGSVDYDNFLFNAGLLMHITERQQAWFNFSQGVALPDPGKYYGRGIYGAAVNGHLPLTKSVNVSDSKLEGVKVDSYELGWRFTGDNLRTQIAAYYSLSNKSVERNKDLTISVKDDRRRIYGVEGAVDYLIPDTDWSTGVNFNVLKTESKVNGQWQKYDVKESSPSKATAYINWAPEPWSLRVQSTTSFDVSDAEGNDINGYTTVDFISSWQLPVGTLSFSVENLFDRDYTTVWGQRAPLYYSPGYGPASLYDYKGRGRTFGLNYSVLF

SEQ ID NO: 4058 - protein, 412 aa, Escherichia coli
MKQWIAALLLMLIPGVQAAKPQKVTLMVDDVPVAQVLQALAEQEKLNLVVSPDVSGTVSLHLTDVPWKQALQTVVKSAGLITRQEDNILSVHSIAWQNNNIARQEAEQARAQANLPLENRSITLQYADAGELAKAGEKLLSAKGSMTVDKRTNRLLLRDNKTALSALEQWVAQMDLPVGQVELSAHIVTINEKSLRELGVKWTLADAQHAGGVGQVTTLGSDLSVATATTHVGFNIGRINGRLLDLELSALEQKQQLDIIASPRLLASHLQPASIKQGSEIPYQVSSGESGATSVEFKEAVLGMEVTPTVLQKGRIRLKLHISQNVPGQVLQQADGEVLAIDKQEIETQVEVKSGETLALGGIFTRKNKSGQDSVPLLGDIPWFGQLFRHDGKEDERRELVVFITPRLVSSE

SEQ ID NO: 4059 - protein, 686 aa, Escherichia coli; identical to SEQ ID NO: 3015

SEQ ID NO: 4060 - protein, 119 aa, Escherichia coli
MNTVLSVQGASAPVKKKSFFSKFTRLNMLRLVRAVIPVAVLMMLFPELAMAAGKGDLMAKGQETVKATFGKNSSIVKWIVLAEVLVGAVMYMMTKNIKFLVGFAILSVFIAVGMSVAGF

SEQ ID NO: 4061 - protein, 191 aa, Escherichia coli; identical to SEQ ID NO: 2730

SEQ ID NO: 4062 - protein, 565 aa, Escherichia coli; identical to SEQ ID NO: 2677

SEQ ID NO: 4063 - protein, 224 aa, Escherichia coli
MKGLLALLISSMVLPAHAGIVIYGTRIIYPAEHKEVMVQLMNQGNRSSLLQAWIDDGDTSLPPEKIQVPFMLTPPVAKIGENSGQQVKIKIMPNKLPTNKESIFYLNVLDIPPNSPEQEGKNALKFAMQNRIKLFYRPAGIAPVNKATFKKLLVNRSGNGLVIKNDSANWVTISDVKANNVKVNYETIMIAPLESQSINVKSNNANNWYLTIIDDHGNYISDKI

SEQ ID NO: 4064 - protein, 244 aa, Escherichia coli
MWKLSMIRKKILMAAIPLFVISGADAAVSLDRTRAVFDGSEKSMTLDISNDNKQLPYLAQAWIENENQEKIIAGPVIATPPVQRLEPGAKSMVRLSTTPDISKLPQDRESLFYFNLREIPPRSEKANVLQIALQTKIKLFYRPAAIKTRPNEVWQDQLILNKVSGGYRIENPTPYYVTVIGLGGSEKQAEEGEFETVMLSPRSEQTVKSANYNTPYLSYINDYGGRPVLSFICNGSRCSVKKEK

SEQ ID NO: 4065 - protein, 696 aa, Escherichia coli
MRITTLASVVIPCLGFSASSIAAAEDVMIVSASGYEKKLTNAAASVSVISQEELQSSQYHDLAEALRSVEGVDVESGTGKTGGLEISIRGMPASYTLILIDGVRQGGSSDVTPNGFSAMNTGFMPPLAAIERIEVIRGPMSTLYGSDAMGGVVNIITRKNADKWLSSVNAGLNLQESNKWGNSSQFNFWSSGPLVDDSVSLQVRGSTQQRQGSSVTSLSDTAATRIPYPTESQNYNLGARLDWKASEQDVLWFDMDTTRQRYDNRDGQLGSLTGGYDRTLRYERNKISAGYDHTFTFGTWKSYLNWNETENKGRELVRSVLKRDKWGLAGQPRELKESNLILNSLLLTPLGESHLVTVGGEFQSSSMKDGVVLASTGETFRQKSWSVFAEDEWHLTDALALTAGSRYEHHEQFGGHFSPRAYLVWDVADAWTLKGGVTTGYKAPRMGQLHKGISGVSGQGKTNLLGNPNLKPEESVSYEAGVYYDNPAGLNANVTGFMTDFSNKIVSYSINDNTNSYVNSGKARLHGVEFAGTLPLWSEDVTLSLNYTWTRSEQRDGDNKGAPLSYTPEHMVNAKLNWQITEEVASWLGARYRGKTPRFTQNYSSLSAVQKKVYDEKGEYLKAWTVVDAGLSWKMTDALTLNAAVNNLLNKDYSDVSLYSAGKSTLYAGDYFQTGSSTTGYVIPERNYWMSLNYQF

SEQ ID NO: 4066 - protein, 351 aa, Escherichia coli; identical to SEQ ID NO: 2872

SEQ ID NO: 4067 - protein, 274 aa, Escherichia coli; identical to SEQ ID NO: 2309

SEQ ID NO: 4068 - protein, 362 aa, Escherichia coli; identical to SEQ ID NO: 2827

SEQ ID NO: 4069 - protein, 236 aa, Escherichia coli
MQTTRTPYSISFMATVLLLLLFACHSTIANAAVALGATRVIYPANQKQVLLPVTNNDPASVYLIQSWIENAGDQKDTQFVITPPLFSMQGKKENTLRIINATNHQLPGDRESLFWVNVKAIPAMEKDQKNENTLQLAIISRIKMFYRPTNLAMAPEEAPAMLRFRRSGSKLTLINPTPYFITVTNMKAGNSNLPNTMVPPKGEVSVDIPHAATGDISFQTINDYGALTPRIKATMQ

SEQ ID NO: 4070 - protein, 729 aa, Escherichia coli; identical to SEQ ID NO: 2948

SEQ ID NO: 4071 - protein, 200 aa, Escherichia coli; identical to SEQ ID NO: 1793

SEQ ID NO: 4072 - protein, 230 aa, Escherichia coli; identical to SEQ ID NO: 2580

SEQ ID NO: 4073 - protein, 111 aa, Escherichia coli
MKKQIEGMTMKKVLALVVAAAMGLSSAAFAAETATTPAPTATTTKAAPAKTTHHKKQHKAAPAQKAQAAKKHHKNAKAEQKAPEQKAQAAKKHAGKHSHQQPAKPAAQPAA

SEQ ID NO: 4074 - protein, 246 aa, Escherichia coli; identical to SEQ ID NO: 3021

SEQ ID NO: 4075 - protein, 998 aa, Escherichia coli; identical to SEQ ID NO: 3056

SEQ ID NO: 4076 - protein, 774 aa, Escherichia coli; identical to SEQ ID NO: 2066

SEQ ID NO: 4077 - protein, 200 aa, Escherichia coli; identical to SEQ ID NO: 1789

SEQ ID NO: 4078 - protein, 359 aa, Escherichia coli; identical to SEQ ID NO: 2332

SEQ ID NO: 4079 - protein, 111 aa, Escherichia coli; identical to SEQ ID NO: 2911

SEQ ID NO: 4080 - protein, 233 aa, Escherichia coli; identical to SEQ ID NO: 3548

SEQ ID NO: 4081 - protein, 366 aa, Escherichia coli; identical to SEQ ID NO: 3520

SEQ ID NO: 4082 - protein, 641 aa, Escherichia coli; identical to SEQ ID NO: 3774

SEQ ID NO: 4083 - protein, 746 aa, Escherichia coli
MNKKIHSLALLVNLGIYGVAQAQEPTDTPVSHDDTIVVTAAEQNLQAPGVSTITADEIRKNPVARDVSEIIRTMPGVNLTGNSTSGQRGNNRQIDIRGMGPENTLILIDGKPVSSRNSVRQGWRGERDTRGDTSWVPPEMIERIEVLRGPAAARYGNGAAGGVVNIITKKGSGEWHGSWDAYFNAPEHKEEGATKRTNFSLTGPLGDEFSFRLYGNLDKTQADAWDINQGHQSARAGTYATTLPAGREGVINKDINGVVRWDFAPLQSLELEAGYSRQGNLYAGDTQNTNSDSYTRSKYGDETNRLYRQNYALTWNGGWDNGVTTSNWVQYEHTRNSRIPEGLAGGTEGKFNEKATQDFVDIDLDDVMLHSEVNLPIDFLVNQTLTLGTEWNQQRMKDLSSNTQALTGTNTGGAIDGVSTTDRSPYSKAEIFSLFAENNMELTDSTIVTPGLRFDHHSIVGNNWSPALNISQGLGDDFTLKMGIARAYKAPSLYQTNPNYILYSKGQGCYASAGGCYLQGNDDLKAETSINKEIGLEFKRDGWLAGVTWFRNDYRNKIEAGYVAVGQNAVGTDLYQWDNVPKAVVEGLEGSLNVPVSETVMWTNNITYMLKSENKTTGDRLSIIPEYTLNSTLSWQAREDLSMQTTFTWYGKQQPKKYNYKGQPAVGPETKEISPYSIVGLSATWDVTKNVSLTGGVDNLFDKRLWRAGNAQTTGDLAGANYIAGAGAYTYNEPGRTWYMSVNTHF

SEQ ID NO: 4084 - protein, 517 aa, Escherichia coli; identical to SEQ ID NO: 3116

SEQ ID NO: 4085 - protein, 614 aa, Escherichia coli; identical to SEQ ID NO: 1888

SEQ ID NO: 4086 - protein, 252 aa, Escherichia coli; identical to SEQ ID NO: 3543

SEQ ID NO: 4087 - protein, 213 aa, Escherichia coli; identical to SEQ ID NO: 2232

SEQ ID NO: 4088 - protein, 859 aa, Escherichia coli
MWNLLRRTRKNQKSGRDVREAGWTSLFQAVAEPFSGAWQQGVKADPEAVLSFHAVFACISLISQDIAKMRLRLMQTDAHGIRRETRRGDIARLCRRPNAQQNRIQFFELWLNAKLRHGNTVVLKIRNARGQIKELRILDWSRVEPLVADDGEVFYRITPDRNCGITEAVTVPAREVIHDRFNCFFHPLIGLPPVYAAGLAATQGHHIQENSTSFFRNGGRPSGVIEIPGSITEENAKKLKSNWDSGYTGENAGKTAILSNGAKYNPTTFSPVDAQTVEQLKMTAEIVCSVFRVPAYKIGVGQPPSSDNVEALEQQYYSQCLQTLIESIELLLDEALETGENESTEFDVTTLLRMDSERRMKTLGDAVKNTLLTPNEARKRENLPPLAGGDALYLQQQNYSLEALSRRDAREDPFASAGKTVSSQLPDGASDGNKAISETEHDAVKAMFRGDTEKMTERELSIIRALGEEFSTVLADLQRTFEGKMASQAQAFEEKLTSLSAVLQKHVTVDEVRPVLQAMVDDAVGAIPVPRDGRDYDPDVLQQAVNDAVANIPQPADGKSLTPDDVRPMLEQMVKEAVSHIPVPRDGRDYDPEVLQKAVNDAVANIPQPADGKSLTPDDVRPMLEQMVKEAVSHIPVPRDGRDYDPEVLQKAVNDAVANIPQPADGKSLTPDDVRPMLEQMVKEAVSHIPVPRDGRDYDPDVLQKAVLDAVSALPAPQDGRDATALEILPAIDDQKSFPRGTYATHQGGLWRAYEKTHGMRGWECLVDGVADIDVSMTGERLFSVVVRQSSGQRTEKTFSLPVMLYRGVFRAGETYHPGDTVTWGGSLWHCNSMTEDKPGEAHSSAWTLAAKRGRDAGG

SEQ ID NO: 4089 - protein, 232 aa, Escherichia coli; identical to SEQ ID NO: 2087

SEQ ID NO: 4090 - protein, 191 aa, Escherichia coli; identical to SEQ ID NO: 2727

SEQ ID NO: 4091 - protein, 241 aa, Escherichia coli; identical to SEQ ID NO: 3582

SEQ ID NO: 4092 - protein, 660 aa, Escherichia coli
MSRPQFTSLRLSLLALAVSATLPTFAFATETMTVTATGNARSSFEAPMMVSVIDTSAPENQTATSATDLLRHVPGITLDGTGRTNGQDVNMRGYDHRGVLVLVDGVRQGTDTGHLNGTFLDPALIKRVEIVRGPSALLYGSGALGGVISYDTVDAKDLLQEGQSSGFRVFGTGGTGDHSLGLGASAFGRTENLDGIVAWSSRDRGDLRQSNGETAPNDESINNMLAKGTWQIDSAQSLSGLVRYYNNDAREPKNPQTVEASESSNPMVDRSTIQRDAQLSYKLAPQGNDWLNADAKIYWSEVRINAQNTGSSGEYREQITKGARLENRSTLFADSFASHLLTYGGEYYRQEQHPGGATTGFPQAKIDFSSGWLQDEITLRDLPITLLGGTRYDSYRGSSDGYKDVDADKWSSRAGMTINPTNWLMLFGSYAQAFRAPTMGEMYNDSKHFSIGRFYTNYWVPNPNLRPETNETQEYGFGLRFDDLMLSNDALEFKASYFDTKAKDYISTTVDFAAATTMSYNVPNAKIWGWDVMTKYTTDLFSLDVAYNRTRGKDTDTGEYISSINPDTVTSTLNIPIAHSGFSVGWVGTFADRSTHISSSYSKQPGYGVNDFYVSYQGQQALKGMTTTLVLGNAFDKEYWSPQGIPQDGRNGKIFVSYQW

SEQ ID NO: 4093 - protein, 446 aa, Escherichia coli; identical to SEQ ID NO: 2180

SEQ ID NO: 4094 - protein, 656 aa, Escherichia coli
MRLKKRYLCTALSLAFTQQAVAAQESDTLTVWSSPVSSTTTTVLDQPTMKALDKQNVAQALSVVPGVVLQKSGSRNEEQVKVRGFDSRQVPVYFDGVPIYVPYDGNLDLARILTNNLGAVEVSKGYSSLLQGPNQMGGAINITTQKPTKPLEANLGYRQGWSRSQDNAYDMHASFAASSDLGYLQVSGSQLKQDFLGLPHGVNNDIAGKHGKMINSSADDKRGIVKLGFTPRENDEYTLTYIKQDGEKDNPPYSGNSGQKSRYWQWPEYDKESFYYQGTTQLNDRFTLKSRLYRDTFENTLMMYNSLADLKNKKGSYSHYSDYSDGAGLQLAADVRENDLLSFAVNWKDDVHREKGAPHAAYDRYEDRTWSLASEYQWAAADNVDVVAGISYDWRDSVEAKKHEKDGSITHYDDNNQSAFNWQVMGKYHFANEDTLALSYYDRTRFPTLKERYTTSKPAYNQIAIVNPQLKPERARGVDLTWNGAFTHDWGFEVSVYYNRVSDAILSHNIDADTIQNQNSGTVDYSGLDAGIKGKISNILDVGLSYALIHADAKRKDIGKITDLPTQTITAWMTLKPWEPLSVTLSEEARSSSYSNSDGSQKAAGFAVTHIRADYTLGHGFSVNASVNNLFDTKYAYSEGFIEEGRNFWAGIEYTF

SEQ ID NO: 4095 - protein, 359 aa, Escherichia coli; identical to SEQ ID NO: 2328

SEQ ID NO: 4096 - protein, 250 aa, Escherichia coli
MRWISKNKCFSNRNINSLLKTQYIIRAGALFLLSAISINAIAAGGFGLGSTRLVYPSDSQQITLSVQNGGANTSYLIQSWIDDNQSSKKSQDFVVTPPLFMLPTRKEASLRIMFIGKSQLPTDRETLFWMNVKAIPPTDEKNTQKNTLQLALQNRIKLFYRPTNLPVQAGKARDMLRFKYEGKQLRVINPSPYYLTVTGIRVQGAKLPNAFVPPKSDVTVSSPVTLAGEITYQTINDYGATTARQKGTMQ

SEQ ID NO: 4097 - protein, 660 aa, Escherichia coli
MSRPQFTSLRLSLLALAVSATLPTFAFATETMTVTATGNARSSFEAPMMVSVIDTSAPENQTATSATDLLRHVPGITLDGTGRTNGQDVNMRGYDHRGVLVLVDGVRQGTDTGHLNGTFLDPALIKRVEIVRGPSALLYGSGALGGVISYDTVDAKDLLQEGQSSGFRVFGTGGTGDHSLGLGASAFGRTENLDGIVAWSSRDRGDLRQSNGETAPNDESINNMLAKGTWQIDSAQSLSGLVRYYNNDAREPKNPQTVEASDSSNPMVDRSTIQRDAQLSYKLAPQGNDWLNADAKIYWSEVRINAQNTGSSGEYREQITKGTRLENRSTLFADSFASHLLTYGGEYYRQEQHPGGATTGFPQAKIDFSSGWLQDEITLRDLPITLLGGTRYDSYRGSSDGYKDVDADKWSSRAGMTINPTNWLMLFGSYAQAFRAPTMGEMYNDSKHFSIGRFYTNYWVPNPNLRPETNETQEYGFGLRFDDLMLSNDALEFKASYFDTKAKDYISTTVDFAAATTMSYNVPNAKIWGWDVMTKYTTDLFSLDVAYNRTRGKDTDTGEYISSINPDTVTSTLNIPIAHSGFSVGWVGTFADRSTHISSSYSKQPGYGVNDFYVSYQGQQALKGMTTTLVLGNAFDKEYWSPQGIPQDGRNGKIFVSYQW

SEQ ID NO: 4098 - protein, 331 aa, Escherichia coli; identical to SEQ ID NO: 2705

SEQ ID NO: 4099 - protein, 784 aa, Escherichia coli; identical to SEQ ID NO: 2244

SEQ ID NO: 4100 - protein, 432 aa, Escherichia coli; identical to SEQ ID NO: 2026

SEQ ID NO: 4101 - protein, 203 aa, Escherichia coli; identical to SEQ ID NO: 2201

SEQ ID NO: 4102 - protein, 222 aa, Escherichia coli
MSKLGISSLFKTILLTAALAVSFTASAFTEGTDYMVLEKPIPNADKTLIKVFSYACPFCYKYDKAVTGPVSEKVKDIVAFTPFHLETKGEYGKQASEVFAVLINKDKAAGISLFDANSQFKKAKFAYYAAYHDKKERWSDGKDPAAFIKTGLDAAGMSQADFEAALKEPAVQETLEKWKASYEVAKIQGVPAYVVNGKYLIYTKSIKSIDSMADLIRELASK

SEQ ID NO: 4103 - protein, 478 aa, Escherichia coli; identical to SEQ ID NO: 2421

SEQ ID NO: 4104 - protein, 229 aa, Escherichia coli; identical to SEQ ID NO: 3589

SEQ ID NO: 4105 - protein, 274 aa, Escherichia coli; identical to SEQ ID NO: 2304

SEQ ID NO: 4106 - protein, 243 aa, Escherichia coli; identical to SEQ ID NO: 3561

SEQ ID NO: 4107 - protein, 203 aa, Escherichia coli; identical to SEQ ID NO: 2201

SEQ ID NO: 4108 - protein, 746 aa, Escherichia coli; identical to SEQ ID NO: 2949

SEQ ID NO: 4109 - protein, 193 aa, Escherichia coli; identical to SEQ ID NO: 2246

SEQ ID NO: 4110 - protein, 232 aa, Escherichia coli; identical to SEQ ID NO: 2087

SEQ ID NO: 4111 - protein, 478 aa, Escherichia coli; identical to SEQ ID NO: 2409

SEQ ID NO: 4112 - protein, 193 aa, Escherichia coli; identical to SEQ ID NO: 2250

SEQ ID NO: 4113 - protein, 191 aa, Escherichia coli; identical to SEQ ID NO: 2727

SEQ ID NO: 4114 - protein, 760 aa, Escherichia coli
MENNRNFPARQFHSLTFFAGLCIGITPVAQALAAEGQANADDTLVVEASTPSLYAPQQSADPKFSRPVADTTRTMTVISEQVIKDQGATNLTDALKNVPGVGAFFAGENGNSTTGDAIYMRGADTSNSIYIDGIRDIGSVSRDTFNTEQVEVIKGPSGTDYGRSAPTGSINMISKQPRNDSGIDASASIGSAWFRRGTLDVNQVIGDTTAVRLNVMGEKTHDAGRDKIKNERYGVAPSVAFGLGTANRLYLNYLHVTQHNTPDGGIPTIGLPGYSAPSAGTAALNHSGKVDTHNFYGTDSDYDDSTTDTATMRFEHDINDNTTIRNTTRWSRVKQDYLMTAIMGGASNITQPTSDVNSWTWSRTANTKDVSNKILTNQTNLTSTFYTGSIGHDVSTGVEFTRETQTNYGVNPVTLPAVNIYHPDSSIHPGGLTRNGANANGQTDTFAIYAFDTLQITRDFELNGGIRLDNYHTEYDSATACGGSGRGAITCPAGMAKGSPVTTVDTAKSGNLVNWKAGALYHLTENGNVYINYAVSQQPPGGNNFALAQSGSGNSANRTDFKPQKANTSEIGTKWQVLDKRLLLTAALFRTDIENEVEQNDDGTYSQYGKKRVEGYEISVAGNITPAWQVIGGYTQQKATIKNGKDVAQDGSSSLPYTPEHAFTLWSQYQATDDISVGAGARYIGSMHKGSDGAVGTPAFTEGYWVADAKLGYRVNRNLDFQLNVYNLFDTDYVASINKSGYRYHPGEPRTFLLTANMHF

SEQ ID NO: 4115 - protein, 213 aa, Escherichia coli; identical to SEQ ID NO: 2232

SEQ ID NO: 4116 - protein, 221 aa, Escherichia coli
MKNYLWLVALLPLLSGCESQAILVKKDDAYFAPPKTEAPPPADGRAGGVFETGYNWSLTADRRAYRVGDILTVILEESTQSSKQAKTNFGKNNTVDIGAPTIFGHTKDKLSGSIDANRDFDGSATSQQQNSLRGEITVSVHAVQPNGILEIRGEKWLTLNQGDEYIRLSGLVRADDIQNDNSVSSQRIADARISYAGRGALSDANAAGWLTRLFNHPLFPI

SEQ ID NO: 4117 - protein, 239 aa, Escherichia coli; identical to SEQ ID NO: 2759

SEQ ID NO: 4118 - protein, 249 aa, Escherichia coli; identical to SEQ ID NO: 2793

SEQ ID NO: 4119 - protein, 241 aa, Escherichia coli; identical to SEQ ID NO: 2887

SEQ ID NO: 4120 - protein, 565 aa, Escherichia coli; identical to SEQ ID NO: 2669

SEQ ID NO: 4121 - protein, 551 aa, Escherichia coli; identical to SEQ ID NO: 2446

SEQ ID NO: 4122 - protein, 243 aa, Escherichia coli
MLNKKNIVALCVASSMAFSMPVMADIVISGTRVIYKSDQKSVSVRLENKGNSHLLVQSWLDTGDDNAEPGSINVPFTATPPVSRIDAKRGQTIKLMYTGSTVLPSDKESVFWFNVLEVPPKPDASKVENQSLLQLAFRTRIKLFYRPAGLNGNPSEAPLALKWKWAEGKSGLSVYNPTSYYVSFNSAELIAGGKSNPLNVKMVAPKSEEIFTISGSGGKATSGKVHFSAINDFGGAIEGDVNL

SEQ ID NO: 4123 - protein, 713 aa, Escherichia coli; identical to SEQ ID NO: 3523

SEQ ID NO: 4124 - protein, 700 aa, Escherichia coli; identical to SEQ ID NO: 2926

SEQ ID NO: 4125 - protein, 518 aa, Escherichia coli; identical to SEQ ID NO: 2351

SEQ ID NO: 4126 - protein, 747 aa, Escherichia coli
MARSKTAQPKHSLRKIAVVVATAVSGMSVYAQAAVEPKEDTITVTAAPAPQESAWGPAATIAARQSATGTKTDTPIQKVPQSISVVTAEEMALHQPKSVKEALSYTPGVSVGTRGASNTYDHLIIRGFAAEGQSQNNYLNGLKLQGNFYNDAVIDPYMLERAEIMRGPVSVLYGKSSPGGLLNMVSKRPTTEPLKEVQFKAGTDSLFQTGFDFSDALDDDGVYSYRLTGLARSANAQQKGSEEQRYAIAPAFTWRPDDKTNFTFLSYFQNEPETGYYGWLPKEGTVEPLPNGKRLPTDFNEGAKNNTYSRNEKMVGYSFDHEFNDTFTVRQNLRFAENKTSQNSVYGYGVCSDPANAYSKQCAALAPADKGHYLARKYVVDDEKLQNFSVDTQLQSKFATGDIDHTLLTGVDFMRMRNDINAWFGYDDSVPLLNLYNPVNTDFDFNAKDPANSGPYRILNKQKQTGVYVQDQAQWDKVLVTLGGRYDWADQESLNRVAGTTDKRDDKQFTWRGGVNYLFDNGVTPYFSYSESFEPSSQVGKDGNIFAPSKGKQYEVGVKYVPEDRPIVVTGAVYNLTKTNNLMADPEGSFFSVEGGEIRARGVEIEAKAALSASVNVVGSYTYTDAEYTTDTTYKGNTPAQVPKHMASLWADYTFFDGPLSGLTLGTGGRYTGSSYGDPANSFKVGSYTVVDALVRYDLARVGMAGSNVALHVNNLFDREYVASCFNTYGCFWGAERQVVATATFRF

SEQ ID NO: 4127 - protein, 203 aa, Escherichia coli; identical to SEQ ID NO: 2009

SEQ ID NO: 4128 - protein, 203 aa, Escherichia coli; identical to SEQ ID NO: 2009

SEQ ID NO: 4129 - protein, 118 aa, Escherichia coli [sequence omitted]

SEQ ID NO: 4130 - protein, 746 aa, Escherichia coli
MNKKIHSLALLVNLGIYGVAQAQEPTDTPVSHDDTIVVTAAEQNLQAPGVSTITADEIRKNPVARDVSEIIRTMPGVNLTGNSTSGQRGNNRQIDIRGMGPENTLILIDGKPVSSRNSVRQGWRGERDTRGDTSWVPPEMIERIEVLRGPAAARYGNGAAGGVVNIITKKGSGEWHGSWDAYFNAPEHKEEGATKRTNFSLTGPLGDEFSFRLYGNLDKTQADAWDINQGHQSARAGTYATTLPAGREGVINKDINGVVRWDFAPLQSLELEAGYSRQGNLYAGDTQNTNSDSYTRSKYGDETNRLYRQNYSLTWNGGWDNGVTTSNWVQYEHTRNSRIPEGLAGGTEGKFNEKATQDFVDIDLDDVMLHSEVNLPIDFLVNQTLTLGTEWNQQRMKDLSSNTQALTGTNTGGAIDGVSATDRSPYSKAEIFSLFAENNMELTDSTIVTPGLRFDHHSIVGNNWSPALNISQGLGDDFTLKMGIARAYKAPSLYQTNPNYILYSKGQGCYASAGGCYLQGNDDLKAETSINKEIGLEFKRDGWLAGVTWFRNDYRNKIEAGYVAVGQNAVGTDLYQWDNVPKAVVEGLEGSLNVPVSETVMWTNNITYMLKSENKTTGDRLSIIPEYTLNSTLSWQAREDLSMQTTFTWYGKQQPKKYNYKGQPAVGPETKEISPYSIVGLSATWDVTKNVSLTGGVDNLFDKRLWRAGNAQTTGDLAGANYIAGAGAYTYNEPGRTWYMSINTHF

SEQ ID NO: 4131 - protein, 200 aa, Escherichia coli; identical to SEQ ID NO: 1801

SEQ ID NO: 4132 - protein, 249 aa, Escherichia coli
MTKYLSAKTLTTVLSLLAATVSFSTQASVTPDRTRLIFNESDKSISVTLRNNDPKLPYLAQSWIEDEKGVKISSPLAVLPPVQRIEAMMNGQVKIQGLPDIHKLPADRESMFYFNVREIPPKSNKSNTLQIALQTRIKLFWRPKALEKNTTQNPWQHKVTLTRNGQEFTVNNPTPYYVIFSNASAQKNGNPAAGFSPIVMSPKTSAPLNVKMGSVPVLTYVNDYGARMPLFFTCNGNSCQVDEEQSRKG

SEQ ID NO: 4133 - protein, 834 aa, Escherichia coli; identical to SEQ ID NO: 3095

SEQ ID NO: 4134 - protein, 237 aa, Escherichia coli; identical to SEQ ID NO: 3022

SEQ ID NO: 4135 - protein, 787 aa, Escherichia coli
MAALESGASYAGEKLDMSFIQGGAGANPDAWAALNSNYAPGRYLVELSLNGKNQGKHILDVTPEDSNDLCLTEAWLTKAGVYISADYFRKGYDATRKCYALSKAQAVKVDFDVSTQSLALTIPQKGLVKVPENIDWDYGTSAFRVNYSANANTGRHNTSAFGSADLKANIGHWVVSSSATASTGDSGDNNASINMFTATRAIRSLSADLAVGKTSTGDSLLGSTGTYGISLSRNNSMKPGNLGYSPVFSGIANGPSRVTLIQNGRILHSEMVPAGPFSITDVQLYTSGDVTMKITGEDGREQTQVFPLSVVSGQLNPGQHEFNIAAGLPDDDSHLKGGVFAASYGYGLNNLTLRAGGVFNHDWLGGSAGVVAGLSYLGAISVDGAYATAKYRDGSHNGNKVQVAWSKQLEVTNTGLRVSWAHQSEEYEDMSSFDPSKLWGEENHGRHTKDEWNMGISQPVGGLFNLSVSGWQRSYYPISGTGYSSLYSDGKDTGLTGTLSTQIKGVSLNFGVSGSRSSQGKNNWSASASVSVPFTLFDRRYSSSTSVSTSKDGGVGFSTGVSGSLNDRFSYGLGGGRDSDGSASGYFNASYSGDRAYLSGALNYSQSGGTSGSVSASGSVLAVPAARDIMFSRTSADTVAVVNVKNTPGVKVTSGNGETDKDGNLVVPLNSYDWNTVTVDAGTLPLDTELGNTSQKVVPTDKAVVWMPFDALKVHRYLLQVKQRNGEFVPGGTWARDSKKTPLGFVANNGVLMINAVDAPGDITLGQCRIPATKLRDTEKLQEITCE

SEQ ID NO: 4136 - protein, 843 aa, Escherichia coli
MHWMHLPLYHYRAHFSFSLLALTIASSLPAYGGKFNPKFLENVQGIDQHIDLSVYDSPVGQQIPGKYRVSVFVNEEKMASRTLDFSTASEAKRKASGESLMPCLSRVQLEEMGVRVDSFPALKMSPPEACVAFDEIIPQATSRFDFNTQTLHLSFPQAAMMMTARGTVDPSRWDEGIPALLLDYSFSGSNGRNEGTGSSSDSTSDSYYLNLRSGLNVGPWRLLNNSIWNRTDGKNQWDNVGTSLNRAIIPLKSQITLGDTATPGEIFDSVQMRGALLASDDEMLPDSQRGFAPVVRGIAKSNAEVSIEQNGYVIYRTFVQPGAFEINDLYATSGSGDLTVIIKEADGSEQRFIQPFSAVAIFQREGYLKYSLAAGEYRAGNYDSDKPHFGQFTAMYGLPWGMTAYGGALLSADYNALALGLGKNFGTIGAVSVDVTQAKSQLRNNEKEEGQSYRFLYSKSFEGGTDLRLLGYKYSTSGYYTFQEATDVRSDADSDYRRYHKRSQIQGNITQQLGDYGSVYFNMTQQDYWNVDGKENSLSAGYHGHIGRVNYSVAYTWTRSPEWEEDDRLWSFSVSIPLGGAWSSYRMTTDQNGKTSQQASVSGTLLEDRNLSYNVQQGYTSNGVGYSGSVNMGYMGGSGNIDVGYNYSKDNQQVNYGVRGGVIVHSEGITLSQPLGESLAIVSAPGARGGHVVNSSGVEVDWMGNAVVPYLTPYRETIVELRSDTLGQNVELQEAFQKVVPTRGAVVRSRFDTRVGYRVLMSLKQANGNAVPFGATAALIDESKPASSIVGEEGQLYISGMPEEGELQVSWGNEQAQRCRVPFRLPENKDNAAIVMVNAVCEK

SEQ ID NO: 4137 - protein, 368 aa, Escherichia coli
MNKTITALAIIMASFAANASVLPETPVPFKSGTGAIDNDTVYIGLGSAGTAWYKLDTQAKDKKWTALAAFPGGPRDQATSAFIDGNLYVFGGIGKNSEGLTQVFNDVHKYNPKTNSWVKLMSHAPMGMAGHVTFVHNGKAYVTGGVNQNIFNGYFEDLNEAGKDSTAIDKINAHYFDKKAEDYFFNKFLLSFDPSTQQWSYAGESPWYGTAGAAVVNKGDKTWLINGEAKPGLRTDAVFELDFTGNNLKWNRLAPVSSPDGVAGGFAGISNDSLIFAGGAGFKGSRENYQNGKNYAHEGLKKSYSADIHLWHNGKWDKSGELSQGRAYGVSLPWNNSLLIIGGETAGGKAVTDSVLISVKDNKVTVQN

SEQ ID NO: 4138 - protein, 207 aa, Escherichia coli; identical to SEQ ID NO: 2211

SEQ ID NO: 4139 - protein, 816 aa, Escherichia coli; identical to SEQ ID NO: 2817

SEQ ID NO: 4140 - protein, 863 aa, Escherichia coli
MHIRKHRLAGFFVRLFVACAFAAQAPLSSAELYFNPRFLADDPQAVADLSRFENGQELPPGTYRVDIYLNNGYMATRDVTFNTGDSEQGIVPCLTRAQLASMGLNTASVSGMNLLADDACVPLTSMIHDATAHLDVGQQRLNLTIPQAFMSNRARGYIPPELWDPGINAGLLNYNFSGNSVQNRIGGNSHYAYLNLQSGLNIGAWRLRDNTTWSYNRSDRSSGSKNKWQHINTWLERDIIPLRSRLTLGDGYTQGDIFDGINFRGAQLASDDNMLPDSQRGFAPVIHGIARGTAQVTIKQNGYDIYNSTVPPGPFTINDIYAAGNSGDLQVTIKEADGSTQIFTVPYSSVPLLQREGHTRYSITAGEYRSGNAQQEKPRFFQSTLLHGLPAGWTIYGGTQLADRYRAFNFGIGKNMGALGALSVDMTQANSTLPDDSQHDGQSVRFLYNKSLNESGTNIQLVGYRYSTSGYFNFADTTYSRMNGYNIETQDGVIQVKPKFTDYYNLAYNKRGKLQLTVTQQLGRTSTLYLSGSHQTYWGTSNVDEQFQAGLNTAFEDINWTLSYSLTKNAWQKGRDQMLALNVNIPFSHWLRSDSKSQWRHASASYSMSHDLNGRMTNLAGVYGTLLEDNNLSYSVQTGYAGGGDGNSGSTGYATLNYRGGYGNANIGYSHSDDIKQLYYGVSGGVLAHANGVTLGQPLNETVVLVKAPGAKDAKVENQTGVRTDWRGYAVLPYATEYRENRVALDTNTLADNVDLDNAVANVVPTRGAIVRAEFKARVGIKLLMTLTHNNKPLPFGAMVTSESSQSSGIVADNGQVYLSGMPLAGKVQVKWGEEENAHCIANYQLPPESQQQLLTQLSAECR

SEQ ID NO: 4141 - protein, 866 aa, Escherichia coli
MTIKPTKNYHNHLTRIATFCALLYCNSAFCAELVEYDHTFLMGQNASNIDLSRYSEGNPAIPGVYDVSVYVNDQPIINQSITFIEIEGKKNAQACITLKNLLQFHINSPDINNEKAVLLARDETLGNCLNLTEIIPQASVRYDVNEQRLDIDVPQAWVMKNYQNYVDPSLWENGINAAMLSYNLNGYHSETPGRRNDSIYAAFNGGMNLGAWRLRASGNYNWMTDSGSNYDFKNRYIQRDIASLRSQLILGESYTTGETFDSVSIRGIRLYSDSRMLPPTLASFAPIIHGVANTNAKVTITQGGYKIYETTVPPGAFVIDDLSPSGYGSDLIVTVEESDGSKRTFSQPFSSVVQMLRPGVGRWDISGGQVLKDDIQDEPNLFQASYYYGLNNYLTGYTGIQITDNNYTAGLLGLGLNTSVGAFSFDVTHSNVRIPDDKTYQGQSYRVSWNKLFEETSTSLNIAAYRYSTQNYLGLNDALTLIDEVKHPEQDLEPKSMRNYSRMKNQVTVSINQPLKFEKKDYGSFYLSGSWSDYWASGQNRSNYSIGYSNSASWGSYSVSAQRSWNEDGDTDDSVYLSFTIPIEKLLGTEQRTSGFQSIDTQMSSDFKGNNQLNVSSSGYSDNARVSYSVNTGYTMNKASKDLSYVGGYASYESPWGSLAGSVSANSDNSRQVSLSTDGGFVLHSGGLTFSNDSFSDSDTLAVVQAPGAQGARINYGNSTIDRWGYGVTSALSPYHENRIALDINDLENDVELKSTSAVAVPRQGSVVFADFETVQGQSAIMNITRSDGKNIPFAADIYDEKGNVIGNVGQGGQAFVRGIEQQGNISIKWLEESKPVSCLAHYQQSSEAEKIAQSIILNGIRCQIQ

SEQ ID NO: 4142 - protein, 823 aa, Escherichia coli
MALIIKRCLPMVLTGSGMLCTTANAEEYYFAPIMLETTKSGMQTTDLSRFSKKYAQLPGTYQVDIWLNKKKVSQKKITFTANAEQLLQPQFTVEQLRELGIKVDEIPALAEKDDDSVINSLEQIIPGTAAEFDFNHQRLNLSIPQIALYRDARGYVSPSRWDDGIPTLFTNYSFTGSDNRYRQGNRSQRQYLNMQNGANFGPWRLRNYSTWTRNDQASSWNTISSYLQRDIKALKSQLLLGESATSGSIFSSYTFTGVQLASDDNMLPNSQRGFAPTVRGIANSSAIVTIRQNGYVIYQSNVPAGAFEINDLYPSSNSGDLEVTIEESDGTQRRFIQPYSSLPMMQRPGHLKYSATAGRYRADANSDSKEPEFAEATAIYGLNNTFTLYGGLLGSEDYYALGIGIGGTLGALGALSMDINRADTQFDNRHSFHGYQWRTQYIKDIPETNTNIAVSYYRYTNDGYFSFDEANTRNWDYNSRQKSEIQFNISQTIFDGVSLYASGSQQDYWGNNDKNRNISVGVSGQQWGIGYSLNYQYSRYTDQNNDRALSLNLSIPLERWLPRSRVSYQMTSQKDRPTQHEMRLDGSLLDDGRLSYSLEQSLDDDNNHNSSLNASYRSPYGTFSAGYSYGNDSSQYNYGVTGGVVIHPHGVTLSQYLGNAFALIDANGASGVRIQNYPGIATDPFGYAVVPYLTTYQENRLSVDTTQLPDNVDLEQTTQFVVPNRGAMVAARFNANIGYRVLVTVSDRNGKPLPFGALASNDETGQQSIVDEGGILYLSGISSKSQSWTVRWGNQADQQCQFAFSTPDSEPTTSVLQGTAQCH

SEQ ID NO: 4143 - protein, 740 aa, Escherichia coli
MADASTEFDVGQQHLSLSVPQIYVGRMARGYVSPELWEEGINAGLLNYSFNGNSINNRSNHNAGKSNYAYLNLQSGINIGSWRLRDNSTWSYNSGSSNSSNSNKWQHINTSAERDIIPLRSRLTVGDSYTDGDIFDSVNFRGLKINSTEAMLPDSQHGFAPVIHGIARGTAQVSVKQNGYDVYQTTVPPGPFTIDDINSAANGGDLQVTIKEADGSIQTLYVPYSSVPVLQRAGYTRYALAMGEYRSGNNLQSSPKFIQGSLMHGLEGNWTPYGGMQIAEDYQAFNLGIGKDLGLFGAFSFDITQANTTLADGTRHSGQSVKSVYSKSFYQTGTNIQVAGYRYSTQGFYNLSDSAYSRMSGYTVKPPTGDTNEQTQFIDYFNLFYSKRGQEQISISQQLGNYGTTFFSASRQSYWNTSRSDQQISFGLNVPFGDITTSLNYSYSNNIWQNDRDHLLAFTLNVPFSHWMRTDSQSAFRNSNASYSMSNDLKGGMTNLSGVYGTLLPDNNLNYSVQVGNTHGGNTSSGTSGYSSLNYRGAYGNTNVGYSRNGDSSQIYYGMSGGIIAHADGITFGQPLGDTMVLVKAPGADNVKIENQTGIHTDWRGYAILPFATEYRENRVALNANSLADNVELDETVVTVIPTHGAIARATFNAQIGGKVLMTLKYGNKSVPFGAIVTHGENKNGSIVAENGQVYLTGLPQSGKLQVSWGKDKNSNCIVEYKLPEVSPGTLLNQQTAICR

SEQ ID NO: 4144 - protein, 851 aa, Escherichia coli; identical to SEQ ID NO: 3458

SEQ ID NO: 4145 - protein, 826 aa, Escherichia coli; identical to SEQ ID NO: 3078

SEQ ID NO: 4146 - protein, 266 aa, Escherichia coli; identical to SEQ ID NO: 3102

SEQ ID NO: 4147 - protein, 161 aa, Escherichia coli; identical to SEQ ID NO: 2582

SEQ ID NO: 4148 - protein, 678 aa, Escherichia coli
MVPSTFSRLKAARCLPVVLAALIFAGCGTHTPDQSTAYMQGTAQADSAFYLQQMQQSSDDTRINWQLLAIRALVKEGKTGQAVELFNQLPQELNDSQRREKTLLAVEIKLAQKDFAGAQNLLAKITPADLEQNQQARYWQAKIDASQGRPSIDLLRALIAQEPLLGAKEKQQNIDATWQALSSMTQEQANTLVINADENILQGWLDLQRVWFDNRNDPDMMKAGIADWQKRYPNNPGAKMLPTQLVNVKAFKPASTNKIALLLPLNGQAAVFGRTIQQGFEAAKNIGTQPVAAQVAAAPAADVAEQPQPQTADGVASPAQASVSDLTGEQPAAQPAPVSTPAATTTAVSAPANPSAELKIYDTSSQPLSQILSQVQQDGASIVVGPLLKNNVEELLKSNTPLNVLALNQPENIENRVNICYFALSPEDEARDAARHIRDQGKQAPLVLIPRSSLGDRVANAFAQEWQKLGGGTVLQQKFGSTSELRAGVNGGSGIALTGSPITPRATTDSGMTTNNPTLQTTPTDDQFTNNGGRVDAVYIVATPGEIAFIKPMIAMRNGSQSGATLYASSRSAQGTAGPDFRLEMEGLQYSEIPMLAGGNLPLMQQALSAVNNDYSLARMYAMGVDAWSLANHFSQMRQVQGFEINGNTGSLTANPDCVINRKLSWLQYQQGQVVPAS

SEQ ID NO: 4149 - protein, 246 aa, Escherichia coli; identical to SEQ ID NO: 3021

SEQ ID NO: 4150 - protein, 539 aa, Escherichia coli; identical to SEQ ID NO: 3050

SEQ ID NO: 4151 - protein, 203 aa, Escherichia coli; identical to SEQ ID NO: 2009

SEQ ID NO: 4152 - protein, 565 aa, Escherichia coli; identical to SEQ ID NO: 2662

SEQ ID NO: 4153 - protein, 331 aa, Escherichia coli; identical to SEQ ID NO: 2700

SEQ ID NO: 4154 - protein, 760 aa, Escherichia coli; identical to SEQ ID NO: 2080

SEQ ID NO: 4155 - protein, 747 aa, Escherichia coli; identical to SEQ ID NO: 2072

SEQ ID NO: 4156 - protein, 241 aa, Escherichia coli; identical to SEQ ID NO: 2851

SEQ ID NO: 4157 - protein, 236 aa, Escherichia coli; identical to SEQ ID NO: 3482

SEQ ID NO: 4158 - protein, 367 aa, Escherichia coli
MKVKVLSLLVPALLVAGAANAAEVYNKDGNKLDLYGKVDGLHYFSDNDKVDGDKTYMRLGFKGETQVTDQLTGYGQWEYQIQGNAPESENNSWTRVAFAGLKFQDVGSFDYGRNYGVVYDVTSWTDVLPEFGGDTYGSDNFMQQRGNGFATYRNTDFFGLVDGLNFAVQYQGKNGSVSGEGMTNNGRDALEQNGDGVGGSITYDYEGFGIGAAVSSSKRTDAQNTAAYIGNGDRAETYTGGLKYDANNIYLAAQYTQTYNATRVGSLGWANKAQNFEAVAQYQFDFGLRPSVAYLQSKGKNLGTIGTRNYDDEDILKYVDVGATYYFNKNMSTYVDYKINLLDDNQFTRDAGINTDNIVALGLVYQF

SEQ ID NO: 4159 - protein, 365 aa, Escherichia coli; identical to SEQ ID NO: 3878

SEQ ID NO: 4160 - protein, 387 aa, Escherichia coli
MKRKVLAMLVPALLVAGAANAAEIYNKNGNKLDLYGKVDARHTFSDNPGDDGDETIIELGFKGETQITDQLTGYGQALTKTKASDTEGSDNTYVKLAFAGLKFGEMGSFDYGRNYGVIYDVEAWTDMLPVFGGDSYTWTDNFMAGRANGVATYRNSDFFGLVEGLNFALQYQGNNEGSNAGEDQEGTKNGHEDVRFQNGDGFGLSTSYDFDFGLSLGAAYSNSDRTNSQVALGGYHYNEYGKFAGGDTAEAWTFGAKYDANNVYLAMMYAETRNMTPYGNVGIANKTQNFEAVAQYQFDFGLRPSLAYVYSKGKDLGGNDYNNNGHQEYADQDLVNYVEIGATYYFNKNFSTYVDYKINLLDKDDDFYDNNGIATDDVVGVGLVYQF

SEQ ID NO: 4161 - protein, 274 aa, Escherichia coli; identical to SEQ ID NO: 2303

SEQ ID NO: 4162 - protein, 432 aa, Escherichia coli; identical to SEQ ID NO: 2026

SEQ ID NO: 4163 - protein, 243 aa, Escherichia coli; identical to SEQ ID NO: 2910

SEQ ID NO: 4164 - protein, 359 aa, Escherichia coli; identical to SEQ ID NO: 2328

SEQ ID NO: 4165 - protein, 351 aa, Escherichia coli
MKKSTLALVVMGIVASASVQAAEIYNKDGNKLDVYGKVKAMHYMSDNASKDGDQSYIRFGFKGETQINDQLTGYGRWEAEFAGNKAESDTAQQKTRLAFAGLKYKDLGSFDYGRNLGALYDVEAWTDMFPEFGGDSSAQTDNFMTKRASGLATYRNTDFFGVIDGLNLTLQYQGKNENRDVKKQNGDGFGTSLTYDFGGSDFAISGAYTNSDRTNEQNLQSRGTGKRAEAWATGLKYDANNIYLATFYSETRKMTPITGGFANKTQNFEAVAQYQFDFGLRPSLGYVLSKGKDIEGIGGEDLVNYIDVGATYYFNKNMSAFVDYKINQLDSDNKLNINNDDIVAIGMTYQF

SEQ ID NO: 4166 - protein, 193 aa, Escherichia coli; identical to SEQ ID NO: 2246

SEQ ID NO: 4167 - protein, 430 aa, Escherichia coli; identical to SEQ ID NO: 2617

SEQ ID NO: 4168 - protein, 203 aa, Escherichia coli; identical to SEQ ID NO: 2201

SEQ ID NO: 4169 - protein, 232 aa, Escherichia coli; identical to SEQ ID NO: 2087

SEQ ID NO: 4170 - protein, 729 aa, Escherichia coli
MLSTQFNRDNQYQAITKPSLLAGCIALALLPSAAFAAPATEETVIVEGSATAPEDGENDYSVTSTSAGTKMQMTQRDIPQSVTIVSQQRMEDQQLQTLGEVMENTLGISKSQADSDRALYYSRGFQIDNYMVDGIPTYFESRWNLGDALSDMALFERVEVVRGATGLMTGTGNPSAAINMVRKHATSREFKGDVSAEYGSWNKERYVADLQSPLTEDGKIRARIVGGYQNNDSWLDRYNSEKTFFSGIVDADLGDLTMLSAGYEYQRIDVNSPTWGGLPRWNTDGSSNSYDRARSTAPDWAYNDKEINKVFMTLKQRFADTWQATLNATHSEVEFDSKMMYVDAYVNKADGMLVGPYSNYGPGFDYVGGTGWNSGKRKVDALDLFADGSYELFGRQHNLMFGGSYSKQNNRYFSSWANIFPDEIGSFYNFNGNFPQTDWSPQSLAQDDTTHMKSLYAATRVTLADPLHLILGARYTNWRVDTLTYSMEKNHTTPYAGLVFDINDNWSTYASYTSIFQPQNDRDSSGKYLAPITGNNYELGLKSDWMNSRLTTTLAIFRIEQDNVAQSTGTPIPGSNGETAYKAVDGTVSKGVEFELNGAITDNWQLTFGATRYIAEDNEGNAVNPNLPRTTVKMFTSYRLPVMPELTVGGGVNWQNRVYTDTVTPYGTFRAEQGSYALVDLFTRYQVTKNFSLQGNVNNLFDKTYDTNVEGSIVYGAPRNFSITGTYQF

SEQ ID NO: 4171 - protein, 111 aa, Escherichia coli; identical to SEQ ID NO: 3370

SEQ ID NO: 4172 - protein, 478 aa, Escherichia coli; identical to SEQ ID NO: 3436

SEQ ID NO: 4173 - protein, 118 aa, Escherichia coli [sequence omitted]

SEQ ID NO: 4174 - protein, 125 aa, Escherichia coli
MTFMKGLPLLLLVASLCSHAALQPDRTRIVFNANDKATSLRVDNRSDKLPYLAYSWLENEKGEKSDDLLVALPPIQRLEPKATTQVRIVKQASTTKLPGDRETLFFYNMREIPPAPEKNSDHAVL

SEQ ID NO: 4175 - protein, 224 aa, Escherichia coli; identical to SEQ ID NO: 3165

SEQ ID NO: 4176 - protein, 518 aa, Escherichia coli; identical to SEQ ID NO: 2349

SEQ ID NO: 4177 - protein, 512 aa, Escherichia coli; identical to SEQ ID NO: 2973

SEQ ID NO: 4178 - protein, 386 aa, Escherichia coli; identical to SEQ ID NO: 3094

SEQ ID NO: 4179 - protein, 228 aa, Escherichia coli
MKRISFAVLALLMTAQQCFAGGVALSTTRVIYDGGKKEASLTVENHNKNEEFLIQSWIDDVNGNKKTPFIITPPLFKLDPDKNNVLRIVNIEDTLPKDRESVYWINVKAIPAKSAENENKNVLQIAVRTRLKLFYRPKGLPGSNLEAMKQLRFQCQNNQIVVNNDSAYNLTFNQFSINGQKIERAGMVLAKGKLNINLPAGTGNAHEVKYSIINDFGVAGEMLTKPIN

SEQ ID NO: 4180 - protein, 258 aa, Escherichia coli
MNKRSAVTKFFTNRVTKVLGMTLALMMASQSAMASLAADQTRYIFRGDKDALTITVTNNDKTHTFGGQAWVDNIVEKDTRPTFVVTPSFFKVKPNGQQTLRIIMASDHLPKDKESVYWLNIQDIPPALEGSGIAVALRTKLKLFYRPKALLEGRKGAEEGISLQSRPDGRTMLVNTTPYIFAIGSLLDGNGKKIATDNDTAQKLLMFMPGDEVQVKGNVVKVDSLNDYGELQTWTINKKKPAAPEAAKAEKADTAEQK

SEQ ID NO: 4181 - protein, 208 aa, Escherichia coli; identical to SEQ ID NO: 1949

SEQ ID NO: 4182 - protein, 362 aa, Escherichia coli; identical to SEQ ID NO: 2434

SEQ ID NO: 4183 - protein, 672 aa, Escherichia coli
MIVSAAPQVVSELDTPAAVSVVDGEEMRLATPRINLSESLTGVPGLQVQNRQNYAQDLQLSIRGFGSRSTYGIRGIRLYMDGIPATMPDGQGQTSNIDLSSVQNVEVLRGPFSALYGNASGGVMNVTTQTGQQPPTIEASSYYGSFGSWRYGLKATGATGDGTQPGDVDYTVSTTRFTTHGYRDHSGAQKNLANAKLGVRIDEASKLSLIFNSVDIKADDPGGLTKAEWKANPQQAPRAEQYDTRKTIKQTQAGLHYERSLSAQDDMSVMMYAGERETTQYQSIPMAPQLNPSHAGGVITLQRHYQGVDSRWTHRGELGVPVTFTTGLNYENMSENRKGYNNFRLNSGVPEYGQKGELRRDERNLMWNVDPYLQTQWQLSEKLSLDAGVRYSSVWFDSNDHYVTPGNGDDSGDASYHKWLPAGSLKYAMTDAWNIYLAAGRGFETPTINELSYRADGQSGMNFGLKPSTNDTIEIGSKTRIGDGLLSLALFQTDTDDEIVVDSSSGGRTTYKNAGKTRRQGAELAWDQRFAGDFRVKASWTWLDATYRSNVCNEQDCNGNRMPGIARNMGFASIGYVPEDGWYAGTEARYMGDIMADDENTAKAPSYTLVGLFTGYKYNYHNLTVDLFGRVDNLFDKEYVGSVIVNESNGRYYEPSPGRNYGVGMNIAWRFE

SEQ ID NO: 4184 - protein, 446 aa, Escherichia coli; identical to SEQ ID NO: 2176

SEQ ID NO: 4185 - protein, 231 aa, Escherichia coli; identical to SEQ ID NO: 3055

SEQ ID NO: 4186 - protein, 213 aa, Escherichia coli
MTKMSRYALITALAMFLAGCVGQREPAPVEEVKPAPEQPAEPQQPVPTVPSVPTIPQQPGPIEHEDQTAPPAPHIRHYDWNGAMQPMVSKMLGADGVTAGSVLLVDSVNNRTNGSLNAAEATETLRNALANNGKFTQVSAQQLSMAKQQLGLSPQDSLGTRSKAIGIARNVGAHYVLYSSASGNVNAPTLQMQLMLVQTGEIIWSGKGAVSQQ

SEQ ID NO: 4187 - protein, 239 aa, Escherichia coli; identical to SEQ ID NO: 3479

SEQ ID NO: 4188 - protein, 746 aa, Escherichia coli; identical to SEQ ID NO: 3031

SEQ ID NO: 4189 - protein, 249 aa, Escherichia coli; identical to SEQ ID NO: 3492

SEQ ID NO: 4190 - protein, 828 aa, Escherichia coli; identical to SEQ ID NO: 2380

SEQ ID NO: 4191 - protein, 230 aa, Escherichia coli
MMTKIKLLMLIIFYLIISASSHAAGGIALGATRIIYPADAKQTAVWIRNSHTNERFLVNSWIENSSGVKEKSFIITPPLFVSEPKSENTLRIIYTGPPLAADRESLFWMNVKTIPSVDKNALNGRNVLQLAILSRMKLFLRPIQLQELPAEAPDTLKFSRSGNYINVHNPSPFYVTLVNLQVGSQKLGNAMAAPRVSSQIPLPSGVQGKLKFQTVNDYGSVTPVREVNLN

SEQ ID NO: 4192 - protein, 631 aa, Escherichia coli; identical to SEQ ID NO: 3058

SEQ ID NO: 4193 - protein, 407 aa, Escherichia coli
MTERELSIIRALGEEFSTVLADLQRTFEGKMAAQAQAFEEKLASLSAVLQKHVTVDEVHPVLQAMVDDAVGAIPVPRDGRDYDPDVLQQAVNDAVANIPVPADGKSITPDDVRPMLEQMVKEAVSHIPVPRDGRDYDPDVLQQAVNDAVANIPVPADGKSITPDDVRPMLEQMVKEAVSHIPAPRDGRDYDPEVLKQAVNDAVANIPVPADGKSITPDDVRPMLEQMVKEAVSHIPVPRDGRDYDPDVLQKAVLDAVRALPAPQDGRDATALEIIPAIDDQKSFPRGTYATHQGGLWRAYEKTHGMRGWECLVDGVADIDVSMTGERLFSVVIRHSSGQRTEKTFSLPVMLYRGVFRAGETYHPGDTVTWGGSLWHCNSMTGDKPGEAHSSGWTLAAKRGRDAGGGK

SEQ ID NO: 4194 - protein, 686 aa, Escherichia coli
MFWRDITLSVWRKKTTGLKTKKRLLPLVLAAALCSSPVWAEEATFTANFKDTDLKSFIETVGANLNKTIIMGQGVQGKVSIRTMTPLNERQYYQLFLNLLEAQGYAVVPMENDVLKVVKSSAAKVEPLPLVGEGSDNYAGDEMVTKVVPVRNVSVRELAPILRQMIDSAGSGNVVNYDPSNVIMLTGRASVVERLTEVIQRVDHAGNRTEEVIPLDNASASEIARVLESLTKNSGENQPATLKSQIVADERTNSVIVSGDPATRDKMRRLIRRLDSEMERSGNSQVFYLKYSKAEDLVDVLKQVSGTLTAAKEEAEGTVGSGREIVSIAASKHSNALIVTAPQDIMQSLQSVIEQLDIRRAQVHVEALIVEVAEGSNINFGVQWASKDAGLMQFANGTQIPIGTLGAAISQAKPQKGSTVISENGATTINPDTNGDLSTLAQLLSGFSGTAVGVVKGDWMALVQAVKNDSSSNVLSTPSITTLDNQEAFFMVGQDVPVLTGSTVGSNNSNPFNTVERKKVGIMLKVTPQINEGNAVQMVIEQEVSKVEGQTSLDVVFGERKLKTTVLANDGELIVLGGLMDDQAGESVAKVPLLGDIPLIGNLFKSTADKKEKRNLMVFIRPTILRDGMAADGVSQRKYNYMRAEQIYRDEQGLSLMPHTAQPVLPAQNQALPPEVRAFLNAGRTR

SEQ ID NO: 4195 - protein, 191 aa, Escherichia coli
MKKSLLGLAFASLMFSAGSAVAADYKIDKEGQHAFVNFRIQHLGYSWLYGTFKDFDGTFTFDEKNPAADKVNVKINTTSVDTNHAERDKHLRSADFLNTEKYPQATFTSTSVKKDGDELDITGDLTLNGVTKPVTLEAKLIGQGDDPWGGKRAGFEAEGKIKLKDFNIKTDLGPASQEVDLIISVEGVQQK

SEQ ID NO: 4196 - protein, 614 aa, Escherichia coli
MIKKASLLTACSVTAFSAWAQDTSPDTLVVTANRFEQPRSTVLAPTTVVTRQDIDRWQSTSVNDVLRRLPGVDITQNGGSGQLSSIFIRGTNASHVLVLIDGVRLNLAGVSGSADLSQFPIALVQRVEYIRGPRSAVYGSDAIGGVVNIITTRDEPGTEISAGWGSNSYQNYDVSTQQQLGDKTRVTLLGDYAHTHGYDVVAYGNTGTQAQTDNDGFLSKTLYGALEHNFTDAWSGFVRGYGYDNRTNYDAYYSPGSPLLDTRKLYSQSWDAGLRYNGELIKSQLITSYSHSKDYNYDPHFGRYDSSATLDEMKQYTVQWANNVIVGHGSIGAGVDWQKQTTTPGTGYVENGYDQRNTGIYLTGLQQVGDFTFEGAARSDDNSQFGRHGTWQTSAGWEFIEGYRFIASYGTSYKAPNLGQLYGFYGNPNLDPEKSKQWEGAFEGLTAGVNWRISGYRNDVSDLIDYDDHTLKYYNEGKARIKGVEATANFDTGPLTHTVSYDYVDARNAITDTPLLRRAKQQVKYQLDWQLYDFDWGITYQYLGTRYDKDYSSYPYQTVKMDGVSLWDLAVAYPVTSHLTVRGKIANLFDKDYETVYGYQTAGREYTLSGSYTF

SEQ ID NO: 4197 - protein, 120 aa, Escherichia coli
MNAVLSVQGASAPVKKKSFFSKFTRLNMLRLVRAVLPAAVLMMFFPQLAMASGSQDLMASGNSTVKATFGKDSSVVKWVVLAEVLVGAVMYMMTKNVKFLAGFAIISVFIAVGMAVVGLK

SEQ ID NO: 4198 - protein, 250 aa, Escherichia coli; identical to SEQ ID NO: 3427

SEQ ID NO: 4199 - protein, 200 aa, Escherichia coli; identical to SEQ ID NO: 1784

SEQ ID NO: 4200 - protein, 871 aa, Escherichia coli; identical to SEQ ID NO: 3519

SEQ ID NO: 4201 - protein, 207 aa, Escherichia coli; identical to SEQ ID NO: 2211

SEQ ID NO: 4202 - protein, 266 aa, Escherichia coli; identical to SEQ ID NO: 1892

SEQ ID NO: 4203 - protein, 869 aa, Escherichia coli; identical to SEQ ID NO: 2903

SEQ ID NO: 4204 - protein, 826 aa, Escherichia coli; identical to SEQ ID NO: 3563

SEQ ID NO: 4205 - protein, 863 aa, Escherichia coli; identical to SEQ ID NO: 3959

SEQ ID NO: 4206 - protein, 368 aa, Escherichia coli; identical to SEQ ID NO: 2370

SEQ ID NO: 4207 - protein, 863 aa, Escherichia coli; identical to SEQ ID NO: 3946

SEQ ID NO: 4208 - protein, 816 aa, Escherichia coli; identical to SEQ ID NO: 3562

SEQ ID NO: 4209 - protein, 860 aa, Escherichia coli; identical to SEQ ID NO: 3544

SEQ ID NO: 4210 - protein, 539 aa, Escherichia coli; identical to SEQ ID NO: 3050

SEQ ID NO: 4211 - protein, 200 aa, Escherichia coli; identical to SEQ ID NO: 1789

SEQ ID NO: 4212 - protein, 366 aa, Escherichia coli; identical to SEQ ID NO: 3520

SEQ ID NO: 4213 - protein, 213 aa, Escherichia coli; identical to SEQ ID NO: 2232

SEQ ID NO: 4214 - protein, 243 aa, Escherichia coli; identical to SEQ ID NO: 3561

SEQ ID NO: 4215 - protein, 331 aa, Escherichia coli; identical to SEQ ID NO: 2705

SEQ ID NO: 4216 - protein, 512 aa, Escherichia coli; identical to SEQ ID NO: 2813

SEQ ID NO: 4217 - protein, 828 aa, Escherichia coli; identical to SEQ ID NO: 2381

SEQ ID NO: 4218 - protein, 241 aa, Escherichia coli; identical to SEQ ID NO: 2887

SEQ ID NO: 4219 - protein, 659 aa, Escherichia coli; identical to SEQ ID NO: 2942

SEQ ID NO: 4220 - protein, 232 aa, Escherichia coli; identical to SEQ ID NO: 2087

SEQ ID NO: 4221 - protein, 746 aa, Escherichia coli; identical to SEQ ID NO: 2949

SEQ ID NO: 4222 - protein, 715 aa, Escherichia coli; identical to SEQ ID NO: 3971

SEQ ID NO: 4223 - protein, 193 aa, Escherichia coli; identical to SEQ ID NO: 2250

SEQ ID NO: 4224 - protein, 432 aa, Escherichia coli; identical to SEQ ID NO: 2026

SEQ ID NO: 4225 - protein, 713 aa, Escherichia coli; identical to SEQ ID NO: 3523

SEQ ID NO: 4226 - protein, 229 aa, Escherichia coli; identical to SEQ ID NO: 4047

SEQ ID NO: 4227 - protein, 111 aa, Escherichia coli; identical to SEQ ID NO: 2911

SEQ ID NO: 4228 - protein, 224 aa, Escherichia coli; identical to SEQ ID NO: 3578

SEQ ID NO: 4229 - protein, 362 aa, Escherichia coli; identical to SEQ ID NO: 2998

SEQ ID NO: 4230 - protein, 89 aa, Escherichia coli; identical to SEQ ID NO: 2810

SEQ ID NO: 4231 - protein, 203 aa, Escherichia coli; identical to SEQ ID NO: 2201

SEQ ID NO: 4232 - protein, 231 aa, Escherichia coli; identical to SEQ ID NO: 2868

SEQ ID NO: 4233 - protein, 191 aa, Escherichia coli; identical to SEQ ID NO: 2727

SEQ ID NO: 4234 - protein, 729 aa, Escherichia coli; identical to SEQ ID NO: 2948

SEQ ID NO: 4235 - protein, 747 aa, Escherichia coli; identical to SEQ ID NO: 2954

SEQ ID NO: 4236 - protein, 998 aa, Escherichia coli; identical to SEQ ID NO: 3056

SEQ ID NO: 4237 - protein, 784 aa, Escherichia coli
MKKRIPTLLATMIATALYSQQGLAADLASHCMLGVPSYDRPLVQGDTNDLPVTINANHAKGDYPDDAVFTGSVDIMQGNSRLQADEVQLHQKEAPGQPEPVRTVDALGNVHYDDNQVILKGPKGWANLNTKDTNVWEGDYQMVGRQGRGKADLMKQRGENRYTILDNGSFTSCLPGSDTWSVVGSEIIHDREEQVAEIWNARFKVGPVSIFYSPYLQLPVGDKRRSGFLIPNAKYTTTNYFEFYLPYYWNIAPNMDATITPHYMHRRGNIMWENEFRYLSQAGAGLMELDYLPSDKVYEDEHPNDDSSRRWLFYWNHSGVMDQVWRFNVDYTKVSDPSYFNDFDNKYGSSTDGYATQKFSVGYAVQNFNATVSTKQFQVFSEQNTSSYSAEPQLDVNYYQNDVGPFDTRIYGQAVHFVNTRDDMPEATRVHLEPTINLPLSNNWGSINTEAKLLATHYQQTNLDWYNSRNTTKLDESVNRVMPQFKVDGKMVFERDMEMLAPGYTQTLEPRAQYLYVPYRDQSDIYNYDSSLLQSDYSGLFRDRTYGGLDRIASANQVTTGVTSRIYDDAAVERFNISVGQIYYFTESRTGDDNITWENDDKTGSLVWAGDTYWRISERWGLRGGIQYDTRLDNVATSNSSIEYRRDEDRLVQLNYRYASPEYIQATLPKYYSTAEQYKNGISQVGAVASWPIADRWSIVGAYYYDTNANKQADSMLGVQYSSCCYAIRVGYERKLNGWDNDKQHAVYDNAIGFNIELRGLSSNYGLGTQEMLRSNILPYQNTL

SEQ ID NO: 4238 - protein, 478 aa, Escherichia coli; identical to SEQ ID NO: 2409

SEQ ID NO: 4239 - protein, 227 aa, Escherichia coli; identical to SEQ ID NO: 3570

SEQ ID NO: 4240 - protein, 367 aa, Escherichia coli; identical to SEQ ID NO: 2431

SEQ ID NO: 4241 - protein, 678 aa, Escherichia coli; identical to SEQ ID NO: 2902

SEQ ID NO: 4242 - protein, 236 aa, Escherichia coli; identical to SEQ ID NO: 3970

SEQ ID NO: 4243 - protein, 208 aa, Escherichia coli; identical to SEQ ID NO: 1949

SEQ ID NO: 4244 - protein, 660 aa, Escherichia coli; identical to SEQ ID NO: 4092

SEQ ID NO: 4245 - protein, 233 aa, Escherichia coli; identical to SEQ ID NO: 3548

SEQ ID NO: 4246 - protein, 614 aa, Escherichia coli; identical to SEQ ID NO: 1883

SEQ ID NO: 4247 - protein, 122 aa, Escherichia coli; identical to SEQ ID NO: 2915

SEQ ID NO: 4248 - protein, 700 aa, Escherichia coli; identical to SEQ ID NO: 2926

SEQ ID NO: 4249 - protein, 274 aa, Escherichia coli; identical to SEQ ID NO: 2304

SEQ ID NO: 4250 - protein, 446 aa, Escherichia coli; identical to SEQ ID NO: 2180

SEQ ID NO: 4251 - protein, 229 aa, Escherichia coli; identical to SEQ ID NO: 3589

SEQ ID NO: 4252 - protein, 162 aa, Escherichia coli; identical to SEQ ID NO: 1969

SEQ ID NO: 4253 - protein, 241 aa, Escherichia coli; identical to SEQ ID NO: 3582

SEQ ID NO: 4254 - protein, 696 aa, Escherichia coli; identical to SEQ ID NO: 4038

SEQ ID NO: 4255 - protein, 237 aa, Escherichia coli; identical to SEQ ID NO: 2816

SEQ ID NO: 4256 - protein, 224 aa, Escherichia coli; identical to SEQ ID NO: 3604

SEQ ID NO: 4257 - protein, 203 aa, Escherichia coli; identical to SEQ ID NO: 2009

SEQ ID NO: 4258 - protein, 518 aa, Escherichia coli; identical to SEQ ID NO: 2351

SEQ ID NO: 4259 - protein, 412 aa, Escherichia coli; identical to SEQ ID NO: 2908

SEQ ID NO: 4260 - protein, 517 aa, Escherichia coli; identical to SEQ ID NO: 2462

SEQ ID NO: 4261 - protein, 359 aa, Escherichia coli; identical to SEQ ID NO: 2332

SEQ ID NO: 4262 - protein, 351 aa, Escherichia coli; identical to SEQ ID NO: 2872

SEQ ID NO: 4263 - protein, 760 aa, Escherichia coli; identical to SEQ ID NO: 2078

SEQ ID NO: 4264 - protein, 252 aa, Escherichia coli; identical to SEQ ID NO: 3543

SEQ ID NO: 4265 - protein, 230 aa, Escherichia coli; identical to SEQ ID NO: 2995

SEQ ID NO: 4266 - protein, 650 aa, Escherichia coli; identical to SEQ ID NO: 3057

SEQ ID NO: 4267 - protein, 567 aa, Escherichia coli; identical to SEQ ID NO: 3518

SEQ ID NO: 4268 - protein, 686 aa, Escherichia coli; identical to SEQ ID NO: 3129

SEQ ID NO: 4269 - protein, 760 aa, Escherichia coli; identical to SEQ ID NO: 3923

SEQ ID NO: 4270 - protein, 249 aa, Escherichia coli; identical to SEQ ID NO: 3492

SEQ ID NO: 4271 - protein, 819 aa, Escherichia coli
MDTVNIYRLSFVSCLVVAMPCALAVEFNLNVLDKSMRDRIDISLLKEKGVIAPGEYFVSVAVNNNQISNGQKINWHKNDDKTIPCINDLLVDKFGLKPEVRQSLPLINQCVDFSSRPEMLFNFDQANQQLNITIPQAWLAWHSENWTPPSTWKEGVAGVLMDYNLFASSYRPQDGSSSTNLNAYGTAGINTGAWRLRSDYQLNQTDSDDNHEQSGEISRTYLFRPLPQLGSKLTLGETDFSSNIFDGFSYTGAALASDDRMLPWELRGYAPQISGIAQTNATVTISQSGRVIYQKKVPPGPFIIDDLNQSVQGTLDVKVTEEDGRVNNFQVSAASTPFLTRQGQVRYKLAAGQPRPSMSHQTENETFFSNEVSWGMLSNTSLYGGLLLSGDDYHSAAIGIGQNMLWLGALSFDVTWASSHFDTQQDERGLSYRFNYSKQVDATNSTISLAAYRFSDRHFHSYANYLDHKYNDSDAQDEKQTISLSVGQPITPLNLNLYANLLHQTWWNADASTTANITAGFNVDIGDWRDISISTSFNTTHYEDKDRDNQIYLSISLPFGNGGRVGYDMQNSSHSTTHRMSWNDTLDERNSWGMSAGLQSDRPDNGAQVSGNYQHLSSAGEWDISGTYAANDYSSVSSSWSGSFTATQYGAAFHRRSSTNEPRLMVSTDGVADIPVQGNLDYTNHFGIAVVPLISSYQPSTVAVNMNDLPDGVTVAENVIKETWIEGAIGYKSLASRSGKDVNVIIRNASGQFPPLGADIRQDDSGISVGMVGEEGHAWLNGVAENQKFTVVWGDSQHCSLHLPEHMEDTANRLILPCH

SEQ ID NO: 4272 - protein, 869 aa, Escherichia coli
MKIPTTTDIPQRYTWCLAGICYSSLAILPSFLSYAESYFNPAFLLENGTSVADLSRFERGNHQPAGVYRVDLWRNDEFIGSQDIVFESTTENTGDKSGGLMSCFNQVLLERIGLNSSAFPELAQQQNNKCINLLKAVPDATINFDFAAMRLNITIPQIALLSSAHGYIPPEEWDEGIPALLLNYNFTGNRGNGNDSYFFSELSGINIGPWRLRNNGSWNYFRGNGYHSEQWNNIGTWVQRAIIPLKSELVMGDGNTGSDIFDGVGFRGVRLYSSDNMYPDSQQGFAPTVRGIARTAAQLTIRQNGFIIYQSYVSPGAFEITDLHPTSSNGDLDVTIDERDGNQQNYTIPYSTVPILQREGRFKFDLTAGDFRSGNSQQSSPFFFQGTALGGLPQEFTAYGGTQLSANYTAFLLGLGRNLGNWGAVSLDVTHARSQLADDSRHEGDSIRFLYAKSMNTFGTNFQLMGYRYSTQGFYTLDDVAYRRMEGYEYDYDYDGEHRDEPIIVNYHNLRFSRKDRLQLNISQSLNDFGSLYISGTHQKYWNTSDSDTWYQVGYTSSWVGISYSLSFSWNESVGIPDNERIVGLNVSVPFNVLTKRRYTRENALDRAYASFNANRNSNGQNSWLAGVGGTLLEGHNLSYHVSQGDTSNNGYTGSATANWQATYGTLGVGYNYDRDQHDVNWQLSGGVVGHENGITLSQPLGDTNVLIKAPGAGGVRIENQTGILTDWRGYAVMPYATVYRYNRIALDTNTMGNSIDVEKNISSVVPTQGALVRANFDTRIGVRALITVTQGGKPVPFGSLVRENSTGITSMVGDDGQVYLSGAPLSGELLVQWGDGANSRCIAHYVLPKQSLQQAVTVISAVCTHPGS

SEQ ID NO: 4273 - protein, 591 aa, Escherichia coli
MPSFIGGLVVFVSAAFNAQAETWFDPAFFKDDPSMVADLSRFEKGQKITPGVYRVDIVLNQTIVDTRNVNFVEITPEKGIAACLTTESLDAMGVNTDAFPAFKQLDKQACVPLAEIIPDASVTFNVNKLRLEISVPQIAIKSNARGYVPPERWDEGINALLLGYSFSGANSIHSSADSDSGDSYFLNLNSGVNLGPWRLRNNSTWSRSSGQTAEWKNLSSYLQRAVIPLKGELTVGDDYTAGDFFDSVSFRGVQLASDDNMLPDSLKGFAPVVRGIAKSNAQITIKQNGYTIYQTYVSPGAFEISDLYSTSSSGDLLVEIKEADGSVNSYSVPFSSVPLLQRQGRIKYAVTLAKYRTNSNEQQESKFAQATLQWGGPWGTTWYGGGQYAEYYRAAMFGLGFNLGDFGAISFDVTQAKSTLADQSEHKGQSYRFLYAKTLNQLGTNFQLMGYRYSTSGFYTLSDTMYKHMDGYEFNDGDDEDTPMWSRYYNLFYTKRGKLQVNISQQLGEYGSFYLSGSQQTYWHTDQQDRLLQFGYNTQIKDLSLGVSWNYSKSRGQPDADQVFALNFSLPLNLLLPRSNDSYTRKKITPG

SEQ ID NO: 4274 - protein, 230 aa, Escherichia coli
MMTKIKLLMLIIFYLIISASTHAAGGIALGATRIIYPADAQQTAVWIRNSHTNERFLVNSWIENSSGVKEKSFIITPPLFVSEPKSENTLRIIYTGPPLAADRESLFWMNVKTIPSVDKNALNGRNVLQLAILSRMKLFLRPIQLQELPAEAPDTLKFSRSGNYINVHNPSPFYVTLVNLQVGSQKLGNAMAAPRVNSQIPLPSGVQGKLKFQTVNDYGSVTPVREVNLN

SEQ ID NO: 4275 - protein, 746 aa, Escherichia coli
MNKKIHSLALLVNLGIYGVAQAQEPTDTPVSHDDTIVVTAAEQNLQAPGVSTITADEIRKNPVARDVSEIIRTMPGVNLTGNSTSGQRGNNRQIDIRGMGPENTLILIDGKPVSSRNSVRQGWRGERDTRGDTSWVPPEMIERIEVLRGPAAARYGNGAAGGVVNIITKKGSGEWHGSWDAYFNAPEHKEEGATKRTNFSLTGPLGDEFSFHLYGNLDKTQADAWDINQGHQSARAGTYATTLPAGREGVINKDINGVVRWDFAPLQSLELEAGYSRQGNLYAGDTQNTNSDAYTRSKYGDETNRLYRQNYALTWNGGWDNGVTTSNWVQYEHTRNSRIPEGLAGGTEGKFNEKATQDFVDIDLDDVMLHSEVNLPIDFLVNQTLTLGTEWNQQRMKDLSSNTQALTGANTGGAIDGVSATDRSPYSKAEIFSLFAENNMELTDSTIVTPGLRFDHHSIVGNNWSPALNISQGLGDDFTLKMGIARAYKAPSLYQTNPNYILYSKGQGCYASAGGCYLQGNDDLKAETSINKEIGLEFKRDGWLAGVTWFRNDYRNKIEAGYVAVGQNAVGTDLYQWDNVPKAVVEGLEGSLNVPVSETVMWTNNITYMLKSENKTTGDRLSIIPEYTLNSTLSWQAREDLSMQTTFTWYGKQQPKKYNYKGQPAVGPETKEISPYSIVGLSATWDVTKNVSLTGGVDNLFDKRLWRAGNAQTTGDLAGANYIAGAGAYTYNEPGRTWYMSVNTHF

SEQ ID NO: 4276 - protein, 669 aa, Escherichia coli
MIVSASGYEKKLTNAAASVSVISQEELQSSQYHDLAEALRSVEGVDVESGTGKTGGLEISIRGMPASYTLILIDGVRQGGSSDVTPNGFSAMNTGFMPPLAAIERIEVIRGPMSTLYGSDAMGGVVNIITRKNADKWLSSVNAGLNLQESNKWGNSSQFNFWSSGPLVDDSVSLQVRGSTQQRQGSSVTSLSDTAATRIPYPTESQNYNLGARLDWKASEQDVLWFDMDTTRQRYDNRDGQLGSLTGGYDRTLRYERNKISAGYDHTFTFGTWKSYLNWNETENKGRELVRSVLKRDKWGLAGQPRELKESNLILNSLLLTPLGESHLVTVGGEFQSSSMKDGVVLASTGETFRQKSWSVFAEDEWHLTDALALTAGSRYEHHEQFGGHFSPRAYLVWDVADAWTLKGGVTTGYKAPRMGQLHKGISGVSGQGKTNLLGNPDLKPEESVSYEAGVYYDNPAGLNANVIGFMTDFSNKIVSYSINDNTNSYVNSGKARLHGVEFAGTLPLWSEDVTLSLNYTWTRSEQRDGDNKGAPLSYTPEHMVNAKLNWQITEEVASWLGARYRGKTPRFTQNYSSLSAVQKKVYDEKGEYLKAWTVVDAGLSWKMTDALTLNAAVNNLLNKDYSDVSLYSAGKSTLYAGDYFQTGSSTTGYVIPERNYWMSLNYQF

SEQ ID NO: 4277 - protein, 838 aa, Escherichia coli
MPQRHHQGHKRTPKQLALIIKRCLPMVLTGSGMLCTTANAEEYYFDPIMLETTKSGMQTTDLSRFSKKYAQLPGTYQVDIWLNKKKVSQKKITFTANAEQLLQPQFTVEQLRELGIKVDEIPALAEKDDDSVINSLEQIIPGTAAEFDFNHQRLNLSIPQIALYRDARGYVSPSRWDDGIPTLFTNYSFTGSDNRYRQGNRSQRQYLNMQNGANFGPWRLRNYSTWTRNDQASSWNTISSYLQRDIKALKSQLLLGESATSGSIFSSYTFTGVQLASDDNMLPNSQRGFAPTVRGIANSSAIVTIRQNGYVIYQSNVPAGAFEINDLYPSSNSGDLEVTIEESDGTQRRFIQPYSSLPMMQRPGHLKYSATAGRYRADANSDSKEPEFAEATAIYGLNNTFTLYGGLLGSEDYYALGIGIGGTLGALGALSMDINRADTQFDNQHSFHGYQWRTQYIKDIPETNTNIAVSYYRYTNDGYFSFDEANTRNWDYNSRQKSEIQFNISQTIFDGVSLYASGSQQDYWGNNEKNRNISVGVSGQQWGIGYSLNYQYSRYTDENNDRALSLNLSIPLERWLPRSRVSYQMTSQKDRPTQHEMRLDGSLLDDGRLSYSLEQSLDDDNNHNSSLNASYRSPYGTFSAGYSYGNDSSQYNYGVTGGVVIHPHGVTLSQYLGNAFALIDANGASGVRIQNYPGIATDPFGYAVVPYLTTYQENRLSVDTTQLPDNVDLEQTTQFVVPNRGAMVAARFNANIGYRVLVTVSDRNGKPLPFGALASNDETGQQSIVDEGGILYLSRISSKSQSWTVRWGNQADQQCQFAFSTPDSEPTTSVLQGTAQCH

SEQ ID NO: 4278 - protein, 432 aa, Escherichia coli; identical to SEQ ID NO: 2026

SEQ ID NO: 4279 - protein, 700 aa, Escherichia coli; identical to SEQ ID NO: 3128

SEQ ID NO: 4280 - protein, 224 aa, Escherichia coli
MATMLLLLLFACHSTVANAAVALGATRVIYPANQKQVLLPVTNNDPASVYLIQSWIENAGDQKDTQFVITPPLFSMQGKKENTLRIINATNHQLPGDRESLFWVNVKAIPAMEKDQKNENTLQLAIISRIKMFYRPTNLAMAPEEAPAMLRFRRSGSKLTLINPTPYFITVTNMKAGNSNLPNTMVPPKGEVSVDITHAATGDISFQTINDYGALTPRIKATMQ

SEQ ID NO: 4281 - protein, 207 aa, Escherichia coli; identical to SEQ ID NO: 2211

SEQ ID NO: 4282 - protein, 170 aa, Escherichia coli [sequence omitted]

SEQ ID NO: 4283 - protein, 130 aa, Escherichia coli
MPVDRETLFELSIASVPSGKVENQSVKVAMRSVFKLFWRPEGLPGDPLEAYQQLRWTRNSQGVQLTNPTPYYINLIQVSVNGKALSNAGVVPPKSQRQTSWCQVIAQCHVAWRAINDYGGLSAKKEQNLP

SEQ ID NO: 4284 - protein, 732 aa, Escherichia coli
MMRKKYMPRALGPLLLVVLSPAVAQQNDDNEIIVSASRSNRTVAEMAQTTWVIENAELEQQIQGGKELKDALAQLIPGLDVSSQSRTNYGMNMRGRPLVVLIDGVRLNSSRSDSRQLDSVDPFNIDHIEVISGATALYGGGSTGGLINIVTKKGQPETMMEFEAGTKSGFNSSKDHDERIAGAVSGGNDHISGRLSVAYQKFGGWFDGNGDATLLDNTQTGLQHSNRLDIMGTGTLNIDESRQLQLITQYYKSQGDDNYGLNLGKGFSAISGSSTPYVSKGLNSDRIPGTERHLISLQYSDSDFLGQELVGQVYYRDESLRYYPFPTVNANKQATAFSSSQQDTDQYGMKLTLNSQLMDGWQITWGLDAEHERFTSNQMFFDLAQASASGGLNNHKIYTTGRYPSYDITNLAAFLQSSYDINDIFTVSGGVRYQYTENRVDDFIDYTQQQKIAAGKAISADAIPGGSVDYENFLFNAGLLMHITERQQAWFNFSQGVALPDPGKYYGRGIYGAAVNGHLPLTKSVNVSDSKLEGVKVDSYELGWRFIGDNLRTQIAAYYSLSNKSVERNKDLTISVKDDRRRIYGVEGAVDYLIPDTDWSTGVNFNVLKTESKVNGQWQKYDVKESSPSKATAYINWAPEPWSLRVQSTTSFDVSDAEGNDINGYTTVDFISSWQLPVGTLSFSVENLFDRDYTTVWGQRAPLYYSSGYGPASLYDYKGRGRTFGLNYSVLF

SEQ ID NO: 4285 - protein, 367 aa, Escherichia coli
MKVKVLSLLVPALLVAGAANAAEVYNKDGNKLDLYGKVDGLHYFSDNKDVDGDQTYMRLGFKGETQVTDQLTGYGQWEYQIQGNSAENENNSWTRVAFAGLKFQDVGSFDYGRNYGVVYDVTSWTDVLPEFGGDTYGSDNFMQQRGNGFATYRNTDFFGLVDGLNFAVQYQGKNGSVSGEGMTNNGRGALRQNGDGVGGSITYDYEGFGIGGAISSSKRTDDQNSPLYIGNGDRAETYTGGLKYDANNIYLAAQYTQTYNATRVGSLGWANKAQNFEAVAQYQFDFGLRPSVAYLQSKGKNLGTIAGRNYDDEDILKYVDVGATYYFNKNMSTYVDYKINLLDDNQFTRDAGINTDNIVALGLVYQF

SEQ ID NO: 4286 - protein, 826 aa, Escherichia coli
MLRMTPLASAIVALLLGIEAYAAEETFDTHFMIGGMKDQQVANIRLDDNQPLPGQYDIDIYVNKQWRGKYEIIVKDNPQETCLSIEVIKRLGINSDNFASGKQCLTFEQLVQGGSYTWDIGVFRLDFSVPQAWVEELESGYVPPENWERGINAFYTSYYVSQYYSDYKASGNSKSTYVRFNSGLNLLGWQLHSDASFSKTNNNPGVWKSNTLYLERGFAQLLGTLRVGDMYTSSDIFDSVRFSGVRLFRDMQMLPNSKQNFTPRVQGIAQSNALVTIEQNGFVVYQKEVPPGPFAITDLQLAGGGADLDVSVKEADGSVTTYLVPYAAVPNMLQPGVSKYDFAAGRSHIEGASKQSDFVQAGYQYGFNNLLTLYGGSMVANNYYAFTLGTGWNTRIGAISVDATKSHSKQDNGDVFDGQSYQIAYNKFVSQTSTRFGLAAWRYSSRDYRTFNDHVWANNKDNYRRDENDVYDIADYYQNDFGRKNSFSANMSQSLPEGWGSVSLSTLWRDYWGRSGSSKDYQLSYSNNWRRISYILAASQAYDENHHEEKRFNIFISIPFDWGDDVTTPRRQIYMSNSTTFDDQGFASNNTGLSGTVGSRDQFNYGVNLSYQNQGNETTAGANLTWNAPVATVNGSYSQSSTYRQAGASVSGGIVAWSGGVNLANRLSETFAVMNAPGIKDAYVNGQKYRTTNRNGVVVYDGMTPYRENHLMLDVSQSDSEAELRGNRKIAAPYRGAVVLVNFDTNQRKPWFIKALRADGQPLMFGYEVNDIHGHNIGVVGQGSQLFIRTNEVPPSVNVAIDKQQGLSCTITFGKEIDESRNYICQ

SEQ ID NO: 4287 - protein, 641 aa, Escherichia coli
MLAVDDDGETMVVTASSVEQNLKDAPASISVITQEDLQRKPVQNLKDVLKEVPGVQLTNEGDNRKGVSIRGLDSSYTLILVDGKRVNSRNAVFRHNDFDLNWIPVDSIERIEVVRGPMSSLYGSDALGGVVNIITKKIGQKWSGTVTVDTTIQEHRDRGDTYNGQFFTSGPLIDGVLGMKAYGSLAKREKDDPQNSTTTDTGETPRIEGFSSRDGNVEFACTPNQNHDFTAGYGFDRQDRDSDSLDKNRLERQNYSVSHNGRWDYGTSELKYYGEKVENKNPGNSSPITSESNTVDGKYTLPLTAINQFLTVGGEWRHDKLSDAVNLTGGTSSKTSASQYALFVEDEWRIFEPLALTTGVRMDDHETYGEHWSPRAYLVYNATDTVTVKGGWATAFKAPSLLQLSPDWTSNSCRGACKIVGSPDLKPETSESWELGLYYMGEEGWLEGVESSVTVFRNDVKDRISISRTSDVNAAPGYQNFVGFETGANGRRIPVFSYYNVNKARIQGVETELKIPFNDEWKLSINYTYNDGRDVSNGENKPLSDLPFHTANGTLDWKPLALEDWSFYVSGHYTGQKRADSATAKTPGGYTIWNTGAAWQVTKDVKLRAGVLNLGDKDLSRDDYSYNEDGRRYFMAVDYRF

SEQ ID NO: 4288 - protein, 368 aa, Escherichia coli; identical to SEQ ID NO: 2371

SEQ ID NO: 4289 - protein, 161 aa, Escherichia coli; identical to SEQ ID NO: 2582

SEQ ID NO: 4290 - protein, 211 aa, Escherichia coli
MKKIWLALAGLVLAFSASAAQYEDGKQYTTLEKPVAGAPQVLEFFSFFCPHCYQFEEVLHISDNVKKKLPEGVKMTKYHVNFMGGDLGKDLTQAWAVAMALGVEDKVTVPLFEGVQKTQTIRSASDIRDVFINAGIKGEEYDAAWNSFVVKSLVAQQEKAAADVQLRGVPAMFVNGKYQLNPQGMDTSNMDVFVQQYADTVKYLSEKNNSM

SEQ ID NO: 4291 - protein, 368 aa, Escherichia coli
MNKTITALAIMMASFAANASVLPETPVPFKSGTGAIDNDTVYIGLGSAGTAWYKLDTQAKDKKWTALAAFPGAPRDQATSAFIDGNLYVFGGIGKNSKGLTQVFNDVHKYNPKTNSWVKLMSHAPMGMAGHVTFVHNGKAYVTGGVNQNIFNGYFEDLNEAGKDSATIDKINAHYFDKKAEDYFFNKFLLSFDPSTQQWSYAGESPWYGTAGAALVNKGDKTWLINGEAKPGLRTDAVFELDFTGNNLKWNKLAPVSSPDGVAGGFAGISNDSLIFAGGAGFKGSRENYQNGKNYAHEGLKKSYSTDIHLWHNGKWDKSGELSQGRAYGVSLPWNNSLLIIGGETAGGKAVTDSVLISVKDNKVTVQN

SEQ ID NO: 4292 - protein, 203 aa, Escherichia coli; identical to SEQ ID NO: 2201

SEQ ID NO: 4293 - protein, 161 aa, Escherichia coli; identical to SEQ ID NO: 2582

SEQ ID NO: 4294 - protein, 518 aa, Escherichia coli; identical to SEQ ID NO: 2349

SEQ ID NO: 4295 - protein, 243 aa, Escherichia coli; identical to SEQ ID NO: 3483

SEQ ID NO: 4296 - protein, 614 aa, Escherichia coli; identical to SEQ ID NO: 1888

SEQ ID NO: 4297 - protein, 878 aa, Escherichia coli
MSYLNLRLYQRNTQCLHIRKHRLAGFFVRLFVACAFAAQAPLSSAELYFNPRFLADDPQAVADLSRFENGQELPPGTYRVDIYLNNGYMATRDVTFNTGDSEQGIVPCLTRAQLASMGLNTASVSGMNLLADDACVPLTSMIHDATAHLDVGQQRLNLTIPQAFMSNRARGYIPPELWDPGINAGLLNYNFSGNSVQNRIGGNSHYAYLNLQSGLNIGAWRLRDNTTWSYNSSDRSSGSKNKWQHINTWLERDIIPLRSRLTLGDGYTQGDIFDGINFRGVQLASDDNMLPDSQRGFAPVIHGIARGTAQVTIKQNGYDIYNSTVPPGPFTINDIYAAGNSGDLQVTIKEADGSTQIFTVPYSSVPLLQREGHTRYSITAGEYRSGNAQQEKPRFFQSTLLHGLPAGWTIYGGTQLADRYRAFNFGIGKNMGALGALSVDMTQANSTLPDDSQHDGQSVRFLYNKSLNESGTNIQLVGYRYSTSGYFNFADTTYSRMNGYNIETQDGVIQVKPKFTDYYNLAYNKRGKLQLTVTQQLGRTSTLYLSGSHQTYWGTSNVDEQFQAGLNTAFEDINWTLSYSLTKNAWQKGRDQMLALNVNIPFSHWLRSDSKSQWRHASASYSMSHDLNGRMTNLAGVYGTLLEDNNLSYSVQTGYAGGGDGNSGSTGYATLNYRGGYGNANIGYSHSDDIKQLYYGVSGGVLAHANGVTLGQPLNETVVLVKAPGAKDAKVENQTGVRTDWRGYAVLPYATEYRENRVALDTNTLADNVDLDNAVANVVPTRGAIVRAEFKARVGIKLLMTLTHNNKPLPFGAMVTSESSQSSGIVADNGQVYLSGMPLAGKVQVKWGEEENAHCVANYQLPPESQQQLLTQLSAECR

SEQ ID NO: 4298 - protein, 517 aa, Escherichia coli; identical to SEQ ID NO: 3116

SEQ ID NO: 4299 - protein, 219 aa, Escherichia coli; identical to SEQ ID NO: 3328

SEQ ID NO: 4300 - protein, 274 aa, Escherichia coli; identical to SEQ ID NO: 2318

SEQ ID NO: 4301 - protein, 432 aa, Escherichia coli; identical to SEQ ID NO: 2026

SEQ ID NO: 4302 - protein, 813 aa, Escherichia coli
MVLTGSGMLCTTANAEEYYFDPIMLETTKSGMQTTDLSRFSKKYAQLPGTYQVDIWLNKKKVSQKKITFTANAEQLLQPQFTVEQLRELGIKVDEIPALAEKDDDSVINSLEQIIPGTAAEFDFNHQRLNLSIPQIALYRDARGYVSPSRWDDGIPTLFTNYSFTGSDNRYRQGNRSQRQYLNMQNGANFGPWRLRNYSTWTRNDQASSWNTISSYLQRDIKALKSQLLLGESATSGSIFSSYTFTGVQLASDDNMLPNSQRGFAPTVRGIANSSAIVTIRQNGYVIYQSNVPAGAFEINDLYPSSNSGDLEVTIEESDGTQRRFIQPYSSLPMMQRPGHLKYSATAGRYRADANSDSKEPEFAEATAIYGLNNTFTLYGGLLGSEDYYALGIGIGGTLGALGALSMDINRADTQFDNRHSFHGYQWRTQYIKDIPETNTNIAVSYYRYTNDGYFSFDEANTRNWDYNSRQKSEIQFNISQTIFDGVSLYASGSQQDYWGNNDKNRNISVGVSGQQWGIGYSLNYQYSRYTDQNNDRALSLNLSIPLERWLPRSRVSYQMTSQKDRPTQHEMRLDGSLLDDGRLSYSLEQSLDDDNNHNSSLNASYRSPYGTFSAGYSYGNDSSQYNYGVTGGVVIHPHGVTLSQYLGNAFALIDANGASGVRIQNYPGIATDPFGYAVVPYLTTYQENRLSVDTTQLPDNVDLEQTTQFVVPNRGAMVAARFNANIGYRVLVTVSDRNGKPLPFGALASNDETGQQSIVDEGGILYLSGISSKSQSWTVRWGNQADQQCQFAFSTPDSEPTTSVLQGTAQCH

SEQ ID NO: 4303 - protein, 834 aa, Escherichia coli; identical to SEQ ID NO: 3095

SEQ ID NO: 4304 - protein, 431 aa, Escherichia coli; identical to SEQ ID NO: 3408

SEQ ID NO: 4305 - protein, 883 aa, Escherichia coli
MTAIRAAFKAYRMHQVLIMPRFARLTIALGLATAVFPVDAEYYFNPRFLSNDLAESVDLSAFTKGREAPPGTYRVDIYLNDEFMTSRDITFIADDNNAELIPCLSTDLLVSLGIKKSALLDNKEHSAEKHVPDNSACTPLQDRLADASTEFDVGQQHLSLSVPQIYVGRMARGYVSPDLWEEGINAGLLNYSFNGNSINNRSNHNAGKSNYAYLNLQSGINIGSWRLRDNSTWSYYSGSSNSSDSNKWQHINTSAERDIIPLRSRLTVGDSYTDGDIFDSVNFRGLKINSTEAMLPDSQHGFAPVIHGIARGTAQVSVKQNGYDVYQTTVPPGPFTIDDINSAANGGDLQVTIKEADGSIQTLYVPYSSVPVLQRAGYTRYALAMGEYRSGNNLQSSPKFIQGSLMHGLEGNWTPYGGMQIAEDYQAFNLGIGKDLGLFGAFSFDITQANTTLADGTRHSGQSVKSVYSKSFYQTGTNIQVAGYRYSTQGFYNLSDSAYSRMSGYTVKPPTGDTNEQTQFIDYFNLFYSKRGQEQISISQQLGNYGTTFFSASRQSYWNTSRSDQQISFGLNVPFGDITTSLNYSYSNNIWQNDRDHLLAFTLNVPFSHWMRTDSQSAFRNSNASYSMSNDLKGGMTNLSGVYGTLLPDNNLNYSVQVGNTHGGNTSSGTSGYSSLNYRGAYGNTNVGYSRNGDSSQIYYGMSGGIIAHADGITFGQPLGDTMVLVKAPGADNVKIENQTGIHTDWRGYAILPFATEYRENRVALNANSLADNVELDETVVTVIPTHGAIARATFNAQIGGKVLMTLKYGNKSVPFGAIVTHGENKNGSIVAENGQVYLTGLPQSGKLQVSWGNDKNSNCIVDYKLPEVSPGTLLNQQTAICR

SEQ ID NO: 4306 - protein, 224 aa, Escherichia coli
MATVLLLLLFACHSTVANAAVALGATRVIYPANQKQVLLPVTNNDPASVYLIQSWIENAGDQKDTQFVITPPLFSMQGKKENTLRIINATNHQLPGDRESLFWVNVKAIPAMEKDQKNENTLQLAIISRIKMFYRPTNLAMAPEEAPAMLRFRRSGSKLTLINPTPYFITVTNMKAGNSNLPNTMVPPKGEVSVDITHAATGDISFQTINDYGALTPRIKATMQ

SEQ ID NO: 4307 - protein, 686 aa, Escherichia coli
MFWRDITLSVWRKKTTGLKTKKRLLPLVLAAALCSSPVWAEEATFTANFKDTDLKSFIETVGANLNKTIIMGQGVQGKVSIRTMTPLNERQYYQLFLNLLEAQGYAVVPMENDVLKVVKSSAAKVEPLPLVGEGSDNYAGDEMVTKVVPVRNVSVRELAPILRQMIDSAGSGNVVNYDPSNVIMLTGRASVVERLTEVIQRVDHAGNRTEEVIPLDNASASEIARVLESLTKNSGENQPATLKSQIVADERTNSVIVSGDPATRDKMRRLIRRLDSEMERSGNSQVFYLKYSKAEDLVDVLKQVSGTLTAAKEEAEGTVGSGREVVSIAASKHSNALIVTAPQDIMQSLQSVIEQLDIRRAQVHVEALIVEVAEGSNINFGVQWASKDAGLMQFANGTQIPIGTLGAAISQAKPQKGSTVISENGATTINPDTNGDLSTLAQLLSGFSGTAGGVVKGDWMALVQAVKNDSSSNVLSTPSITTLDNQEAFFMVGQDVPVLTGSTVGSNNSNPFNTVERKKVGIMLKVTPQINEGNAVQMVIEQEVSKVEGQTSLDVVFGERKLKTTVLANDGELIVLGGLMDDQAGESVAKVPLLGDIPLIGNLFKSTADKKEKRNLMVFIRPTILRDGMAADGVSQRKYNYMRAEQIYRDEQGLSLMPHTAQPVLPAQNQALPPEVRAFLNAGRTR

SEQ ID NO: 4308 - protein, 518 aa, Escherichia coli; identical to SEQ ID NO: 2349

SEQ ID NO: 4309 - protein, 353 aa, Escherichia coli
MKMKKSTLALVVMGIVASASVQAAEIYNKDGNKLDVYGKVKAMHYMSDNASKDGDQSYIRFGFKGETQINDQLTGYGRWEAEFAGNKAESDTAQQKTRLAFAGLKYKDLGSFDYGRNLGALYDVEAWTDMFPEFGGDSSAQTDNFMTKRASGLATYRNTDFFGVIDGLNLTLQYQGKNENRDVKKQNGDGFGTSLTYDFGGSDFAISGAYTNSDRTNEQNLQSRGTGKRAEAWATGLKYDANNIYLATFYSETRKMTPITGGFANKTQNFEAVAQYQFDFGLRPSLGYVLSKGKDIEGIGGEDLVNYIDVGATYYFNKNMSAFVDYKINQLDSDNKLNINNDDIVAIGMTYQF

SEQ ID NO: 4310 - protein, 266 aa, Escherichia coli; identical to SEQ ID NO: 1894

SEQ ID NO: 4311 - protein, 825 aa, Escherichia coli
MGQNASNIDLSRYSEGNPAIPGMYDVSVYVNDQPIINQSITFIEIEGKKNAQACITLKNLLQFHINSPDINNEKAVLLARDETLGNCLNLTEIIPQASVRYDVNEQRLDIDVPQAWVMKNYQNYVDPSLWENGINAAMLSYNLNGYHSETPGRRNDSIYAAFNGGMNLGAWRLRASGNYNWMTDSGSNYDFKNRYIQRDIASLRSQLILGESYTTGETFDSVSIRGIRLYSDSRMLPPTLASFAPIIHGVANTNAKVTITQGGYKIYETTVPPGAFVIDDLSPSGYGSDLIVTVEESDGSKRTFSQPFSSVVQMLRPGVGRWDISGGQVLKDDIQDEPNLFQASYYYGLNNYLTGYTGIQITDNNYTAGLLGLGLNTSVGAFSFDVTHSNVRIPDDKTYQGQSYRVSWNKLFEETSTSLNIAAYRYSTQNYLGLNDALTLIDEVKHPEQDLEPKSMRNYSRMKNQVTVSINQPLKFEKKDYGSFYLSGSWSDYWASGQNRSNYSIGYSNSASWGSYSVSAQRSWNEDGDTDDSVYLSFTIPIEKLLGTEQRTSGFQSIDTQMSSDFKGNNQLNVSSSGYSDNARVSYSVNTGYTMNKASKDLSYVGGYASYESPWGTLAGSVSANSDNSRQVSLSTDGGFVLHSGGLTFSNDSFSDSDTLAVVQAPGAQGARINYGNSTIDRWGYGVTSALSPYHENRIALDINDLENDVELKSTSAVAVPRQGSVVFADFETVQGQSAIMNITRSDGKNIPFAADIYDEQGNVIGNVGQGGQAFVRGIEQQGNISIKWLEESKPVSCLAHYQQSSEAEKIAQSIILNGIRCQIQ

SEQ ID NO: 4312 - protein, 208 aa, Escherichia coli; identical to SEQ ID NO: 1949

SEQ ID NO: 4313 - protein, 784 aa, Escherichia coli; identical to SEQ ID NO: 2244

SEQ ID NO: 4314 - protein, 119 aa, Escherichia coli; identical to SEQ ID NO: 2841

SEQ ID NO: 4315 - protein, 614 aa, Escherichia coli; identical to SEQ ID NO: 1888

SEQ ID NO: 4316 - protein, 729 aa, Escherichia coli
MLSTQFNRDNQYQASTKPSLLAGCIALALLPSAAFAAPATEETVIVEGSATAPDDGENDYSVTSTSAGTKMQMTQRDIPQSVTIVSQQRMEDQQLQTLGEVMENTLGISKSQADSDRALYYSRGFQIDNYMVDGIPTYFESRWNLGDALSDMALFERVEVVRGATGLMTGTGNPSAAINMVRKHATSREFKGDVSAEYGSWNKERYVADLQSPLTEDGKIRARIVGGYQNNDSWLDRYNSEKTFFSGIVDADLGDLTTLSAGYEYQRIDVNSPTWGGLPRWNTDGSSNSYDRARSTAPDWAYNDKEINKVFMTLKQRFADTWQATLNATHSEVEFDSKMMYVDAYVNKADGMLVGPYSNYGPGFDYVGGTGWNSGKRKVDALDLFADGSYELFGRQHNLMFGGSYSKQNNRYFSSWANIFPDEIGSFYNFNGNFPQTDWSPQSLAQDDTTHMKSLYAATRVTLADPLHLILGARYTNWRVDTLTYSMEKNHTTPYAGLVFDINDNWSTYASYTSIFQPQNDRDSSGKYLAPITGNNYELGLKSDWMNSRLTTTLAIFRIEQDNVAQSTGTPIPGSNGETAYKAVDGTVSKGVEFELNGAITDNWQLTFGATRYIAEDNEGNAVNPNLPRTTVKMFTSYRLPVMPELTVGGGVNWQNRVYTDTVTPYGTFRAEQGSYALVDLFTRYQVTKNFSLQGNVNNLFDKTYDTNVEGSIVYGAPRNFSITGTYQF

SEQ ID NO: 4317 - protein, 191 aa, Escherichia coli; identical to SEQ ID NO: 2727

SEQ ID NO: 4318 - protein, 517 aa, Escherichia coli; identical to SEQ ID NO: 2462

SEQ ID NO: 4319 - protein, 851 aa, Escherichia coli; identical to SEQ ID NO: 3458

SEQ ID NO: 4320 - protein, 861 aa, Escherichia coli
MSGSYSSVWAEDDIQFDSRFLELKGDTKIDLKRFSSQGYVEPGKYNLQVQLNKQPLAEEYDIYWYAGEDDASKSYACLTPELVAQFGLKEDVAKNLQWSHDAKCLKSGQLEGMEIKADLSQSALVISLPQAYLEYTYPDWDPPSRWDDGISGIVADYSINAQTRHEENGGDDSNEISGNGTVGVNLGPWRMRADWQTNYQHTRSNDDDEFSGDETQKKWEWSRYYAWRALPSLKAKLALGEDYLRSDIFDGFNYVGGSVSTDDQMLPPNLRGYAPDISGVAHTTAKVTVSQMGRVIYETQVPAGPFRIQDLGDSVSGTLHIRIEEQNGQVQEYDISTASMPYLTRPGQVRYKIMMGRPQEWGHHVEGEFFSGAEASWGIANGWSLYGGALGDENYQSAALGVGRDLSTFGAVAFDVTHSHTKLDKDTAYGKGSLDGNSFRVSYSKDFDQLNSRVTFAGYRFSEENFMTMSEYLDASDSGMVRTGNDKEMYTATYNQNFRDAGVSVYLNYTRHTYWDREEQTNYNIMLSHYFNMGSIRNMSVSLTGYRYEYDNRADKGMYISLSMPWGDNSTVSYNGNYGSGTDSSQVGYFSRVDDATHYQLNVGTSDKHTSVDGYYSHDGSLAQVDLSANYHEGQYTSAGLSLQGGATLTAHGGALHRTQNMGGTRLLIDADGVADVPVEGNGAAVYTNMFGKAVVSDVNNYYRNQAYIDLNKLPENAEATQSVVQATLTEGAIGYRKFAVISGQKAMAVLRLQDGSHPPFGAEVKNDNEQTVGLVDDDGNVYLAGVKPGEHMSVFWSGVAHCDINLPDPLPADLFNGLLLPCQHKGNVAPVVPDDIKPVIQEQTQQVTPTNPPVSVSANQ

SEQ ID NO: 4321 - protein, 700 aa, Escherichia coli
MKIFSVRQTVLPALLVLSPVVFAADEQTMIVSAAPQVVSELDTPAAVSVVDGEEMRLATPRINLSESLTGVPGLQVQNRQNYAQDLQLSIRGFGSRSTYGIRGIRLYVDGIPATMPDGQGQTSNIDLSSVQNVEVLRGPFSALYGNASGGVMNVTTQTGQQPPTIEASSYYGSFGSWRYGLKATGATGDGTQPGDVDYTVSTTRFTTHGYRDHSGAQKNLANAKLGVRIDEASKLSLIFNSVDIKADDPGGLTKAEWKANPQQAPRAEQYDTRKTIKQTQAGLRYERSLSAQDDMSVMMYAGERETTQYQSIPMAPQLNPSHAGGVITLQRHYQGIDSRWTHRGELGVPVTFTTGLNYENMSENRKGYNNFRLNSGMPEYGQKGELRRDERNLMWNIDPYLQTQWQLSEKLSLDAGVRYSSVWFDSNDHYVTPGNGDDSGDASYHKWLPAGSLKYAMTDAWNIYLAAGRGFETPTINELSYRADGQSGMNFGLKPSTNDTIEIGSKTRIGDGLLSLALFQTDTDDEIVVDSSSGGRTTYKNAGKTRRQGAELAWDQRFAGDFRVNASWTWLDATYRSNVCNEQDCNGNRMPGIARNMGFASIGYVPEDGWYAGTEARYMGDIMADDENTAKAPSYTLVGLFTGYKYNYHNLTVDLFGRVDNLFDKQYVGSVIVNESNGRYYEPSPGRNYGVGMNIAWRFE

SEQ ID NO: 4322 - protein, 236 aa, Escherichia coli; identical to SEQ ID NO: 3438

SEQ ID NO: 4323 - protein, 765 aa, Escherichia coli
MQFHINSPDINNEKAVLLARDETLGNCLNLTEIIPQASVRYDVNEQRLDIDVPQAWVMKNYQNYVDPSLWENGINAAMLSYNLNGYHSETPGRRNDSIYAAFNGGMNLGAWRLRASGNYNWMTDSGSNYDFKNRYIQRDIASLRSQLILGESYTTGETFDSVSIRGIRLYSDSRMLPPTLASFAPIIHGVANTNAKVTITQGGYKIYETTVPPGAFVIDDLSPSGYGSDLIVTVEESDGSKRTFSQPFSSVVQMLRPGVGRWDISGGQVLKDDIQDEPNLFQASYYYGLNNYLTGYTGIQITDNNYTAGLLGLGLNTSVGAFSFDVTHSNVRIPDDKTYQGQSYRVSWNKLFEETSTSLNIAAYRYSTQNYLGLNDALTLIDEVKHPEQDLEPKSMRNYSRMKNQVTVSINQPLKFEKKDYGSFYLSGSWSDYWASGQNRSNYSIGYSNSASWGSYSVSAQRSWNEDGDTDDSVYLSFTIPIEKLLGTEQRTSGFQSIDTQMSSDFKGNNQLNVSSSGYSDNARVSYSVNTGYTMNKASKDLSYVGGYASYESPWGTLAGSVSANSDNSRQVSLSTDGGFVLHSGGLTFSNDSFSDSDTLAVVQAPGAQGARINYGNSTIDRWGYGVTSALSPYHENRIALDINDLENDVELKSTSAVAVPRQGSVVFADFETVQGQSAIMNITRSDGKNIPFAADIYDEQGNVIGNVGQGGQAFVRGIEQQGNISIKWLEESKPVSCLAHYQQSSEAEKIAQSIILNGIRCQIQ

SEQ ID NO: 4324 - protein, 230 aa, Escherichia coli; identical to SEQ ID NO: 3348

SEQ ID NO: 4325 - protein, 784 aa, Escherichia coli; identical to SEQ ID NO: 2244

SEQ ID NO: 4326 - protein, 747 aa, Escherichia coli
MARSKTAQPKHSLRKIAVVVATAVSGMSVYAQAAVEPKEDTITATAAPAPQESAWGPAATIAARQSATGTKTDTPIQKVPQSISVVTAEEMALHQPKSVKEALSYTPGVSVGTRGASNTYDHLIIRGFAAEGQSQNNYLNGLKLQGNFYNDAVIDPYMLERAEIMRGPVSVLYGKSSPGGLLNMVSKRPTTEPLKEVQFKAGTDSLFQTGFDFSDSLDDDGVYSYRLTGLARSANAQQKGSEEQRYAIAPAFTWRPDDKTNFTFLSYFQNEPETGYYGWLPKEGTVEPLPNGKRLPTDFNEGAKNNTYSRNEKMVGYSFDHEFNDTFTVRQNLRFAENKTSQNSVYGYGVCSDPANAYSKQCAALAPADKGHYLARKYVVDDEKLQNFSVDTQLQSKFATGDIDHTLLTGVDFMRMRNDINAWFGYDDSVPLLNLYNPVNTDFDFNAKDPANSGPYRILNKQKQTGVYVQDQAQWDKVLVTLGGRYDWADQESLNRVAGTTDKRDDKQFTWRGGVNYLFDNGVTPYFSYSESFEPSSQVGKDGNIFAPSKGKQYEVGVKYVPEDRPIVVTGAVYNLTKTNNLMADPEGSFFSVEGGEIRARGVEIEAKAALSASVNVVGSYTYTDAEYTTDTTYKGNTPAQVPKHMASLWADYTFFDGPLSGLTLGTGGRYTGSSYGDPANSFKVGSYTVVDALVRYDLARVGMAGSNVALHVNNLFDREYVASCFNTYGCFWGAERQVVATATFRF

SEQ ID NO: 4327 - protein, 243 aa, Escherichia coli; identical to SEQ ID NO: 2910

SEQ ID NO: 4328 - protein, 395 aa, Escherichia coli; identical to SEQ ID NO: 3220

SEQ ID NO: 4329 - protein, 673 aa, Escherichia coli; identical to SEQ ID NO: 2919

SEQ ID NO: 4330 - protein, 446 aa, Escherichia coli; identical to SEQ ID NO: 2176

SEQ ID NO: 4331 - protein, 193 aa, Escherichia coli; identical to SEQ ID NO: 2246

SEQ ID NO: 4332 - protein, 250 aa, Escherichia coli
MSDLLCSAKLGATTLALLLSAASLSAQASVTPDRTRLIFNESDKSISVTLRNNDPKLPYLAQSWIEDEKGNKISSPLTVLPPVQRIDSMMNGQVKVQGMPDINKLPADRESLFYFNVREIPPKTNKANTLQIALQTRIKLFWRPKALENVSMKNPWQYKVTLTRNGQEFTVNNPTPYYVIFSNASTQKNGNPAAGFSPIVMSPKTSAPLNVKMGSVPVLTYVNDYGARMPLFFTCNGNSCQVDEEQSRKG

SEQ ID NO: 4333 - protein, 837 aa, Escherichia coli
MSSAELYFNPRFLADDPQAVADLSRFENGQELPPGTYRVDIYLNNGYMATRDVTFNTGDSEQGIVPCLTRAQLASMGLNTASVSGMNLLADDACVPLTSMIHDATAHLDVGQQRLNLTIPQAFMSNRARGYIPPELWDPGINAGLLNYNFSGNSVQNRIGGNSHYAYLNLQSGLNIGAWRLRDNTTWSYNSSDSSSGSKNKWQHINTWLERDIIPLRSRLTLGDGYTQGDIFDGINFRGAQLASDDNMLPDSQRGFAPVIHGIARGTAQVTIKQNGYDIYNSTVPPGPFTINDIYAAGNSGDLQVTIKEADGSTQIFTVPYSSVPLLQREGHTRYSITAGEYRSGNAQQEKPRFFQSTLLHGLPAGWTIYGGTQLADRYRAFNFGIGKNMGALGALSVDMTQANSTLPDDSQHDGQSVRFLYNKSLNESGTNIQLVGYRYSTSGYFNFADTTYSRMNGYNIETQDGVIQVKPKFTDYYNLAYNKRGKLQLTVTQQLGRTSTLYLSGSHQTYWGTSNVDEQFQAGLNTAFEDINWTLSYSLTKNAWQKGRDQMLALNVNIPFSHWLRSDSKSQWRHASASYSMSHDLNGRMTNLAGVYGTLLEDNNLSYSVQTGYAGGGDGNSGSTGYATLNYRGGYGNANIGYSHSDDIKQLYYGVSGGVLAHANGVTLGQPLNETVVLVKAPGAKDAKVENQTGVRTDWRGYAVLPYATEYRENRVALDTNTLADNVDLDNAVANVVPTRGAIVRAEFKARVGIKLLMTLTHNNKPLPFGAMVTSESSQSSGIVADNGQVYLSGMPLAGKVQVKWGEEENAHCVANYQLPPESQQQLLTQLSAECR

SEQ ID NO: 4334 - protein, 331 aa, Escherichia coli; identical to SEQ ID NO: 2700

SEQ ID NO: 4335 - protein, 816 aa, Escherichia coli; identical to SEQ ID NO: 2817

SEQ ID NO: 4336 - protein, 430 aa, Escherichia coli; identical to SEQ ID NO: 2617

SEQ ID NO: 4337 - protein, 224 aa, Escherichia coli; identical to SEQ ID NO: 3115

SEQ ID NO: 4338 - protein, 361 aa, Escherichia coli; identical to SEQ ID NO: 3061

SEQ ID NO: 4339 - protein, 224 aa, Escherichia coli; identical to SEQ ID NO: 3165

SEQ ID NO: 4340 - protein, 849 aa, Escherichia coli
MLHINSMVKVCFFVIIAFSLFHTRNSDGKTYSFDASLLKRRGEGVDLTLFENGGQLPGIYPVDIFLNGTIVGSEDIFFHAEHSNGKPYLKACLSEELLMRYGVKTEKYPKLFLSHYGKKDERQCADLSVIPQATEEFLFEAQKLVLSIPQVAIRSPLRGVASDLIWEDGISTFLLNWQVEAGHSEFQHYEKTTSDNFWASLEPGINIGPWRIRNLTTLNKSSGQVGKWESSYIRAERGLNNIKSRLTLGEDYTPADIFASVPFRGVMLGTDENMIPYNQRGFAPVIRGIARTQARIEIRQNGYLIQSQTVAAGPFALTDLPITGSGGEFQVTIFESDGAIQSFNVPFTTPAIALREGYLKYNISAGQYRSSDESVEKAYLWQATAMYGLPRALTVFGGVQTAEHYQAAALGVGLSLGNMGAASLDTIYSRGQQKGYDFDTGNSWRIRYDKSFKLTDTSFSAASYQYSNEGYHELSDILDTYRSGANFVFNDTDRKRRRITININQSLGPWGFIGLSGGRDEYKGGDRQDYIGASYSMSWKDISFSVNWTRNRNVGDYFSNRTFNEDTVGMWMSIPLKHWLGKNDNDVNATAQIQHSTRQNTRYEMGLNGRAFDQKLYWDIREQIVPGSKYDADTSRLNMRWSGSYGELVGMYSYNSHTRQMNAGMSGSIAMHSEGITFGQRFGDTMALIAAPGVRGASVGGWPGVSTDSRGYALVSYITPYQENIITLDPTTFPENAEVLQTDTRVVPTKGAVVRAKFKTRVGNRAVVRLARADGTPLPFGTVVTLEGKTEVSNSTGVVDDKGMVYLSGLSEAGKLKAQWGMNSHCYANYRLPVKKGPAGLYLTSAVCI

SEQ ID NO: 4341 - protein, 191 aa, Escherichia coli; identical to SEQ ID NO: 2727

SEQ ID NO: 4342 - protein, 232 aa, Escherichia coli; identical to SEQ ID NO: 2087

SEQ ID NO: 4343 - protein, 729 aa, Escherichia coli; identical to SEQ ID NO: 2948

SEQ ID NO: 4344 - protein, 213 aa, Escherichia coli
MTKMSRYALITALAMFLAGCVGQREPAPVEEVKPAPEQPAEPQQPVPTVPSVPTIPQQPGPIEHEDQTAPPAPHIRHYDWNGAMQPMVSKMLGADGVTAGSVLLVDSVNNRTNGSLNAAEATETLRNALANNEKFTLVSAQQLSMAKQQLGLSPQDSLGTRSKAIGIARNVGAHYVLYSSASGNVNAPTLQMQLMLVQTGEIIWSGKGAVSQQ

SEQ ID NO: 4345 - protein, 121 aa, Escherichia coli
MNTVLSVQGASAPVEKKSFFSKFTRLNMLRLARAVIPAAVLMMFFPQLAMAAQGAGQDLMQSGNSTVKATFGKDSSVVKWVVLAEVLVGAVMYMMTKNVKFLAGFAIISVFIAVGMAVVGL

SEQ ID NO: 4346 - protein, 497 aa, Escherichia coli
MTVKISGVLKDGTGKPVQNCTIVLKARRTSSTVVVNTVASENPDEAGRYSMDVEHGQYSVTLLVEGFPPSHAGTITVYEDSRPGTLNDFLGAMTEDDARPEALRRFELMVEEVVRNAEEAKKNAGEAETSARNAGISASQAEESAANADTSAGDASESARQAAESAASAKQSEEASSSSASAAAQKASESLQSATDAELSKKTAESAAGNAARDATTATEKARESAESAQSAEQSRIAAEEAVNRIPTVVGPPGPKGEPGPAGPQGPKGDKGERGDTGPAGATGERGPAGDAGPAGPQGPKGDRGETGLTGNAGPQGPKGDAGAAGPAGPQGPKGDTGAAGPAGPQGPKGDAGAAGPAGPQGPKGDTGAAGPTGPQGPKGDTGAAGPAGPQGPKGDAGVAGPAGPQGPSGSPDSGLFGVGSFVLAAYYQTYYSGDRAPGSTVAGSSLSACCLSNGTPLVASGNVGETRLPGTWRACGPMLWTSSPGIRQAGLFQRIS

SEQ ID NO: 4347 - protein, 834 aa, Escherichia coli; identical to SEQ ID NO: 3095

SEQ ID NO: 4348 - protein, 203 aa, Escherichia coli; identical to SEQ ID NO: 2009

SEQ ID NO: 4349 - protein, 207 aa, Escherichia coli; identical to SEQ ID NO: 2211

SEQ ID NO: 4350 - protein, 678 aa, Escherichia coli; identical to SEQ ID NO: 3881

SEQ ID NO: 4351 - protein, 869 aa, Escherichia coli
MKIPTTTDIPQRYSWCLAGICYSSLAILPSFLSYAESYFNPAFLLENGTSVADLSRFERGNHQPARVYRVDLWRNDEFIGSQDIVFESTTENTGDKSGGLMPCFNQVLLERIGLNSSAFPELAQQQNNKCINLLKAVPDATINFDFAAMRLNITIPQITLLSSAHGYIPPEEWDEGIPALLLNYNFTGNRGNGNDSYFFSELSGINIGPWRLRNNGSWNYFRGNGYHSEQWNNIGTWVQRAIIPLKSELVMGDGNTGSDIFDGVGFRGVRLYSSDNMYPDSQQGFAPTVRGIARTAAQLTIRQNGFIIYQSYVSPGAFEITDLHPTSSNGDLDVTIDERDGNQQNYTIPYSTVPILQREGRFKFDLTAGDFRSGNSQQSSPFFFQGTALGGLPQEFTAYGGTQLSANYTAFLLGLGRNLGNWGAVSLDVTHARSQLADDSRHEGDSIRFLYAKSMNTFGTNFQLMGYRYSTQGFYTLDDVAYRRMEGYEYDYDYDGEHRDELIIVNYHNLRFSRKDRLQLNISQSLNDFGSLYISGTHQKYWNTSDSDTWYQVGYTSSWVGISYSLSFSWNESVGIPDNERIVGLNVSVPFNVLTKRRYTRENALDRAYTSFNANRNSNGQNSWLAGVGGTLLEGHNLSYHVSQGDTSNNGYTGSATANWQAAYGTLGVGYNYDRDQHDVNWQLSGGVVGHENGITLSQPLGDTNVLIKAPGAGGVRIENQTGILTDWRGYAVMPYATVYRYNRIALDTNTMGNSIDVEKNISSVVPTQGALVRANFDTRIGVRALITVTQGGKPVPFGSLVRENSTGITSMVGDDGQVYLSGAPLSGELLVQWGDGANSRCIAHYVLPKQSLQQAVTVISAVCTHPGS

SEQ ID NO: 4352 - protein, 565 aa, Escherichia coli; identical to SEQ ID NO: 2669

SEQ ID NO: 4353 - protein, 539 aa, Escherichia coli; identical to SEQ ID NO: 3050

SEQ ID NO: 4354 - protein, 386 aa, Escherichia coli; identical to SEQ ID NO: 3072

SEQ ID NO: 4355 - protein, 111 aa, Escherichia coli; identical to SEQ ID NO: 3096

SEQ ID NO: 4356 - protein, 237 aa, Escherichia coli
MRKITQAISAVCLLFALNSSAVALASSPSPLNPGTNVARLAEQAPIHWVSVAQIENSLAGRPPMAVGFDIDDTVLFSSPGFWRGKKTFSPESEDYLKNPVFWEKMNNGWDEFSIPKEVARQLIDMHVRRGDAIFFVTGRSPTKTETVSKTLADNFHIPATNMNPVIFAGDKPGQNTKSQWLQDKNIRIFYGDSDNDITAARDIGARGIRILRASNSTYKPLPQAGAFGEEVIVNSEY

SEQ ID NO: 4357 - protein, 111 aa, Escherichia coli; identical to SEQ ID NO: 3370

SEQ ID NO: 4358 - protein, 530 aa, Escherichia coli
MQELPMLRMTPLASAIVALLLGIEAYAAEETFDTHFMIGGMKDQQVANIRLDDNQPLPGQYDIDIYVNKQWRGKYEIIVKDNPQETCLSIEVIKRLGINSDNFASGKQCLTFEQLVQGGSYTWDIGVFRLDFSVPQAWVEELESGYVPPENWERGINAFYTSYYVSQYYSDYKASGNSKSTYVRFNSGLNLLGWQLHSDASFSKTNNNPGVWKSNTLYLERGFAQLLGTLRVGDMYTSSDIFDSVRFSGVRLFRDMQMLPNSKQNFTPRVQGIAQSNALVTIEQNGFVVYQKEVPPGPFAITDLQLAGGGADLDVSVKEADGSVTTYLVPYAAVPNMLQPGVSKYDFAAGRSHIEGASKQSDFVQAGYQYGFNNLLTLYGGSMVANNYYAFTLGTGWNTRIGAISVDATKSHSKQDNGDVFDGQSYQIAYNKFVSQTSTRFGLAAWRYSSRDYRTFNDHVWANNKDNYRRDENDVYDIADYYQNDFGRKNSFSANMSQSLPEGWGSVSLSTLWRDYWGRSAERSPHNFPK

SEQ ID NO: 4359 - protein, 541 aa, Escherichia coli; identical to SEQ ID NO: 3377

SEQ ID NO: 4360 - protein, 213 aa, Escherichia coli
MVLPAHAGIVIYGTRIIYPAENKEVMVQLMNQGNRSSLLQAWIDDGDTSLPPEKIQVPFMLTPPVAKIGANSGQQVKIKIMPNKLPTNKESIFYLNVLDIPPNSPEQEGKNALKFAMQNRIKLFYRPAGIAPVNKATFKKLLVSRSGNGLVIKNDSANWVTISDVKANNVKVNYETIMIAPLESQSVNVKSNNANNWYLTIIDDHGNYISDKI

SEQ ID NO: 4361 - protein, 360 aa, Escherichia coli; identical to SEQ ID NO: 3062

SEQ ID NO: 4362 - protein, 359 aa, Escherichia coli
MKKYLALALIAPLLISCSTTKKGDTYNEAWVKDTNGFDILMGQFAHNIENIWGFKEVVIAGPKDYVKYTDQYQTRSHINFDDGTITIETIAGAEPAAHLRRAIIKTLLMGDDPSSVDLYSDVDDITISKEPFLYGQVVDNTGQPIRWEGRASNFADYLLKNRLQSRSNGLRIIYSVTINMVPNHLDKRAHKYLGMVRQASRKYGVDESLILAIMQTESSFNPYAVSRSDALGLMQVVQHTAGKDVFRSQGKSGTPSRSFLFDPASNIDTGTAYLAMLNNVYLGGIDNPTSRRYAVITAYNGGAGSVLRVFSNDKIQAANIINTMTPGDVYQTLTTRHPSAESRRYLYKVNTAQKSYRRR

SEQ ID NO: 4363 - protein, 162 aa, Escherichia coli; identical to SEQ ID NO: 1965

SEQ ID NO: 4364 - protein, 230 aa, Escherichia coli; identical to SEQ ID NO: 3348

SEQ ID NO: 4365 - protein, 235 aa, Escherichia coli
MIAMQKNAAHTYAISSLLVLSLTGCAWIPSTPLVQGATSAQPVPGPTPVANGSIFQSAQPINYGYQPLFEDRRPRNIGDTLTIVLQENVSASKSSSANASRDGKTNFGFDTVPRYLQGLFGNARADVEASGGNTFNGKGGANASNTFSGTLTVTVDQVLVNGNLHVVGEKQIAINQGTEFIRFSGVVNPRTISGSNTVPSTQVADARIEYVGNGYINEAQNMGWLQRFFLNLSPM

SEQ ID NO: 4366 - protein, 130 aa, Escherichia coli; identical to SEQ ID NO: 3184

SEQ ID NO: 4367 - protein, 360 aa, Escherichia coli
MMKKYLALALIAPLLISCSTTKKGDTYNEAWVKDTNGFDILMGQFAHNIENIWGFKEVVIAGPKDYVKYTDQYQTRSHINFDDGTITIETIAGTEPAAHLRRAIIKTLLMGDDPSSVDLYSDVDDITISKEPFLYGQVVDNTGQPIRWEGRASNFADYLLKNRLKSRSNGLRIIYSVTINMVPNHLDKRAHKYLGMVRQASRKYGVDESLILAIMQTESSFNPYAVSRSDALGLMQVVQHTAGKDVFRSQGKSGTPSRNFLFDPASNIDTGTAYLAMLNNVYLGGIDNPTSRRYAVITAYNGGAGSVLRVFSNDKIQAANIINTMTPGDVYQTLTTRHPSAESRRYLYKVNTAQKSYRRR

SEQ ID NO: 4368 - protein, 351 aa, Escherichia coli; identical to SEQ ID NO: 2872

SEQ ID NO: 4369 - protein, 367 aa, Escherichia coli
MKVKVLSLLVPALLVAGAANAAEVYNKDGNKLDLYGKVDGLHYFSDNKDVDGDQTYMRLGFKGETQVTDQLTGYGQWEYQIQGNSAENENNSWTRVAFAGLKFQDVGSFDYGRNYGVVYDVTSWTDVLPEFGGDTYGSDNFMQQRGNGFATYRNTDFFGLVDGLNFAVQYQGKNGSVSGEGMTNNGRDALRQNGDGVGGSITYDYEGFGIGAAVSSSKRTDAQNTAAYIGNGDRAETYTGGLKYDANNIYLAAQYTQTYNATRVGSLGWANKAQNFEAVAQYQFDFGLRPSVAYLQSKGKNLGVINGRNYDDEDILKYVDVGATYYFNKNMSTYVDYKINLLDDNQFTRDAGINTDNIVALGLVYQF

SEQ ID NO: 4370 - protein, 274 aa, Escherichia coli; identical to SEQ ID NO: 2300

SEQ ID NO: 4371 - protein, 478 aa, Escherichia coli; identical to SEQ ID NO: 2404

SEQ ID NO: 4372 - protein, 459 aa, Escherichia coli
MPDHSLFRLRILPWCIALAMSGSYSSVWAEDDIQFDSRFLELKGDTKIDLKRFSSQGYVEPGKYNLQVQLNKQPLAEEYDIYWYAGEDDASKSYACLTPELVAQFGLKEDVAKNLQWSHDAKCLKSGQLEGMEIKADLSQSALVISLPQAYLEYTYPDWDPPSRWDDGISGIVADYSINAQTRHEENGGDDSNEISGNGTVGVNLGPWRMRADWQTNYQHTRSNDDDEFSGDETQKKWEWSRYYAWRALPSLKAKLALGEDYLRSDIFDGFNYVGGSVSTDDQMLPPNLRGYAPDISGVAHTTAKVTVSQMGRVIYETQVPAGPFRIQDLGDSVSGTLHIRIEEQNGQVQEYDISTASMPYLTRPGQVRYKIMMGRPQEWGHHVEGEFFLVLKLPGGSLTAGRYMAAHWEMKTISLRRLASVAICLHSARSRLMLLTRTPNWIKTPLMAKVRWTVTPSV

SEQ ID NO: 4373 - protein, 231 aa, Escherichia coli
MSKRTFAVIITLLCSFCIGQALAGGIVLQRTRVIYDASRKETALPVANKGAETPYLLQSWVDNIDGTSRAPFIITPPLFRLEAGDDSSLRIIKTADNLPENKESLFYINVRAIPAKKKSDDVNANELTLVFKTRIKMFYRPAHLKGRVNDAWTSLEFKRSDHSLNIYNPTEYYVVFAGLAVDKTDLTSKIEYIAPGEHKQLPLPASGGKNVKWAAINDYGGSSGTETRPLQ

SEQ ID NO: 4374 - protein, 241 aa, Escherichia coli; identical to SEQ ID NO: 2884

SEQ ID NO: 4375 - protein, 250 aa, Escherichia coli
MKIRTALLVSSLPLCFFVSANAKTFENEGNKTQMFSLHLGATRVIYNIFSSGETLTIINDHDYPMLVQSEVLLEDQKTPAPFIITPPLFRLDALQSSRLRIVRTGGDFPKDRETLQWICVKGIPPKSDEKWAESNKNSLNNVTLNVQVSLSTCIKMFVRPSSVKGHPEDVAGEVKWQRVNNKLKGVNPTPFYINLSELRVGGKEISEHHYIAPFSSFEYPIPVSKSSKVQWKIVTDYGGVSEFFETDINL

SEQ ID NO: 4376 - protein, 266 aa, Escherichia coli; identical to SEQ ID NO: 1894

SEQ ID NO: 4377 - protein, 200 aa, Escherichia coli; identical to SEQ ID NO: 1784

SEQ ID NO: 4378 - protein, 245 aa, Escherichia coli; identical to SEQ ID NO: 3410

SEQ ID NO: 4379 - protein, 554 aa, Escherichia coli
MALIPACIFLCFAALSVQAEETPVTPQPPDILLGPLFNDVQNAKLFPDQKTFADAVPNSDPLMILADYRMQQNQSGFDLRHFVNVNFTLPKEGEKYVPPEGQSLREHIDGLWPVLTRSTENTEKWDSLLPLPEPYVVPGGRFREVYYWDSYFTMLGLAESGHWDKVADMVANFAHEIDTYGHIPNGNRSYYLSRSQPPFFALMVELLAQHEGDAALKQYLPQMQKEYAYWMDGVENLQAGQQEKRVVKLQDGTLLNRYWDDRDTPRPESWVEDIATAKSNPNRPATEIYRDLRSAAASGWDFSSRWMDNPHQLNTLRTTSIVPVDLNSLMFKMEKILARASKAAGDNAMANQYETLANARQKGIEKYMWNDQQGWYADYDLKSHKVRNQLTAAALFPLYVNAAAKDRANKMATATKTHLLQPGGLNTTSVKSGQQWDAPNGWAPLQWVATEGLQNYGQKEVAMDISWHFLTNVQHTYDREKKLVEKYDVSTTGTGGGGGEYPLQDGFGWTNGVTLKMLDLICPKEQPCDNVPATRPTVKSATTQPSTKEAQPTP

SEQ ID NO: 4380 - protein, 241 aa, Escherichia coli; identical to SEQ ID NO: 2851

SEQ ID NO: 4381 - protein, 230 aa, Escherichia coli; identical to SEQ ID NO: 4274

SEQ ID NO: 4382 - protein, 252 aa, Escherichia coli; identical to SEQ ID NO: 3400

SEQ ID NO: 4383 - protein, 231 aa, Escherichia coli; identical to SEQ ID NO: 3055

SEQ ID NO: 4384 - protein, 331 aa, Escherichia coli; identical to SEQ ID NO: 2700

SEQ ID NO: 4385 - protein, 760 aa, Escherichia coli; identical to SEQ ID NO: 3923

SEQ ID NO: 4386 - protein, 233 aa, Escherichia coli; identical to SEQ ID NO: 3649

SEQ ID NO: 4387 - protein, 122 aa, Escherichia coli; identical to SEQ ID NO: 2915

SEQ ID NO: 4388 - protein, 169 aa, Escherichia coli; identical to SEQ ID NO: 3373

SEQ ID NO: 4389 - protein, 746 aa, Escherichia coli
MNKKIHSLALLVNLGIYGVAQAQEPTDTPVSHDDTIVVTAAEQNLQAPGVSTITADEIRKNPVARDVSEIIRTMPGVNLTGNSTSGQRGNNRQIDIRGMGPENTLILIDGKPVSSRNSVRQGWRGERDTRGDTSWVPPEMIERIEVLRGPAAARYGNGAAGGVVNIITKKGSGEWHGSWDAYFNAPEHKEEGATKRTNFSLTGPLGDEFSFRLYGNLDKTQADAWDINQGHQSARAGTYATTLPAGREGVINKDINGVVRWDFAPLQSLELEAGYSRQGNLYAGDTQNTNSDAYTRSKYGDETNRLYRQNYSLTWNGGWDNGVTTSNWVQYEHTRNSRIPEGLAGGTEGKFNEKATQDFVDIDLDDVMLHSEVNLPLDFLVNQTLTLGTEWNQQRMKDLSSNTQALTGTNTGGAIDGVSATDRSPYSKAEIFSLFAENNMELTDSTIVTPGLRFDHHSIVGNNWSPALNISQGLGDDFTLKMGIARAYKAPSLYQTNPNYILYSKGQGCYASAGGCYLQGNDDLKAETSINKEIGLEFKRDGWLAGVTWFRNDYRNKIEAGYVAVGQNAVGTDLYQWDNVPKAVVEGLEGSLNVPVSETVMWTNNITYMLKSENKTTGDRLSIIPEYTLNSTLSWQAREDLSMQTTFTWYGKQQPKKYNYKGQPAVGPETKEISPYSIVGLSATWDVTKNVSLTGGVDNLFDKRLWRAGNAQTTGDLAGANYIAGAGAYTYNEPGRTWYMSVNTHF

SEQ ID NO: 4390 - protein, 243 aa, Escherichia coli; identical to SEQ ID NO: 2910

SEQ ID NO: 4391 - protein, 478 aa, Escherichia coli; identical to SEQ ID NO: 2404

SEQ ID NO: 4392 - protein, 386 aa, Escherichia coli
MVDDVPVAQVLQALAEQEKLNLVVSPDVSGTVSLHLTDVPWKQALQTVVKSAGLITRQEGNILSVHSIAWQNDNIARQEAEQARAQANLPLENRSITLQYADAGELAKAGEKLLSAKGSMTVDKRTNRLLLRDNKTALSALEQWVAQMDLPVGQVELSAHIVTINEKSLRELGVKWTLADAQHAGGVGQVTTLGSDLSVATATTHVGFNIGRINGRLLDLELSALEQKQQLDIIASPRLLASHLQPASIKQGSEIPYQVSSGESGATSVEFKEAVLGMEVTPTVLQKGRIRLKLHISQNVPGQVLQQADGEVLAIDKQEIETQVEVKSGETLALGGIFTRKNKSGQDSVPLLGDIPWFGQLFRHDGKEDERRELVVFITPRLVSSE

SEQ ID NO: 4393 - protein, 250 aa, Escherichia coli; identical to SEQ ID NO: 3048

SEQ ID NO: 4394 - protein, 747 aa, Escherichia coli
MARSKTAQPKHSLRKIAVVVATAVSGMSVYAQAAVEPKEDTITVTAAPAPQESAWGPAATIAARQSATGTKTDTPIQKVPQSISVVTAEEMALHQPKSVKEALSYTPGVSVGTRGASNTYDHLIIRGFAAEGQSQNNYLNGLKLQGNFYNDAVIDPYMLERAEIMRGPVSVLYGKSSPGGLLNMVSKRPTTEPMKEVQFKAGTDSLFQTGFDFSDSLDDDGVYSYRLTGLARSANAQQKGSEEQRYAIAPAFTWRPDDKTNFTFLSYFQNEPETGYYGWLPKEGTVEPLPNGKRLPTDFNEGAKNNTYSRNEKMVGYSFDHEFNDTFTVRQNLRFAENKTSQNSVYGYGVCSDPANAYSKQCAALAPADKGHYLARKYVVDDEKLQNFSVDTQLQSKFATGDIDHTLLTGVDFMRMRNDINAWFGYDDSVPLLNLYNPVNTDFDFNAKDPANSGPYRILNKQKQTGVYVQDQAQWDKVLVTLGGRYDWADQESLNRVAGTTDKRDDKQFTWRGGVNYLFDNGVTPYFSYSESFEPSSQVGKDGNIFAPSKGKQYEVGVKYVPEDRPIVVTGAVYNLTKTNNLMADPEGSFFSVEGGEIRARGVEIEAKAALSASVNVVGSYTYTDAEYTTDTTYKGNTPAQVPKHMASLWADYTFFDGPLSGLTLGTGGRYTGSSYGDPANSFKVGSYTVVDALVRYDLARVGMAGSNVALHVNNLFDREYVASCFNTYGCFWGAERQVVATATFRF

SEQ ID NO: 4395 - protein, 362 aa, Escherichia coli; identical to SEQ ID NO: 2434

SEQ ID NO: 4396 - protein, 204 aa, Escherichia coli; identical to SEQ ID NO: 2957

SEQ ID NO: 4397 - protein, 663 aa, Escherichia coli; identical to SEQ ID NO: 1910

SEQ ID NO: 4398 - protein, 213 aa, Escherichia coli; identical to SEQ ID NO: 2232

SEQ ID NO: 4399 - protein, 446 aa, Escherichia coli; identical to SEQ ID NO: 2194

SEQ ID NO: 4400 - protein, 865 aa, Escherichia coli; identical to SEQ ID NO: 2167

SEQ ID NO: 4401 - protein, 816 aa, Escherichia coli
MLRTTRWVAAIIFLYSFPGYAEETFDTHFMIGGMRGEKVSEYRFDNKQPLPGNYELDFYVNHQWRGKKDITIPESPAKPCLPKVLLTTLGVKTDNLNTEDNCILLDEAVHGGQYQWDISEHRLNLTIPQAYINELERGYVPPESWDRGIDAFYTSYNLSQYRSYDSNNNSNTASYGRFNSGLNLFSWQLHSDASYSKPDDMKGKWQSNTLYLERGWSQILSTVQIGENYTSSLIFDSLRFSGIRLFRDMQMLPDSMQSFTPLVQGVAQSNALITVSQNGYIIYQKEVPPGPFTIADLQLSGSGADLDVSIKEADGSVRSFLVPYSSVPNMLQPGVSNFDFIAGRSKIYGVKNQEDFLEANYIYGLNNLLTLYGGTILSDNYNAITLGNGWNTPLGAISFDATRSSSKLNNDITHEGTSYQVAYNKYLVQTATRFSVAAWRYASQDYRTFSDHLYENDKHNHQSEYDDFYDIGRKNSLSANIMQPLSNNLGNVSLSALWRNYWGRSGNAKDYQFSYSNSWQRISYTFSASQSYDENDKEEERFNLFISIPFYWGDDITKTRHQINLSNSTSFSKDGYSSNNTGVTGIAGEHDQLNYGIYVNQQQQNNDTSLGTNLSWRTPIAIIDGSYSHSKNTWQSGGSISSGLVVWPGGINITNQLSDTFAILDAPGLEGAHINGQKYNRTNSKGQVVYDLMIPHRENHLVLDIANSESETELQGNRQIIAPYRGAVSYVQFTTDQRKPWYIQALRPDGSPLTFGYDVLDLQENNIGVVGQGSRLFIRVDEIPTGIKVALNDEQNLFCTITFQHVIDENKTYICQ

SEQ ID NO: 4402 - protein, 859 aa, Escherichia coli
MKLNIFTKSMIGMGLVCSALPALAMEAWNNQQGGNKYQVIFDGKIYENAWWVSSTNCPGKAKANDATNPWRLKRTATAAEISQFGNTLSCEKSGSSSSSNSNTPASNTPANGGSATPAQGTVPSNSSVVAWNKQQGGQTWYVVFNGAVYKNAWWVASSNCPGDAKSNDASNPWRYVRAATATEISETSNPQSCTSAPQPSPDVKPAPDVKPAPDVQPAPADKSNDNYAVVAWKGQEGSSTWYVIYNGGIYKNAWWVGAANCPGDAKENDASNPWRYVRAATATEISQYGNPGSCSVKPDNNGGAVTPVDPTPETPVTPTPDNSEPSTPADSVNDYSLQAWSGQEGSEIYHVIFNGNVYKNAWWVGSKDCPRGTSAENSNNPWRLERTATAAELSQYGNPTTCEIDNGGVIVADGFQASKAYSADSIVDYNDAHYKTSVDQDAWGFVPGGDNPWKKYEPAKAWSASTVYVKGDRVVVDGQAYEALFWTQSDNPALVANQNATGSNSRPWKPLGKAQSYSNEELNNAPQFNPETLYASDTLIRFNGVNYISQSKVQKVSPSDSNPWRVFVDWTGTKERVGTPKKAWPKHVYAPYVDFTLNTIPDLAALAKNHNVNHFTLAFVVSKDANTCLPTWGTAYGMQNYAQYSKIKALREAGGDVMLSIGGANNAPLAASCKNVDDLMQHYYDIVDNLNLKVLDFDIEGTWVADQASIERRNLAVKKVQDKWKSEGKDIAIWYTLPILPTGLTPEGMNVLSDAKAKGVELAGVNVMTMNYGNAICQSANTEGQNIHGKCATSAIANLHSQLKGLHPNKSDAEIDAMMGTTPMVGVNDVQGEVFYLSDARLVMQDAQKRNLGMVGIWS

SEQ ID NO: 4403 - protein, 118 aa, Escherichia coli [sequence omitted]

SEQ ID NO: 4404 - protein, 878 aa, Escherichia coli
MSYLNLRLYQRNTQCLHIRKHRLAGFFVRLFVACAFAVQAPLSSAELYFNPRFLADDPQAVADLSRFENGQELPPGTYRVDIYLNNGYMATRDVTFNTGDSEQGIVPCLTRAQLASMGLNTASVAGMNLLADDACVPLTTMVQDATAHLDVGQQRLNLTIPQAFMSNRARGYIPPELWDPGINAGLLNYNFSGNSVQNRIGGNSHYAYLNLQSGLNIGAWRLRDNTTWSYNSSDRSSGSKNKWQHINTWLERDIIPLRSRLTLGDGYTQGDIFDGINFRGAQLASDDNMLPDSQRGFAPVIHGIARGTAQVTIKQNGYDIYNSTVPPGPFTINDIYAAGNSGDLQVTIKEADGSTQIFTVPYSSVPLLQREGHTRYSITAGEYRSGNAQQEKPRFFQSTLLHGLPAGWTIYGGTQLADRYRAFNFGIGKNMGALGALSVDMTQANSTLPDDSQHDGQSVRFLYNKSLNESGTNIQLVGYRYSTSGYFNFADTTYSRMNGYNIETQDGVIQVKPKFTDYYNLAYNKRGKLQLTVTQQLGRSSTLYLSGSHQTYWGTSNVDEQFQAGLNTAFEDINWTLSYSLTKNAWQKGRDQMLALNVNIPFSHWLRSDSKSQWRHASASYSMSHDLNGRMTNLAGVYGTLLEDNNLSYSVQTGYAGGGDGNSGSTGYATLNYRGGYGNANIGYSHSDDIKQLYYGVSGGVLAHANGVTLGQPLNDTVVLVKAPGAKDAKVENQTGVRTDWRGYAVLPYATEYRENRVALDTNTLADNVDLDNAVANVVPTRGAIVRAEFKARVGIKLLMTLTHNNKPLPFGAMVTSESSQSSGIVADNGQVYLSGMPLAGKVQVKWGEEENAHCVANYQLPPESQQQLLTQLSAECR

SEQ ID NO: 4405 - protein, 351 aa, Escherichia coli; identical to SEQ ID NO: 2872

SEQ ID NO: 4406 - protein, 232 aa, Escherichia coli; identical to SEQ ID NO: 2087

SEQ ID NO: 4407 - protein, 213 aa, Escherichia coli; identical to SEQ ID NO: 2232

SEQ ID NO: 4408 - protein, 193 aa, Escherichia coli; identical to SEQ ID NO: 2250

SEQ ID NO: 4409 - protein, 243 aa, Escherichia coli
MTFVKGFPLILLVASMCSHGAVQPDRTRIIFNSKDKATSLRVENRSDKLPYLAYSWIENEKGEKSDEFLVALPPIQRLEPKATSQVRIMKQAATAKLPTDRESLFYYNLREIPPVPEGSEGHAILQVAVQSRIKLFWRPAALRKKMGDHVEQQLQVSQQNNQLTLKNPTGYYLTIAYLGRDEKGVLPGFKSTMVAPFSSVTTSTGSYSGKQFYLGYMDDYGALRMNTLSCQRQCRLQPVENKK

SEQ ID NO: 4410 - protein, 229 aa, Escherichia coli; identical to SEQ ID NO: 4047

SEQ ID NO: 4411 - protein, 233 aa, Escherichia coli; identical to SEQ ID NO: 3548

SEQ ID NO: 4412 - protein, 659 aa, Escherichia coli
MFRLNPFVRVGLCLSAISCAWPVLAVDDDGETMVVTASSVEQNLKDAPASISVITQEDLQRKPVQNLKDVLKEVPGVQLTNEGDNRKGVSIRGLDSSYTLILVDGKRVNSRNAVFRHNDFDLNWIPVDSIERIEVVRGPMSSLYGSDALGGVVNIITKKIGQKWSGTVTVDTTIQEHRDRGDTYNGQFFTSGPLIDGVLGMKAYGSLAKREKDDPQNSTTTDTGETPRIEGFSSRDGNVEFAWTPNQNHDFTAGYGFDRQDRDSDSLDKNRLERQNYSVSHNGRWDYGTSELKYYGEKVENKNPSNSSPITSESNTVDGKYTLPLTAINQFLTVGGEWRHDKLSDAVNLTGGTSSKTSASQYALFVEDEWRIFEPLALTTGVRMDDHETYGEHWSPRAYLVYNATDTVTVKGGWATAFKAPSLLQLSPDWTSNSCRGACKIVGSPDLKPETSESWELGLYYMGEEGWLEGVESSVTVFRNDVKDRISISRTSDVNAAPGYQNFVGFTANGVPVFSYYNVNKARIQGVETELKIPFNDEWKLSLNYTYNDGRDVSNGENKPLSDLPFHTANGTLDWKPLALEDWSFYVSGHYTGQKRADSATAKTPGGYTIWNTGAAWQVTKDVKLRAGVLNLGDKDLSRDDYSYNEDGRRYFMAVDYRF

SEQ ID NO: 4413 - protein, 203 aa, Escherichia coli; identical to SEQ ID NO: 2009

SEQ ID NO: 4414 - protein, 331 aa, Escherichia coli; identical to SEQ ID NO: 2705

SEQ ID NO: 4415 - protein, 760 aa, Escherichia coli
MENNRNFPARQFHSLTFFAGLCIGITPVAQALAAEGQTNADDTLVVEASTPSLYAPQQSADPKFSRPVADTTRTMTVISEQVIKDQGATNLTDALKNVPGVGAFFAGENGNSTTGDAIYMRGADTSNSIYIDGIRDIGSVSRDTFNTEQVEVIKGPSGTDYGRSAPTGSINMISKQPRNDAGIDASASIGSAWFRRGTLDVNQVIGDTTAVRLNVMGEKTHDAGRDKVKNERYGVAPSIAFGLGTANRLYLNYLHVTQHNTPDGGIPTIGLPGYSAPSAGTATLNHSGKVDTHNFYGTDSDYDDSTTDTATMRFEHDINDNTTIRNTTRWSRVKQDYLMTAIMGGASNITQPTSDVNSWTWSRTANTKDVSNKILTNQTNLTSTFYTASIGHDVSTGVEFTRETQTNYGVNPVTLPAVNIYHPDSSIHPGGLTRNGANANGQTDTFAIYAFDTLQITRDFELNGGIRLDNYHTEYDSATACGGSGRGAITCPAGVAKGSPVTTVDTAKSGNLVNWKAGALYHLTENGNVYINYAVSQQPPGGNNFALAQSGSGNSANRTDFKPQKANTSEIGTKWQVLDKRLLLTAALFRTDIENEVEQNDDGTYSQYGKKRVEGYEISVAGNITPAWQVIGGYTQQKATIKNGKDVAQDGSSSLPYTPEHAFTLWSQYQATDDISVGAGARYIGSMHKGSDGAVGTPAFTEGYWVADAKLGYRVNRNLDFQLNVYNLFDTDYVASINKSGYRYHPGEPRTFLLTANMHF

SEQ ID NO: 4416 - protein, 162 aa, Escherichia coli; identical to SEQ ID NO: 1969

SEQ ID NO: 4417 - protein, 203 aa, Escherichia coli; identical to SEQ ID NO: 2201

SEQ ID NO: 4418 - protein, 173 aa, Escherichia coli
MALLIFAVLSLLVAGELQAGVVVGGTRFIFPADRESISILLTNTSQESWLINSKINRPTRWAGGEASTVPAPLLAAPPLILLKPGTTGTLRLLRTESDILPVDRETLFELSIASVPSGKVENQSVKVAMRSVFKLFWRPEGCRATRWKLINNYAGHGSRRVYNSLTQRLITLT

SEQ ID NO: 4419 - protein, 274 aa, Escherichia coli; identical to SEQ ID NO: 2891

SEQ ID NO: 4420 - protein, 366 aa, Escherichia coli; identical to SEQ ID NO: 3520

SEQ ID NO: 4421 - protein, 883 aa, Escherichia coli; identical to SEQ ID NO: 2822

SEQ ID NO: 4422 - protein, 567 aa, Escherichia coli; identical to SEQ ID NO: 3518

SEQ ID NO: 4423 - protein, 713 aa, Escherichia coli; identical to SEQ ID NO: 3523

SEQ ID NO: 4424 - protein, 231 aa, Escherichia coli; identical to SEQ ID NO: 2868

SEQ ID NO: 4425 - protein, 747 aa, Escherichia coli; identical to SEQ ID NO: 2954

SEQ ID NO: 4426 - protein, 266 aa, Escherichia coli; identical to SEQ ID NO: 1894

SEQ ID NO: 4427 - protein, 412 aa, Escherichia coli; identical to SEQ ID NO: 2908

SEQ ID NO: 4428 - protein, 208 aa, Escherichia coli; identical to SEQ ID NO: 1949

SEQ ID NO: 4429 - protein, 856 aa, Escherichia coli
MAGFFVRLVVACAFAAQAPLSSADLYFNPRFLADDPQAVADLSRFENGQELPPGTYRVDIYLNNGYMATRDVTFNTGDSEQGIVPCLTRAQLASMGLNTASVAGMNLLADDACVPLTTMVQDATAHLDVGQQRLNLTIPQAFMSNRARGYIPPELWDPGINAGLLNYNFSGNSVQNRIGGNSHYAYLNLQSGLNIGAWRLRDNTTWSYNSSDRSSGSKNKWQHINTWLERDIIPLRSRLTLGDGYTQGDIFDGINFRGAQLASDDNMLPDSQRGFAPVIHGIARGTAQVTIKQNGYDIYNSTVPPGPFTINDIYAAGNSGDLQVTIKEADGSTQIFTVPYSSVPLLQREGHTRYSITAGEYRSGNAQQEKPRFFQSTLLHGLPAGWTIYGGTQLADRYRAFNFGIGKNMGALGALSVDMTQANSTLPDDSQHDGQSVRFLYNKSLNESGTNIQLVGYRYSTSGYFNFADTTYSRMNGYNIETQDGVIQVKPKFTDYYNLAYNKRGKLQLTVTQQLGRTSTLYLSGSHQTYWGTSNVDEQFQAGLNTAFEDINWTLSYSLTKNAWQKGRDQMLALNVNIPFSHWLRSDSKSQWRHASASYSMSHDLNGRMTNLAGVYGTLLEDNNLSYSVQTGYAGGGDGNSGSTGYATLNYRGGYGNANIGYSHSDDIKQLYYGVSGGVLAHANGVTLGQPLNDTVVLVKVPGAKDAKVENQTGVRTDWRGYAVLPYATEYRENRVALDTNTLADNVDLDNAVANVVPTRGAIVRAEFKARVGIKLLMTLTHNNKPLPFGAMVTSESSQSSGIVADNGQVYLSGMPLAGKVQVKWGEEENAHCVANYQLPPESQQQLLTQLSAECR

SEQ ID NO: 4430 - protein, 806 aa, Escherichia coli
MLCTTANAEEYYFDPIMLETTKSGMQTTDLSRFSKKYAQLPGTYQVDIWLNKKKVSQKKITFTANAEQLLQPQFTVEQLRELGIKVDEIPALAEKDDDSVINSLEQIIPGTAAEFDFNHQQLNLSIPQIALYRDARGYVSPSRWDDGIPTLFTNYSFTGSDNRYRQGNRSQRQYLNMQNGANFGPWRLRNYSTWTRNDQTSSWNTISSYLQRDIKALKSQLLLGESATSGSIFSSYTFTGVQLASDDNMLPNSQRGFAPTVRGIANSSAIVTIRQNGYVIYQSNVSAGAFEINDLYPSSNSGDLEVTIEESDGTQRRFIQPYSSLPMMQRPGHLKYSATAGRYRADANSDSKEPEFAEATAIYGLNNTFTLYGGLLGSEDYYALGIGIGGTLGALGALSMDINRADTQFDNQHSFHGYQWRTQYIKDIPETNTNIAVSYYRYTNDGYFSFNEANTRNWDYNSRQKSEIQFNISQTIFDGVSLYASGSQQDYWGNNDKNRNISVGVSGQQWGVGYSLNYQYSRYTDQNNDRALSLNLSIPLERWLPRSRVSYQMTSQKDRPTQHEMRLDGSLLDDGRLSYSLEQSLDDDNNHNSSLNASYRSPYGTFSAGYSYGNDSSQYNYGVTGGVVIHPHGVTLSQYLGNAFALIDANGASGVRIQNYPGIATDPFGYAVVPYLTTYQENRLSVDTTQLPDNVDLEQTTQFVVPNRGAMVAARFNANIGYRVLVTVSDRNGKPLPFGALASNDDTGQQSIVDEGGILYLSGISSKSQSWTVRWGNQADQQCQFAFSTPDSEPTTSVLQGTAQCH

SEQ ID NO: 4431 - protein, 815 aa, Escherichia coli
MNIYRLSFVSCLVMAMPCAMAVEFNLNVLDKSMRDRIDISLLKEKGVIAPGEYFVSVAVNNNKISNGQKINWQKKGDKTIPCINDSLVDKFGLKPDIRQSLPQIDRCIDFSSRPEMLFNFDQANQQLNISIPQAWLAWHSENWAPPSTWKEGVAGVLMDYNLFASSYRPQDGSSSTNLNAYGTAGINAGAWRLRSDYQLNKTDSEDNHDQSGGISRTYLFRPLPQLGSKLTLGETDFSSNIFDGFSYTGAALASDDRMLPWELRGYAPQISGIAQTNATVTISQSGRVIYQKKVPPGPFIIDDLNQSVQGTLDVKVTEEDGRVNNFQVSAASTPFLTRQGQVRYKLAAGQPRPSMSHQTENETFFSNEVSWGMLSNTSLYGGLLISDDDYHSAAMGIGQNMLWLGALSFDVTWASSHFDTQQDERGLSYRFNYSKQVDATNSTISLAAYRFSDRHFHSYANYLDHKYNDSDAQDEKQTISLSVGQPITPLNLNLYANLLHQTWWNADASTTANITAGFNVDIGDWRDISISTSFNTTHYEDKDRDNQIYLSISLPFGNGGRVGYDMQNSSHSTIHRMSWNDTLDERNSWGMSAGLQSDHPDNGAQVSGNYQHLSSAGEWDISGTYAASDYSSVSSSWSGSFTATQYGAAFHRRSSTNEPRLMVSTDGVADIPVQGNLDYTNHFGIAVVPLISSYQPSTVAVNMNDLPDGVTVAENVIKETWIEGAIGYKSLASRSGKDVNVIIRNASGQFPPLGADIRQDDSGISVGMVGEEGHAWLSGVAENQLFTVVWGEQSCIIHLPERLEDTTKRLILPCH

SEQ ID NO: 4432 - protein, 432 aa, Escherichia coli; identical to SEQ ID NO: 2026

SEQ ID NO: 4433 - protein, 512 aa, Escherichia coli; identical to SEQ ID NO: 2813

SEQ ID NO: 4434 - protein, 715 aa, Escherichia coli; identical to SEQ ID NO: 3971

SEQ ID NO: 4435 - protein, 108 aa, Escherichia coli; identical to SEQ ID NO: 3602

SEQ ID NO: 4436 - protein, 161 aa, Escherichia coli; identical to SEQ ID NO: 2582

SEQ ID NO: 4437 - protein, 793 aa, Escherichia coli
MLKKTLLAYTIGFAFSPPANADGIEIAAVDFDRETLKSLGVDPNISHYFSRSARFLPGEYSLIVSVNGEKKGNIATRFDENGDICLDQAFLQQAGLKIPSEEKNGCYDYILSYPGTTITPLPNQEALDIIVSPQAIIPIGLDLTNAATGGTAALLNYSLMSSRAEFSNGSSDYSQAALEGGININDWMLRSHHFLTQTNGTFSNQNSSTYLQRTFTDLKTLMRAGEVNLNNSVLEGASIYGIEIAPDNALQTSGSGVQVTGIANTSQARVEIRQQGVLIHSILVPAGAFTIPDVPVRNGNSDLNVTVVETDGSSHNYIVPSTLFNQHVESFQGYRFAIGRVDDDYDESPWVISASSGWNLTRWSAMNGGVIVAENYQAASIRSSLVPLPDLTVSSQISTSQDTKDSLQGQKYRLDANYNLPFSLGLTTSLTRSDRHYRELSEAIDDDYTDPTKSTYALGLNWSNSILGGFNISGYKTYSYDGDNDSSNLNINWNKAFKHATVSVNWQHQLSASENNEDDGDLFYVNISIPFGRSNTATLYTRHDDHKTHYGTGVMGVVSDEMSYYVNAERDHDERETSLNGSISSNLHYTQVSLAAGASGSDSRTYNGTMSGGIAVHDQGVTFSPWTINDTFAIAKMDNNIAGVRITSQAGPVWTDFRGNAVIPSIQPWRTSGVEIDTASLPKNVDIGNGTKMIKQGRGAVGKVGFSAITQRRALLNITLSDGKKLPRGVAIEDSEGNYLTTSVDDGVVFLNNIKPDMVLDIKDEQQSCRIHLTFPEDAPKDVFYETATGECQ

SEQ ID NO: 4438 - protein, 228 aa, Escherichia coli
MKSKFVALALSLFLSQSVLAGGVGLSSTRVIYDGSKKEASLTVQNKSKTEEFLIQSWMDDAAGSKKTPFIITPPLFKLDPEKNNILRIVNITPGLPQDRESVYWVNVKAIPSKSDDSENKNVLQIAVRTRIKLFYRPAGLKGDVKTAPNELRFTRNGNQLRVDNPTVFNITFNQFFANDKEIEKAGMVPAKGALNITLPAGVGSVSKIKYNTINDFGSSAEMITKNVD

SEQ ID NO: 4439 - protein, 241 aa, Escherichia coli; identical to SEQ ID NO: 3582

SEQ ID NO: 4440 - protein, 851 aa, Escherichia coli
MPSFIGGLVVFVSAAFNAQAETWFDPAFFKDDPSMVADLSRFEKGQKITPGVYRVDIVLNQTIVDTRNVNFVEITPEKGIAACLTTESLDAMGVNTDAFPAFKQLDKQACVPLAEIIPDASVTFNVNKLRLEISVPQIAIKSNARGYVPPERWDEGINALLLGYSFSGANSIHSSADSDSGDSYFLNLNSGVNLGPWRLRNNSTWSRSSGQTAEWKNLSSYLQRAVIPLKGELTVGDDYTAGDFFDSVSFRGVQLASDDNMLPDSLKGFAPVVRGIAKSNAQITIKQNGYTIYQTYVSPGAFEISDLYSTSSSGDLLVEIKEADGSVNSYSVPFSSVPLLQRQGRIKYAVTLAKYRTNSNEQQESKFAQATLQWGGPWGTTWYGGGQYAEYYRAAMFGLGFNLGDFGAISFDATQAKSTLADQSEHKGQSYRFLYAKTLNHLGTNFQLMGYRYSTSGFYTLSDTMYKHMDGYEFNDGDDEDTPMWSRYYNLFYTKRGKLQVNISQQLGEYGSFYLSGSQQTYWHTDQQDRLLQFGYNTQIKDLSLGISWNYSKSRGQPDADQVFALNFSLPLNLLLPRSNDSYTRKKNYAWMTSNTSIDNEGHTTQNLGLTETLLDDGNLSYSVQQGYNSEGKTANGSASMDYKGAFADARVGYNYSDNGSQQQLNYALSGSLVAHSQGITLGQSLGETNVLIAAPGAENTRVANSTGLKTDWRGYTVVPYATSYRENRIALDAASLKRNVDLENAVVNVVPTKGALVLAEFNAHAGARVLMKTSKQGIPLRFGAIATLDGVQANSGIIDDDGSLYMAGLPAKGTISVRWGEAPDQICHINYELTEQQINSAITRMDAICR

SEQ ID NO: 4441 - protein, 816 aa, Escherichia coli; identical to SEQ ID NO: 3562

SEQ ID NO: 4442 - protein, 367 aa, Escherichia coli; identical to SEQ ID NO: 2431

SEQ ID NO: 4443 - protein, 368 aa, Escherichia coli; identical to SEQ ID NO: 2374

SEQ ID NO: 4444 - protein, 518 aa, Escherichia coli; identical to SEQ ID NO: 2351

SEQ ID NO: 4445 - protein, 430 aa, Escherichia coli; identical to SEQ ID NO: 2617

SEQ ID NO: 4446 - protein, 227 aa, Escherichia coli; identical to SEQ ID NO: 3570

SEQ ID NO: 4447 - protein, 660 aa, Escherichia coli; identical to SEQ ID NO: 4092

SEQ ID NO: 4448 - protein, 656 aa, Escherichia coli
MRLKKHYLCTALSLAFTQQAVAAQESDSLTVWSSPVSSTTTTVLDQPTMKALDKQNVAQALSVVPGVVLQKSGSRNEEQVKVRGFDSRQVPVYFDGVPIYVPYDGNLDLARILTNNLGAVEVSKGYSSLLQGPNQMGGAINITTQKPTKPLEASLGYRQGWSRSQDNAYDMHASFAASSELGYLQVSGSQLKQDFLGLPHGVNNDIAGKHGKMINSSADDKRGIVKLGFTPRENDEYTLTYIKQDGEKDNPPYSGNSGQKSRYWQWPEYDKESFYYQGTTQLNDRFTLKSRLYRDTFENTLMMYNSLADLKNKKGSYSHYSDYSDGAGLQLAADVRENDLLSFAVNWKDDVHREKGAPHAAYDRYEDRTWSLASEYQWAAADNVDVVAGISYDWRDSVEAKKHEKDGSITHYDDNNQSAFNWQVMGKYHFVNEDTLALSYYDRKRFPTLKERYTTSKPAYNQIAIVNPQLKPERARGVDLTWNGAFTHDWGFEVSVYYNRVSDAILSHNIDADTIQNQNSGTVDYSGLDAGIKGKISNILDVGLSYALIHADAKRKDIGKITDLPTQTMTAWMTLKPWEPLSVTLSEEARSSSYSNSDGSQKAAGFAVTHIRADYTLGHGFSVNASVNNLFDTQYAYSEGFVEEGRNFWAGVEYTF

SEQ ID NO: 4449 - protein, 207 aa, Escherichia coli; identical to SEQ ID NO: 2211

SEQ ID NO: 4450 - protein, 828 aa, Escherichia coli; identical to SEQ ID NO: 2381

SEQ ID NO: 4451 - protein, 75 aa, Escherichia coli
GDMYTSADIFDSVRFTGVRLFRDMQMLPNSKQNFTPRVQGIAQSNALVTIEQNGFVVYQKEVPPGPFSISDLQLA

SEQ ID NO: 4452 - protein, 241 aa, Escherichia coli; identical to SEQ ID NO: 2887

SEQ ID NO: 4453 - protein, 239 aa, Escherichia coli
MHQMQTTRTPYSISFMATVLLLLLFACHSTVANAAVALGATRVIYPANQKQVLLPVTNNDPASVYLIQSWIENAGDQKDTQFVITPPLFSMQGKKENTLRIINATNHQLPGDRESLFWVNVKAIPAMEKDQKNENTLQLAIISRIKMFYRPTNLAMAPEEAPAMLRFRRSGSNLTLINPTPYFITVTNMKAGNSNLPNTMVPPKGEVSVDIPHAATGDISFQTINDYGALTPRIKATMQ

SEQ ID NO: 4454 - protein, 784 aa, Escherichia coli
MKKRIPTLLATMIATALYSQQGLAADLASQCMLGVPSYDRPLVQGDTNDLPVTINADHAKGDYPDDAVFTGSVDIMQGNSRLQADEVQLHQKEAPGQPEPVRTVDALGNVHYDDNQVILKGPKGWANLNTKDTNVWEGDYQMVGRQGRGKADLMKQRGENRYTILDNGSFTSCLPGSDTWSVVGSEIIHDREEQVAEIWNARFKVGPVSIFYSPYLQLPVGDKRRSGFLIPNAKYTTTNYFEFYLPYYWNIAPNMDATITPHYMHRRGNIMWENEFRYLSQAGAGLMELDYLPSDKVYEDEHPNDDSSRRWLFYWNHSGVMDQVWRFNVDYTKVSDPSYFNDFDNKYGSSTDGYATQKFSVGYAVQNFNATVSTKQFQVFSEQNTSSYSAEPQLDVNYYQNDVGPFDTRIYGQAVHFVNTRDDMPEATRVHLEPTINLPLSNNWGSINTEAKLLATHYQQTNLDWYNSRNTTKLDESVNRVMPQFKVDGKMVFERDMEMLAPGYTQTLEPRAQYLYVPYRDQSDIYNYDSSLLQSDYSGLFRDRTYGGLDRIASANQVTTGVTSRIYDDAAVERFNISVGQIYYFTESRTGDDNITWENDDKTGSLVWAGDTYWRISERWGLRGGIQYDTRLDNVATSNSSIEYRRDEDRLVQLNYRYASPEYIQATLPKYYSTAEQYKNGISQVGAVASWPIADRWSIVGAYYYDTNANKQADSMLGVQYSSCCYAIRVGYERKLNGWDNDKQHAVYDNAIGFNIELRGLSSNYGLGTQEMLRSNILPYQNTL

SEQ ID NO: 4455 - protein, 191 aa, Escherichia coli; identical to SEQ ID NO: 2727

SEQ ID NO: 4456 - protein, 816 aa, Escherichia coli
MLRTTRWVAAIIFLYSFPGYAEETFDTHFMIGGMKGEKVSEYHFDNKQPLPGNYELDFYVNNQWRGKQDITIPESPVKPCLPKVLLTKLGVKTGNLNTEDNCILLDKAVHGGQYQWDISEHRLNLTVPQAYINELERGYVPPESWDRGIDAFYTSYNLSQYRSYDSNNNSNTASYGRFNSGLNLFSWQLHSDASYSKPDDMKGTWQSNTLYLEHGWSQILSTVQIGENYTSSLIFDSLRFSGIRLFRDMQMLPDSMQSFTPLVQGVAQSNALITVSQNGYIIYQKEVPPGPFTIADLQLSGSGSDLDVSIKEADGSVRSFLVPYSSVPNMLQPGISNFDFIAGRSKIYGVKNQEDFLEANYIYGLNNLLTLYGGTILSDNYNAITLGNGWNTPLGAISFDATRSSSKLNNDITHEGTSYQVAYNKYLVQTATRFSVAAWRYASQDYRTFSDHLYENDKINHQSDYDDFYDIGRKNSLSANIMQPLSNNLGNVSLSALWRNYWGRSGNAKDYQFSYSNSWQRISYTFSASQSYDENDKEEERFNLFISIPFYWGDDIAKTRHQINLSNSTSFSKDGYSSNNTGITGIAGEHDQLNYGIYVNQQQQNNDTSLGTNLSWRTPIATIDGSYSHSKNAWQSGGSISSGLVVWPGGINITNQLSDTFAILDAPGLEGAHINGQKYNRTNSKGQVVYDLMIPHRENHLVLDTANSESETELQGNRQIIAPYRGAVSYVQFTTDQRKPWYIQALRPDGSPLTFGYDVLDLQENNIGVVGQGSRLFIRVDEIPTGIKVALNDEQNLFCTITFQHVIDENKTYICQ

SEQ ID NO: 4457 - protein, 362 aa, Escherichia coli; identical to SEQ ID NO: 2998

SEQ ID NO: 4458 - protein, 170 aa, Escherichia coli; identical to SEQ ID NO: 2565

SEQ ID NO: 4459 - protein, 867 aa, Escherichia coli; identical to SEQ ID NO: 2581

SEQ ID NO: 4460 - protein, 539 aa, Escherichia coli
MAAVCGTSGIASLFSQAVFAADSDIADGQTQRFDFSILQSMAHDLAQTAWRGAPRPLPDTLATMTPQAYNSIQYDAEKSLWHNVENRQLDAQFFHMGMGFRRRVRMFSVDPATHLAREIHFRPELFKYNDAGVDTKQLEGQSDLGFAGFRVFKAPELARRDVVSFLGASYFRAVDDTYQYGLSARGLAIDTYTDSKEEFPDFTAFWFDTVKPGATTFTVYALLDSASITGAYKFTIHCEKSQVIMDVENHLYARKDIKQLGIAPMTSMFSCGTNERRMCDTIHPQIHDSDRLSMWRGNGEWICRPLNNPQKLQFNAYTDNNPKGFGLLQLDRDFSHYQDIMGWYNKRPSLWVEPRNKWGKGTIGLMEIPTTGETLDNIVCFWQPEKAVKAGDEFAFQYRLYWSAQPPVHCPLARVMATRTGMGGFPEGWAPGEHYPEKWARRFAVDFVGGDLKAAAPKGIEPVITLSSGEAKQIEILYIEPIDGYRIQFDWYPTSDSTDPVDMRMYLRCQGDAISETWLYQYFPPAPDKRQYVDDRVMS

SEQ ID NO: 4461 - protein, 233 aa, Escherichia coli; identical to SEQ ID NO: 2005

SEQ ID NO: 4462 - protein, 368 aa, Escherichia coli; identical to SEQ ID NO: 2370

SEQ ID NO: 4463 - protein, 869 aa, Escherichia coli
MKIPTTTDIPQRYTWCLAGICYSSLAILPSFLSYAESYFNPAFLLENGTSVADLSRFERGNHQPAGVYRVDLWRNDEFIGSQDIVFESTTENTGDKSGGLMPCFNQVLLERIGLNSSAFPELAQQQNNKCINLLKAVPDATINFDFAAMRLNITIPQIALLSSAHGYIPPEEWDEGIPALLLNYNFTGNRGNGNDSYFFSELSGINIGPWRLRNNGSWNYFRGNGYHSEQWNNIGTWVQRAIIPLKSELVMGDGNTGSDIFDGVGFRGVRLYSSDNMYPDSQQGFAPTVRGIARTAAQLTIRQNGFIIYQSYVSPGAFEITDLHPTSSNGDLDVTIDERDGNQQNYTIPYSTVPILQREGRFKFDLTAGDFRSGNSQQSSPFFFQGTALGGLPQEFTAYGGTQLSANYTAFLLGLGRNLGNWGAVSLDVTHARSQLADDSRHEGDSIRFLYAKSMNTFGTNFQLMGYRYSTQGFYTLDDVAYRRMEGYEYDYDYDGEHRDEPIIVNYHNLRFSRKDRLQLNISQSLNDFGSLYISGTHQKYWNTSDSDTWYQVGYTSSWVGISYSLSFSWNESVGIPDNERIVGLNVSVPFNVLTKRRYTRENALDRAYASFNANRNSNGQNSWLAGVGGTLLEGHNLSYHVSQGDTSNNGYTGSATANWQAAYGTLGVGYNYDRDQHDVNWQLSGGVVGHENGITLSQPLGDTNVLIKAPGAGGVRIENQTGILTDWRGYAVMPYATVYRYNRIALDTNTMGNSIDVEKNISSVVPTQGALVRANFDTRIGVRALITVTQGGKPVPFGSLVRENSTGITSMVGDDGQVYLSGAPLSGELLVQWGDGANSRCIAHYVLPKQSLQQAVTVISAVCTHPGS

SEQ ID NO: 4464 - protein, 359 aa, Escherichia coli; identical to SEQ ID NO: 2332

SEQ ID NO: 4465 - protein, 678 aa, Escherichia coli; identical to SEQ ID NO: 2902

SEQ ID NO: 4466 - protein, 517 aa, Escherichia coli; identical to SEQ ID NO: 2462

SEQ ID NO: 4467 - protein, 161 aa, Escherichia coli; identical to SEQ ID NO: 2582

SEQ ID NO: 4468 - protein, 200 aa, Escherichia coli; identical to SEQ ID NO: 1788

SEQ ID NO: 4469 - protein, 614 aa, Escherichia coli
MIKKASLLTACSVTAFSAWAQDTSPDTLVVTANRFEQPRSTVLAPTTVVTRQDIDRWQSTSVNDVLRRLPGVDITQNGGSGQLSSIFIRGTNASHVLVLIDGVRLNLAGVSGSADLSQFPIALVQRVEYIRGPRSAVYGSDAIGGVVNIITTRDEPGTEISAGWGSNSYQNYDVSTQQQLGDKTRVTLLGDYAHTHGYDVVAYGNTGTQAQPDNDGFLSKTLYGALEHNFTDAWSGFVRGYGYDNRTNYDAYYSPGSPLVDTRKLYSQSWDAGLRYNGELIKSQLITSYSHSKDYNYDPHYGRYDSSATLDEMKQYTVQWANNIIIGHGNVGAGVDWQKQSTAPGTAYVKDGYDQRNTGIYLTGLQQVGDFTFEGAARSDDNSQFGRHGTWQTSAGWEFIEGYRFIASYGTSYKAPNLGQLYGFYGNPNLDPEKSKQWEGAFEGLTAGVNWRISGYRNDVSDLIDYDDHTLKYYNEGKARIKGVEATANFDTGPLTHTVSYDYVDARNAITDTPLLRRAKQQVKYQLDWQLYDFDWGITYQYLGTRYDKDYSSYPYQTVKMGGVSLWDLAVAYPVTSHLTVRGKIANLFDKDYETVYGYQTAGREYTLSGSYTF

SEQ ID NO: 4470 - protein, 207 aa, Escherichia coli; identical to SEQ ID NO: 2211

SEQ ID NO: 4471 - protein, 124 aa, Escherichia coli
MYAEPRNMTGYGDADAIANKTQNFEVVAQYQFDFGLRPSIAYLQSKGKDLGGVNSDNFDSQGNHHYTNKDLVKYVDIGMTYYFNKNMSTYVDYKINLLDNDDDFYKENGIATDDIVAVGLVYQF

SEQ ID NO: 4472 - protein, 840 aa, Escherichia coli
MNKSVVSISAAMLVLLCQPVMGSEISPATPSDEDNYTFDPQLFRGSRFSQSSLAKLTTRESVAPGNYKMDIYTNNKLSGSWNVTFKEAADGRVLPCLTPEVADAIGLKTGEDKGEKDPVCTFAKELAPGITSQTQLSQLRLDLSVPQSQLISRPRGYVPPSELDTGASLAFMNYIANYYNVAYSGQNAHSQRSLWASFNGGINLGAWQYRQLSNMTWDNDKGNQWNNIRSYLQRPLPAINSQLMMGQLITSGRFFSGLSYHGVSLATDERMLPDSMRGYAPTIRGVAATNARVSVMQNGHEIYQTTVAPGPFEINDLYPTSYSGDLDVTVTEANGAVSRFSVPFSAVPESMRPGTSRYNVEVGKTQDSGDDSMFGDLTWQHGMTNTLTFNSGSRIADGYQALMLGGVYGSSLGAFGANLTWSHARVPESEAQSGWMSQLTWSKTFQPTSTTVSLAGYRYSTSGYRDLADVLGERHAASNKQSWDSSQWRQQSRFDLTLSQCLANYGNLFVSGSTQNYRGGKSRDTQLQLGYSNSFSHGISMNLSVGRQRMGGYKDNSDDMQTVTSLSFSFPLGGNGPRVPSLSNSWTHSTDGSSQLQSSLTGMLDEAQTTNYSLNVMRDQQYKQTTLSGNMQKRFSQTTVGLNASKGQDYWQASGNVQGAMAVHGGGITFGPYLGETFALIEAKGAEGAKVYNSSQLEINDSGYALVPAVTPYRYNRISLDPQGMDGDAELVDSERQVAPVAGAAVKVIFRTRPGKALLIKSRMADGSELPMGADVLDENNTVVGIAGQGGQIYLRTEQTKGHLSVRWGEGANDSCQLPFDISGKDSNSPIIRLNETCQS

SEQ ID NO: 4473 - protein, 700 aa, Escherichia coli; identical to SEQ ID NO: 2926

SEQ ID NO: 4474 - protein, 445 aa, Escherichia coli
MITLRKLPLAVAVAAGVMSAQAMAVDFHGYARSGIGWTGSGGEQQCFQTTGAQSKYRLGNECETYAELKLGQEVWKEGDKSFYFDTNVAYSVAQQNDWEATDPAFREANVQGKNLIEWLPGSTIWAGKRFYQRHDVHMIDFYYWDISGPGAGLENIDVGFGKLSLAATRSSEAGGSSSFASNNIYDYTNETANDVFDVRLAQMEVNPGGTLELGVDYGRANLRDNYRLVDGASKDGWLFTAEHTQSVLKGFNKFVVQYATDSMTSQGKGLSQGSGVAFDNEKFAYNINNNGHMLRILDHGAISMGDNWDMMYVGMYQDINWDNDNGTKWWTVGIRPMYKWTPIMSTVMEIGYDNVESQRTGDKNNQYKITLAQQWQAGDSIWSRPAIRVFATYAKWDEKWGYDYNGDSKVNPNYGKAVPADFNGGSFGRGDSDEWTFGAQMEIWW

SEQ ID NO: 4475 - protein, 237 aa, Escherichia coli; identical to SEQ ID NO: 2816

SEQ ID NO: 4476 - protein, 478 aa, Escherichia coli; identical to SEQ ID NO: 2404

SEQ ID NO: 4477 - protein, 331 aa, Escherichia coli
MLRMTPLASAIVALLLGIEAYAAEETFDTHFMIGGMKDQQVANIRLDDNQPLPGQYDIDIYVNKQWRGKYEIIVKDNPQETCLSREVIKRLGINSDNFASGKQCLTFEQLVQGGSYTWDIGVFRLDFSVPQAWVEELESGYVPPENWERGINAFYTSYYLSQYYSDYKASGNNKSTYVRFNSGLNLLGWQLHSDASFSKTNNNPGVWKSNTLYLERGFAQLLGTLRVGDMYTSSDIFDSVRFRGVRLFRDMQMLPNSKQNFTPRVQGIAQSNALVTIEQNGFVVYQKEVPPGPFAITDLQLAGGGADLDVSVKEADGSVTTYLVPYAAGPN

SEQ ID NO: 4478 - protein, 230 aa, Escherichia coli; identical to SEQ ID NO: 2995

SEQ ID NO: 4479 - protein, 879 aa, Escherichia coli
MPDHSLFRLRVLPCCVALAMSGSYVNAWAENEIQFDSRFLELKGDTKIDLKRFSSQGYVEPGKYNLQVQLNKQPLTEEYDIYWYASENDASKTYACLTPELVAQFGLKEDVAKNLQWIHDGKCLKPGQLEGIDIKADLSQSALVISLPQAYLEYTDINWDPPSRWDDGISGLIADYSITAQTRHEENGGDDSNEISGNGTVGVNLGAWRLRADWQTDYLHSKSNDDDVINGDDTQKNWEWSRYYAWRALPSLKAKLGLGEDYLNSDIFDGFNYVGGSISTDDQMLPPNLRGYAPDISGVAHTTAKVTVSQLGRVIYETQVPAGPFRIQDLGDSVSGTLHIRIEEQNGQVQEYDINTASMPFLTRPGQVRYKLMMGRPQEWGHHVEGGFFSGGEASWGIANGWSLYGGALADEHYQSAALGVGRDLSVFGAVAFDITHSHTRLDKETAYGKGSLDGNSFRLSYSKDFDELNSRVTFAGYRFSEENFMTMSEYLDASDSEMVRTGNDKEMYTATYNQNFRDAGVSVYLNYTRHTYWDRDEQTNYNVMLSHYFNLGSIRNMSISMTGYRYEYDNQADKGVYISLSMPWGDSSTISYNGNYGSGSDSSQVGYFSRVDDATHYQLNVGTSDNHSSVDGYYSHDGSLAQVDLSANYHEGQYTSAGISLQGGATLTAQGGALHRTQNMGGTRLLIDADGVAGVPVEGNGAAVYTNMFGKAVVADVNNYYRNQAYIDLNNLPENAEATQSVVQATLTEGAIGYRKFSVISGQKAMAVLRLQDGSYPPFGAEVKNDSAQNVGLVDDDGNVYLAGVKPGEHMIVSWGGVAHCDIHLPDPLPADLFNGLLLPCQQTGAISPSMPHEIKPVIQEQTQQVMPTEAPVSVSAN

SEQ ID NO: 4480 - protein, 111 aa, Escherichia coli; identical to SEQ ID NO: 2911

SEQ ID NO: 4481 - protein, 252 aa, Escherichia coli; identical to SEQ ID NO: 3543

SEQ ID NO: 4482 - protein, 729 aa, Escherichia coli
MLSTQFNRDNQYQAITKPSLLAGCIALALLPSAAFAAPATEETVIVEGSATAPDDGENDYSVTSTSAGTKMQMTQRDIPQSVTIVSQQRMEDQQLQTLGEVMENTLGISKSQADSDRALYYSRGFQIDNYMVDGIPTYFESRWNLGDALSDMALFERVEVVRGATGLMTGTGNPSAAINMVRKHATSREFKGDVSAEYGSWNKERYVADLQSPLTEDGKIRARIVGGYQNNDSWLDRYNSEKTFFSGIVDADLGDLTTLSAGYEYQRIDVNSPTWGGLPRWNTDGSSNSYDRARSTAPDWAYNDKEINKVFMTLKQRFADTWQATLNATHSEVEFDSKMMYVDAYVNKADGMLVGPYSNYGPGFDYVGGTGWNSGKRKVDALDLFADGSYELFGRQHNLMFGGSYSKQNNRYFSSWANIFPDEIGSFYNFNGNFPQTDWSPQSLAQDDTTHMKSLYAATRVTLADPLHLILGARYTNWRVDTLTYSMEKNHTTPYAGLVFDINDNWSTYASYTSIFQPQNDRDSSGKYLAPITGNNYELGLKSDWMNSRLTTTLAIFRIEQDNVAQSTGTPIPGSNGETAYKAVDGTVSKGVEFELNSAITDNWQLTFGATRYIAEDNEGNAVNPNLPRTTVKMFTSYRLPVMPELTVGGGVNWQNRVYTDTVTPYGTFRAEQGSYALVDLFTRYQVTKNFSLQGNVNNLFDKTYDTNVEGSIVYGAPRNFSITGTYQF

SEQ ID NO: 4483 - protein, 266 aa, Escherichia coli; identical to SEQ ID NO: 1894

SEQ ID NO: 4484 - protein, 881 aa, Escherichia coli
MPDHSLFRLRILPWCIALAMSGSYSSVWAEDDIQFDSRFLELKGDTKIDLKRFSSQGYVEPGKYNLQVQLNKQPLAEEYDIYWYAGEDDVSKSYACLTPELVAQFGLKEDVAKNLQWSHDGKCLKPGQLEGVEIKADLSQSALVISLPQAYLEYTWPDWDPPSRWDDGISGIIADYSITAQTRHEENGGDDSNEISGNGTVGVNLGPWRMRADWQTNYQHTRSNDDDDEFGGDDTQKKWEWSRYYAWRALPSLKAKLALGEDYLNSDIFDGFNYVGGSVSTDDQMLPPNLRGYAPDISGVAHTTAKVTVSQMGRVIYETQVPAGPFRIQDLGDSVSGTLHIRIEEQNGQVQEYDISTASMPYLTRPGQVRYKIMMGRPQEWGHHVEGGFFSGAEASWGIANGWSLYGGALGDENYQSAALGVGRDLSTFGAVAFDVTHSHTKLDKDTAYGKGSLDGNSFRVSYSKDFDQLNSRVTFAGYRFSEENFMTMSEYLDASDSEMVRTGNDKEMYTATYNQNFRDAGVSVYLNYTRHTYWDREEQTNYNIMLSHYFNMGSIRNMSVSLTGYRYEYDNRADKGMYISLSMPWGDNSIVSYNGNYGSGTDSSQVGYFSRVDDATHYQLNIGTSDKHTSVDGYYSHDGSLAQVDLSANYHEGQYTSAGLSLQGGATLTTHGGALHRTQNMGGTRLLIDADGVADVPVEGNGAAVYTNMFGKAVVSDVNNYYRNQAYIDLNKLPENAEATQSVVQATLTEGAIGYRKFAVISGQKAMAVLRLQDGSHPPFGAEVKNDNEQTVGLVDDDGSVYLAGVKPGEHMSVFWSGVAHCDINLPDPLPADLFNGLLLPCQHKGNVAPVVPDDIKPVIQEQTQQVTPTDPPVSVSANQ

SEQ ID NO: 4485 - protein, 746 aa, Escherichia coli; identical to SEQ ID NO: 2949

SEQ ID NO: 4486 - protein, 539 aa, Escherichia coli; identical to SEQ ID NO: 3146

SEQ ID NO: 4487 - protein, 714 aa, Escherichia coli
MAPAVAQQTDDETFVVSANRSNRTVAEMAQTTWVIENAELEQQIQGGKELKDALAQLIPGLDVSSRSRTNYGMNVRGRPLVVLVDGVRLNSSRTDSRQLDSIDPFNIDHIEVISGATSLYGGGSTGGLINIVTKKGQPETMMEFEAGTKSGFSSSKDHDERIAGAVSGGNEHISGRLSVAYQKFGGWFDGNGDATLLDNTQTGLQYSDRLDIMGTGTLNIDESRQLQLITQYYKSQGDDDYGLNLGKGFSAIRGTSTPFVSNGLNSDRIPGTERHLISLQYSDSAFLGQELVGQVYYRDESLRFYPFPTVNANKQVTAFSSSQQDTDQYGMKLTLNSKPMDGWQITWGLDADHERFTSNQMFFDLAQASASGGLNNKKIYTTGRYPSYDITNLAAFLQSGYDINNLFTLNGGVRYQYTENKIDDFIGYAQQRQIAAGKATSADAIPGGSVDYDNFLFNAGLLMHITERQQAWLNFSQGVELPDPGKYYGRGIYGAAVNGHLPLTKSVNVSDSKLEGVKVDSYELGWRFTGNNLRTQIAAYYSISDKSVVANKDLTISVVDDKRRIYGVEGAVDYLIPDTDWSTGVNFNVLKTESKVNGTWQKYDVKTASPSKATAYIGWAPDPWSLRVQSTTSFDVSDAQGYKVDGYTTVDLLGSYQLPVGTLSFSIENLFDRDYTTVWGQRAPLYYSPGYGPASLYDYKGRGRTFGLNYSVLF

SEQ ID NO: 4488 - protein, 614 aa, Escherichia coli; identical to SEQ ID NO: 1888

SEQ ID NO: 4489 - protein, 218 aa, Escherichia coli
MFMAMMVAGRAEAGVALGATRVIYPAGQKQVQLAVTNNDENSTYLIQSWVENADGVKDGRFIVTPPLFAMKGKKENTLRILDATNNQLPQDRESLFWMNVKAIPSMDKSKLTENTLQLAIISRIKLYYRPAKLALPPDQAAEKLRFRRSANSLTLINPTPYYLTVTELNAGTRVLENALVPPMGESTVKLPSDAGSNITYRTINDYGALTPKMTGVME

SEQ ID NO: 4490 - protein, 122 aa, Escherichia coli; identical to SEQ ID NO: 2915

SEQ ID NO: 4491 - protein, 700 aa, Escherichia coli; identical to SEQ ID NO: 2784

SEQ ID NO: 4492 - protein, 242 aa, Escherichia coli; identical to SEQ ID NO: 2697

SEQ ID NO: 4493 - protein, 565 aa, Escherichia coli; identical to SEQ ID NO: 2669

SEQ ID NO: 4494 - protein, 230 aa, Escherichia coli; identical to SEQ ID NO: 2580

SEQ ID NO: 4495 - protein, 200 aa, Escherichia coli; identical to SEQ ID NO: 1793

SEQ ID NO: 4496 - protein, 518 aa, Escherichia coli; identical to SEQ ID NO: 2349

SEQ ID NO: 4497 - protein, 774 aa, Escherichia coli; identical to SEQ ID NO: 3895

SEQ ID NO: 4498 - protein, 222 aa, Escherichia coli
MSKLGISSLFKSILLTAALAVSFTASAFTEGTDYMVLEKPIPNADKTLIKVFSYACPFCYKYDKAVTGPVSEKVKDIVAFTPFHLETKGEYGKQASEVFAVLINKDKAAGISLFDANSQFKKAKFAYYAAYHDKKERWSDGKDPAAFIKTGLDAAGMSQADFEAALKEPAVQETLEKWKASYEVAKIQGVPAYVVNGKYLIYTKSIKSIDSMADLIRELASK

SEQ ID NO: 4499 - protein, 432 aa, Escherichia coli; identical to SEQ ID NO: 2026

SEQ ID NO: 4500 - protein, 362 aa, Escherichia coli; identical to SEQ ID NO: 2434

SEQ ID NO: 4501 - protein, 359 aa, Escherichia coli
MKKYLVLALIAPLLISCSTTKKGDTYNEAWVKDTNGFDILMGQFAHNIENIWGFKEVVIAGPKDYVKYTDQYQTRSHINFDDGTITIETIAGTEPAAHLRRAIIKTLLMGDDPGSVDLYSDVDDITISKEPFLYGQVVDNTGQPIRWEGRASNFADYLLKNRLKSRSNGLRIIYSVTINMVPNHLDKRAHKYLGMVRQASRKYGVDESLILAIMQTESSFNPYAVSRSDALGLMQVVQHTAGKDVFRSQGKSGTPSRSFLFDPASNIDTGTAYLAMLNNVYLGGIDNPTSRRYAVITAYNGGAGSVLRVFSNDKIQAANIINTMTPGDVYQTLTTRHPSAESRRYLYKVNTAQKSYRRR

SEQ ID NO: 4502 - protein, 191 aa, Escherichia coli; identical to SEQ ID NO: 2727

SEQ ID NO: 4503 - protein, 446 aa, Escherichia coli [sequence omitted]

SEQ ID NO: 4504 - protein, 478 aa, Escherichia coli; identical to SEQ ID NO: 2404

SEQ ID NO: 4505 - protein, 203 aa, Escherichia coli; identical to SEQ ID NO: 2201

SEQ ID NO: 4506 - protein, 332 aa, Escherichia coli; identical to SEQ ID NO: 2701

SEQ ID NO: 4507 - protein, 224 aa, Escherichia coli; identical to SEQ ID NO: 4053

SEQ ID NO: 4508 - protein, 227 aa, Escherichia coli
MRIIIALLMSFFILPVHAGMVIYGTRIIYPKKNREVLVQLMNQSKNASLIQAWIDDGNTTIAPEKIQVLFILTPPVSRVAGGSGQQLKIRKMPNNLPHNKESLFYLNVLDIPPNNPQNAGKNKIKLALQNRIKLLWRPSGIAPVDKKSLSQLNIKKKNNAISINNETANWITVTTIKAQNVKVNNESILLPPFSNNDITLKNNHASEYELTVVDDYGNNIHSKIAAR

SEQ ID NO: 4509 - protein, 119 aa, Escherichia coli
MNTVLSVQGASAPVENKSFFSKFTRLNMLRLVRAVIPVAVLMMLFPELAMAAGKGDLMAKGNDTVKATFGKDSSIVKWVVLAEVLVGAVMYMMTKNVKFLVGFAIISVFIAVGMSVVGL

SEQ ID NO: 4510 - protein, 689 aa, Escherichia coli
MIHATDTATTKDGETITVTADANTATEATDGYQPLSTSTATLTDMPMLDIPQVVNTVSDQVLENQNATTLDEALYNVSNVVQTNTLGGTQDAFVRRGFGANRDGSIMTNGLRTVLPRSFNAATERVEVLKGPASTLYGILDPGGLINVVTKRPEKTFHGSVSATSSSFGGGTGQLDITGPIEGTQLAYRLTGEVQDEDYWRNFGKERSTFIAPSLTWFGDNATVTMLYSHRDYKTPFDRGTIFDLTTKQPVNVDRKIRFDEPFNITDGQSDLAQLNAEYHLNSQWTARFDYSYSQDKYGDNQARVTAYDATTGTLTRRVDATQGSTQRMHSTRADLQGNVDIAGFYNEILGGVSYEYYDLLRTDMIRCKKAKDFNIYNPVYGNTSKCTTVSASDSDQTIKQESYSAYAQDALYLTDNWIAVAGIRYQYYTQYAGKGRPFNVNTDSRDEQWTPKLGLVYKLTPSVSLFANYSQTFMPQSSIASYIGDLPPESSNAYEVGAKFELFDGITADIALFDIHKRNVLYTESIGDETIAKTAGRVRSRGVEVDLAGALTENINIIASYGYTDAKVLEDPDYAGKPLPNVPRHTGSLFLTYDIHNMPGNNTLTFGGGGHGVSRRSATNGADYYLPGYFVADAFAAYKMKLQYPVTLQLNVKNLFDKTYYTSSIATNNLGNQIGDPREVQFTVKMEF

SEQ ID NO: 4511 - protein, 208 aa, Escherichia coli; identical to SEQ ID NO: 1949

SEQ ID NO: 4512 - protein, 246 aa, Escherichia coli; identical to SEQ ID NO: 1985

SEQ ID NO: 4513 - protein, 628 aa, Escherichia coli
MAKDTITVVATGNQNTVFETPSMVSVVTNDTPWSQNAVTSAGMLKGVAGLSQTGAGRTNGQTFNLRGYDKSGVLVLVDGIRQLSDMAKSSGTYLDPALVKRIEVVRGPNSSLYGSGGLGGVVDFRTADAADFLPPGETNGLSLWGNIASGDHSTGSGLTWFGKTGKTDALLSVIMRKRGNIYQSDGERAPNKEKPAALFAKGSVGITDSNKAGASLRLYRNNTTEPGNPTQTHGDSGLRDRKTVQNDVQFWYQYAPVDNSLINVKSTLYLSDITIKTNGHNKTAEWRNNRTSGVNVVNRSHTLIFPGAHQLSYGAEYYRQQQKPEGSATLYPEGNIDFTSLYFQDEMTMKSYPVNIIVGSRYDRYKSFNPRAGELKAERLSPRAAISVSPTDWLMMYGSISSAFRAPTMAEMYRDDVHFYRKGKPNYWVPNLNLKPENNITREIGAGIQLDGLLTGNDRLQLKGGYFGTDARNYIATRVDMKRMRSYSYNVSRARIWGWDMQGNYQSDYFDWMLSYNRTESMDASSREWLGSGNPDTLISDISIPVGHGGVSAGWRAELSAAATHVKKGDPHQAGYAVHSFSLSYKPVSVKGFEASVTLDNAFNKLAMNGKGVPLSGRTVSLYTRYQW

SEQ ID NO: 4514 - protein, 250 aa, Escherichia coli; identical to SEQ ID NO: 2761

SEQ ID NO: 4515 - protein, 224 aa, Escherichia coli
MKGLLSLLIFSMVLPAHAGIVIYGTRIIYPAENKEVMVQLMNQGNRSSLLQAWIDDGDTSLPPEKIQVPFMLTPPVAKIGANSGQQVKIKIMPNKLPTNKESIFYLNVLDIPPNSPEQEGKNALKFAMQNRIKLFYRPAGIAPVNKATFKKLLVNRSGNGLVIKNDSANWVTISDVKANNVKVNYETIMIAPLESQSVNVKSNNANNWHLTIIDDHGNYISDKI

SEQ ID NO: 4516 - protein, 517 aa, Escherichia coli; identical to SEQ ID NO: 3116

SEQ ID NO: 4517 - protein, 389 aa, Escherichia coli
MTLMVDDVPVAQVLQALAEQEKLNLVVSPDVSGTVSLHLTDVPWKQALQTVVKSAGLITRQEGNILSVHSIAWQNNNIARQEAEQARAQANLPLENRSITLQYADAGELAKAGEKLLSAKGSMTVDKRTNRLLLRDNKTALSALEQWVAQMDLPVGQVELSAHIVTINEKSLRELGVKWTLADAQHAGGVGQVTTLGSDLSVATATTHVGFNIGRINGRLLDLELSALEQKQQLDIIASPRLLASHLQPASIKQGSEIPYQVSSGESGATSVEFKEAVLGMEVTPTVLQKGRIRLKLHISQNVPGQVLQQADGEVLAIDKQEIETQVEVKSGETLALGGIFTRKNKSGQDSVPLLGDIPWFGQLFRHDGKEDERRELVVFITPRLVSSE

SEQ ID NO: 4518 - protein, 673 aa, Escherichia coli; identical to SEQ ID NO: 2919

SEQ ID NO: 4519 - protein, 641 aa, Escherichia coli; identical to SEQ ID NO: 3774

SEQ ID NO: 4520 - protein, 746 aa, Escherichia coli; identical to SEQ ID NO: 4083

SEQ ID NO: 4521 - protein, 671 aa, Escherichia coli
VSCLTDWHYPGVGAFFAGENGNSTTGDAIYMRGADTSNSIYIDGIRDIGSVSRDTFNTEQVEVIKGPSGTDYGRSAPTGSINMISKQPRNDSGIDASASIGSAWFRRGTLDVNQVIGDTTAVRLNVMGEKTHDAGRDKVKNERYGVAPSVAFGLGTANRLYLNYLHVTQHNTPDGGIPTIGLPGYSAPSAGTAALNHSGKVDTHNFYGTDSDYDDSTTDTATMRFEHDINDNTTIRNTTRWSRVKQDYLMTAIMGGASNITQPTSDVNSWTWSRTANTKDVSNKILTNQTNLTSTFYTGSIGHDVSTGVEFTRETQTNYGVNPVTLPAVNIYHPDSSIHPGGLTRNGANANGQTDTFAIYAFDTLQITRDFELNGGIRLDNYHTEYDSATACGGSGRGAITCPTGVAKGSPVTTVDTAKSGNLMNWKAGALYHLTENGNVYINYAVSQQPPGGNNFALAQSGSGNSANRTDFKPQKANTSEIGTKWQVLDKRLLLTAALFRTDIENEVEQNDDGTYSQYGKKRVEGYEISVAGNITPAWQVIGGYTQQKATIKNGKDVAQDGSSSLPYTPEHAFTLWSQYQATDDISVGAGARYIGSMHKGSDGAVGTPAFTEGYWVADAKLGYRVNRNLDFQLNVYNLFDTDYVASINKSGYRYHPGEPRTFLLTANMHF

SEQ ID NO: 4522 - protein, 199 aa, Escherichia coli; identical to SEQ ID NO: 3190

SEQ ID NO: 4523 - protein, 431 aa, Escherichia coli; identical to SEQ ID NO: 3408

SEQ ID NO: 4524 - protein, 274 aa, Escherichia coli; identical to SEQ ID NO: 2309

SEQ ID NO: 4525 - protein, 696 aa, Escherichia coli
MRITTLASVVIPCLGFSASSIAAAEDVMIVSASGYEKKLTNAAASVSVISQEELQSSQYHDLAEALRSVEGVDVESGTGKTGGLEISIRGMPASYTLILIDGVRQGGSSDVTPNGFSAMNTGFMPPLAAIERIEVIRGPMSTLYGSDAMGGVVNIITRKNADKWLSSVNAGLNLQESNKWGNSSQFNFWSSGPLVDDSVSLQVRGSTQQRQGSSVTSLSDTAATRIPYPTESQNYNLGARLDWKASEQDVLWFDMDTTRQRYDNRDGQLGSLTGGYDRTLRYERNKISAGYDHTFTFGTWKSYLNWNETENKGRELVRSVLKRDKWGLAGQPRELKESNLILNSLLLTPLGESHLVTVGGEFQSSSMKDGVVLASTGETFRQKSWSVFAEDEWHLTDALALTVGSRYEHHEQFGGHFSPRAYLVWDVADAWTLKGGVTTGYKAPRMGQLHKGISGVSGQGKTNLLGNPDLKPEESVSYEAGVYYDNPAGLNANVTGFMTDFSNKIVSYSINDNTNSYVNSGKARLHGVEFAGTLPLWSEDVTLSLNYTWTRSEQRDGDNKGAPLSYTPEHMVNAKLNWQITEEVASWLGARYRGKTPRFTQNYSSLSAVQKKVYDEKGEYLKAWTVVDAGLSWKMTDALTLNAAVNNLLNKDYSDVSLYSAGKSTLYAGDYFQTGSSTTGYVIPERNYWMSLNYQF

SEQ ID NO: 4526 - protein, 111 aa, Escherichia coli; identical to SEQ ID NO: 3153

SEQ ID NO: 4527 - protein, 729 aa, Escherichia coli; identical to SEQ ID NO: 2074

SEQ ID NO: 4528 - protein, 162 aa, Escherichia coli; identical to SEQ ID NO: 1973

SEQ ID NO: 4529 - protein, 712 aa, Escherichia coli
MSVYAQAAVEPKEDTITVTAAPAPQESAWGPAATIAARQSATGTKTDTPIQKVPQSISVVTAEEMALHQPKSVKEALSYTPGVSVGTRGASNTYDHLIIRGFAAEGQSQNNYLNGLKLQGNFYNDAVIDPYMLERAEIMRGPVSVLYGKSSPGGLLNMVSKRPTTEPLKEVQFKAGTDSLFQTGFDFSDSLDDDGVYSYRLTGLARSANAQQKGSEEQRYAIAPAFTWRPDDKTNFTFLSYFQNEPETGYYGWLPKEGTVEPLPNGKRLPTDFNEGAKNNTYSRNEKMVGYSFDHEFNDTFTVRQNLRFAENKTSQNSVYGYGVCSDPANAYSKQCAALAPADKGHYLARKYVVDDEKLQNFSVDTQLQSKFATGDIDHTLLTGVDFMRMRNDINAWFGYDDSVPLLNLYNPVNTDFDFNAKDPANSGPYRILNKQKQTGVYVQDQAQWDKVLVTLGGRYDWADQESLNRVAGTTDKRDDKQFTWRGGVNYLFDNGVTPYFSYSESFEPSSQVGKDGNIFAPSKGKQYEVGVKYVPEDRPIVVTGAVYNLTKTNNLMADPEGSFFSVEGGEIRARGVEIEAKAALSASVNVVGSYTYTDAEYTTDTTYKGNTPAQVPKHMASLWADYTFFDGPLSGLTLGTGGRYTGSSYGDPANSFKVGSYTVVDALVRYDLARVGMAGSNVALHVNNLFDREYVASCFNTYGCFWGAERQ

SEQ ID NO: 4530 - protein, 351 aa, Escherichia coli
MKKSTLALVVMGIVASASVQAAEIYNKDGNKLDVYGKVKAMHYMSDNASKDGDQSYIRFGFKGETQINDQLTGYGRWEAEFAGNKAESDTAQQKTRLAFAGLKYKDLGSFDYGRNLGALYDVEAWTDMFPEFGGDSSAQTDNFMTKRASGLATYRNTDFFGVIDGLNLTLQYQGKNENRDVKKQNGDGFGTSLTYDFGGSDFSISGAYTNSDRTNEQNLQSRGTGKRAEAWATGLKYDANNIYLATFYSETRKMTPITGGFANKTQNFEAVAQYQFDFGLRPSLGYVLSKGKDIEGIGDEDLVNYIDVGATYYFNKNMSAFVDYKINQLDSDNKLNINNDDIVAVGMTYQF

SEQ ID NO: 4531 - protein, 229 aa, Escherichia coli; identical to SEQ ID NO: 3984

SEQ ID NO: 4532 - protein, 213 aa, Escherichia coli; identical to SEQ ID NO: 2232

SEQ ID NO: 4533 - protein, 367 aa, Escherichia coli; identical to SEQ ID NO: 2433

SEQ ID NO: 4534 - protein, 654 aa, Escherichia coli
MDCVMKGLNKITCCLLAALLMPCAGHAENEQYGANFNNADIRQFVEIVGQHLGKTILIDPSVQGTISVRSNDTFSQQEYYQFFLSILDLYGYSVITLDNGFLKVVRSANVKTSPGMIADSSRPGVGDELVTRIVPLENVPARDLAPLLRQMMDAGSVGNVVHYEPSNVLILTGRASTINKLIEVIKRVDVIGTEKQQIIHLEYASAEDLAEILNQLISESHGKSQMPALLSAKIVADKRTNSLIISGPEKARQRITSLLKSLDVEESEEGNTRVYYLKYAKATNLVEVLTGVSEKLKDEKGNARKPSSSGAMDNVAITADEQTNSLVITADQSVQEKLATVIARLDIRRAQVLVEAIIVEVQDGNGLNLGVQWANKNVGAQQFTNTGLPIFNAAQGVADYKKNGGLTSANPAWDMFSAYNGMAAGFFNGDWGVLLTALASNNKNDILATPSIVTLDNKLASFNVGQDVPVLSGSQTTSGDNVFNTVERKTVGTKLKVTPQVNEGDAVLLEIEQEVSSVDSSSNSTLGPTFNTRTIQNAVLVKTGETVVLGGLLDDFSKEQVSKVPLLGDIPLVGQLFRYTSTERAKRNLMVFIRPTIIRDDDVYRSLSKEKYTRYRQEQQQRIDGKSKALVGSEDLPVLDENTFNSHAPAPSSR

SEQ ID NO: 4535 - protein, 686 aa, Escherichia coli
MFWRDMTLSVWRKKTTGLKTKKRLLALVLAAALCSSPVWAEEATFTANFKDTDLKSFIETVGANLNKTIIMGPGVQGKVSIRTMTPLNERQYYQLFLNLLEAQGYAVVPMENDVLKVVKSSAAKVEPLPLVGEGSDNYAGDEMVTKVVPVRNVSVRELAPILRQMIDSAGSGNVVNYDPSNVIMLTGRASVVERLTEVIQRVDHAGNRTEEVIPLDNASASEIARVLESLTKNSGENQPATLKSQIVADERTNSVIVSGDPATRDKMRRLIRRLDSEMERSGNSQVFYLKYSKAEDLVDVLKQVSGTLTAAKEEAEGTVGSGREVVSIAASKHSNALIVTAPQDIMQSLQSVIEQLDIRRAQVHVEALIVEVAEGSNINFGVQWASKDAGLMQFANGTQIPIGTLGAAISQAKPQKGSTVISENGATTINPDTNGDLSTLAQLLSGFSGTAVGVVKGDWMALVQAVKNDSSSNVLSTPSITTLDNQEAFFMVGQDVPVLTGSTVGSNNSNPFNTVERKKVGIMLKVTPQINEGNAVQMVIEQEVSKVEGQTSLDVVFGERKLKTTVLANDGELIVLGGLMDDQAGESVAKVPLLGDIPLIGNLFKSTADKKEKRNLMVFIRPTILRDGMAADGVSQRKYNYMRAEQIYRDEQGLSLMPHTAQPVLPAQNQALPPEVRAFLNAGRTR

SEQ ID NO: 4536 - protein, 784 aa, Escherichia coli; identical to SEQ ID NO: 2244

SEQ ID NO: 4537 - protein, 360 aa, Escherichia coli
MKKLTVAISAVAASVLMAMSAQAAEIYNKDSNKLDLYGKVNAKHYFSSNDADDGDTTYARLGFKGETQINDQLTGFGQWEYEFKGNRAESQGSSKDKTRLAFAGLKFGDYGSIDYGRNYGVAYDIGAWTDVLPEFGGDTWTQTDVFMTGRTTGVATYRNNDFFGLVDGLNFAAQYQGKNDRTDVTEANGDGFGFSATYEYEGFGVGATYAKSDRTDGQVAYGKSKFNASGKNAEVWAAGLKYDANNIYLATTYSETQNMTVFGNNHIANKAQNFEAVAQYQFDFGLRPSVAYLQSKGKDLGVHGDRDLVKYVDVGATYYFNKNMSTFVDYKINLIDDSKFTKTAGIDTDDIVAVGLVYQF

SEQ ID NO: 4538 - protein, 831 aa, Escherichia coli
MQELPMLRMPPLASAIVALLIGIEAYAAEETFDTHFMIGGMKDQQVSNIRLEDNQPLPGQYDIDIYVNKQWRGKYEIIVKDNPQETCLSREMIKRLGINTDSFASGKQCLTFKQLIQGGSYTWDIGVFRLDFSVPQAWVEELESGYVPPENWERGINAFYTSYYMSQYYSDYKASGNSKSTYVRFNSGLNLLGWQLHSDASFSKTNNNPGVWKSNTLYLERGFAQLLGTLRVGDMYTSSDIFDSVRFSGVRLFRDMQMLPNSKQNFTPRVQGIAQSNALVTIEQNGFVVYQKEVPPGPFAITDLQLAGGGADLDVSVKEADGSVTTYLVPYAAVPNMLQPGVSKYDFAAGRSHIEGASKQSDFVQVGHQYGFNNLLTLYGGSMVANNYYAFTLGTGWNTRIGAISVDATKSHSKQDNGDVFDGQSYQIAYNKFVSQTSTRFGLAAWRYSSRDYRTFNDHVWANNKDNYRRDENDIYDIADYYQNDFGRKNSFSANMSQSLPEGWGSVSLSTLWRDYWGRSGSSKDYQLSYSNNLRRISYTLAASHAYDENHHEEKRFNIFISIPFDWGDDVTTPRRQIYMSNSTTFDDQGVASNNTGLSGTVGSRDQFNYGVNLSYQYQGNETTAGANLTWNAPVATVNGSYSQSSAYRQAGASVSGGIVAWSGGVNLANRLSETFAVMNAPGIKDAYVNGQKYRTTNRNGVVVYDGMTPYRENYLMLDVSQSDSEAELRGNRKIAAPYRGAVVLVNFDTDQRKPWFIKALRADGQPLTFGYEVNDIHGHNIGVVGQGSQLFIRTNEVPPSVNVAIDKQQGLSCTITFGKEIDESRNYICQ

SEQ ID NO: 4539 - protein, 825 aa, Escherichia coli
MGKDASNIDLSRYTEGNPTLPGIYDVSVYVNDQPIMSQSIAFAVIEGKKNAQACITQKNLLQFHISSPDKNSEKAILLKRDDDLGDCLNLAEMIPQSSIRYDVNDQRLDIDVPQAWIMKNYQNYVDPSLWENGINAAMLSYNLNGYHSESPGRTNDSIYAAFNGGINLGAWRLRASGNYNWMTNVHSDYDFQNRYLQRDLASLRSQLVIGESYTTGETFDSVRIRGIRLYSDSRMLPPVLASFAPIIHGVANTNAKVTVMQNGYKIYETTVPPGAFAIDDLSPSGYGSDLIVTIEEADGTKRTFSQPFSSVVQMLRPGVGRWDISAGQVLKDSIQDEPNLFQASYYYGLNNYLTGYTGIQLTDNNYTAGLLGLGMNTPVGAFSVDVTHSNVSIPDDKTYQGQSYRISWNKLFENTSTSLNIAAYRYSTQHYLGLNDALTLIDEVEHPEQDLEPKSMRNYSRMKNQVTVSINQPLKFEKKDYGSFYLSGSWSDYWASGQNSTNYSIGYSNSASWGSYSISAQRSLNEDGQTDDSIYLSFTIPIENLLGTEHRSSGFQSIDTQLNSDFKGNNQLNISSSGYSDTNRISYSVNTGYMMNKSSDDLSYIGGYASYESPWGTLSGSASASSDNSRQFSLNTDGGFVLHSGGLTFSNDSFSDSDTLAVIQAPGAKGARINYGNSTVDRWGYGVTSALSPYHENRIALDINDLENDVELKSTSTVAVPRQGAVVFADFETVQGQSAIMNIVRSDGKNIPFAADIYDEQNNIIGNVGQGGQAFVRGIGQEGNIRITWIEEGKPVSCFAHYQQNTTSEKIAQSIILNGLRCQIQ

SEQ ID NO: 4540 - protein, 161 aa, Escherichia coli; identical to SEQ ID NO: 2582

SEQ ID NO: 4541 - protein, 781 aa, Escherichia coli
MAALGLKEGIAKSLQWTHNDECLKPGQLDGMEVENDLSQSALLLTVPQAYLEYTSSDWDPPSRWDDGIPGLIADYSLNAQTRHQEQGGEDSHDISGNGTVGANLGAWRFRADWQSDYQHTRSNDDDDDSSNSTTSKNWDWSRYYAWRALPSLKAKLSLGEDYLNSDIFDGFNYIGSSVSTDDQMLPPNLRGYAPDVSGVAHSSAKVTISQMGRVLYETQVPAGPFRIQDIGDSVSGTLHVRVEEQNGQVQEYDVTTASMPFLTRQGQVRYKVMMGRPEDWNHKTEGGFFSGGEASWGGADGWSLYGGALADKHYQSAAMGVGRDLAQFGALAFDVTHSHVNLDHDSAYGKGKLDGNSFRVSYAKDFDELNSRVTFAGYRFSEKNFMTMSEYLDANQSDMARTGNDKEMYTITYNQNFAAAGVSIYLNYSHRTYWDRPEQTNYNLMFSHYFNMGSIRNMSISVTGYRYEYDDNADKGMYLSMSIPWSDSSTVTYNGSYGSGSDSSQVGYFKRVDDATHYQVNVGTSEQHGSVDGYLSHDGSLAKVDLSANYHEGEYRSAGIALQGGATLTAHGGALHRTQNMGGTRLLIDADGIANVPVESNGAPVYTNMFGKAVVADINNYYRNQAYIDLNNLPEDAEATQSVVQATLTEGAIGYRKFKVISGQKAMAVLRLRDGSYPPFGAEVKNDEQQQVGIVDDEGNVYLAGVNAGEHMMVFWEGSAQCEIVLPKPLPADLFSGLLLPCEQKGTAAPDSSAPEIKPVIQDQTRQVTPTEAPTSISATQ

SEQ ID NO: 4542 - protein, 845 aa, Escherichia coli
CAFAAQAPLSSAELYFNPRFLADDPQAVADLSRFENGQELPPGTYRVDIYLNNGYMATRDVTFNTGDSEQGIVPCLTRAQLASMGLNTASISGMNLLADDACVPLTDMIHDATAHLDVGQQRLNLTIPQAFMSNRARGYIPPELWDPGINAGLLNYNFSGNSVQNRIGGNSHYAYLNLQSGLNIGAWRLRDNTTWSYNSSDRSSGSKNKWQHINTWLERDIIPLRSRLTLGDGYTQGDIFDGINFRGAQLASDDNMLPDSQRGFAPVIHGIARGTAQVTIKQNGYDIYNSTVPPGPFTINDIYAAGNSGDLQVTIKEADGSTQIFTVPYSSVPLLQREGHTRYSITAGEYRSGNAQQEKPRFFQSTLLHGLPAGWTIYGGTQLADRYRAFNFGIGKNMGALGALSVDMTQANSTLPDDSQHDGQSVRFLYNKSLNESGTNIQLVGYRYSTSGYFNFADTTYSRMNGYNIETQDGVIQVKPKFTDYYNLAYNKRGKLQLTVTQQLGRTSTLYLSGSHQTYWGTSNVDEQFQAGLNTAFEDINWTLSYSLTKNAWQKGRDQMLALNVNIPFSHWLRSDSKSQWRHASASYSMSHDLNGRMTNLAGIYGTLLEDNDLSYSVQTGYAGGGDGNSGSTGYATLNYRGGYGNANIGYSHSDDIKQLYYGVSGGVLAHANGVTLGQPLNDTVVLVKAPGAKDAKVENQTGVRTDWRGYAVLPYATEYRENRVALDTNTLADNVDLDNAVANVVPTRGAIVRAEFKARVGIKLLMTLTHNNKPLPFGAMVTSESSQSSGIVADNGQVYLSGMPLAGKVQVKWGEEENAHCVANYQLPPESQQQLLTQLSAECR

SEQ ID NO: 4543 - protein, 229 aa, Escherichia coli
MANGNASIKGYNCNVSQGLVIIMPLPDFRLIRLLPLAALVLTACSVTTPKGPGKSPDSPQWRQHQQDVRNLNQYQTRGAFAYISDQQKVYARFFWQQTGQDRYRLLLTNPLGSTELELNAQPGNVQLVDNKGQRYTSDDAEEMIGKLTGMPIPLNSLRQWILGLPGDATDYKLDDQYRLSEITYSQNGKNWKVVYGGYDTKTQPAMPANMELTDGGQRIKLKMDNWIVK

SEQ ID NO: 4544 - protein, 883 aa, Escherichia coli
MTAFRAAFKAYRMHQVLILPRFARLTFALGLATAVFPVDAEYYFNPRFLSNDLAESVDLSAFTKGREAPPGTYRVDIYLNDEFMASRDITFIADDNNADLIPCLSTDLLVSLGIKKSALLDNKEHSADKHVPDNSACTPLQDRLADASSEFDVGQQHLSLSVPQIYVGRMARGYVSPDLWEEGINAGLLNYSFNGNSINNRSNHNAGKSNYAYLNLQSGINIGSWRLRDNSTWSYNSGSSNSSDSNKWQHINTSAERDIIPLRSRLTVGDSYTDGDIFDSVNFRGLKINSTEAMLPDSQHGFAPVIHGIARGTAQVSVKQNGYDVYQTTVPPGPFTIDDINSAANGGNLQVTIKEADGSIQTLYVPYSSVPVLQRAGYTRYALAMGEYRSGNNLQSTPKFVQASLMHGLKGNWTPYGGMQIAEDYQAFNLGIGKDLGLFGAFSFDITQANTTLADDTRHSGQSVKSVYSKSFYQTGTNIQVAGYRYSTQGFYNLSDSAYSRMSGYTVKPPTGDTSEQTLFIDYFNLFYSKRGQEQISISQQLGNYGTTFFSASRQSYWNTSRSDQQISFGLNVPFGDITTSLNYSYSNNIWQNDRDHLLAFTLNVPFSHWMRTDSQSAFHNSNASYSMSNDLKGGMTNLSGVYGTLLPDNNLNYSVQVGNTQGGNTSSGTSGYSSLNYRGAYGNTNVGYSRSGDSSQIYYGMSGGIIAHADGITFGQPLGDTMVLVKAPGADNVKIENQTGIHTDWRGYAILPFATEYRENRVALNANSLADNVELDETVVTVIPTHGAIARATFNAQIGGKVLMTLKYGNKSVPFGAIVTHGENKNGSIVAENGQVYLTGLPQSGKLQVSWGKDKNSNCIVDYKLPVVSPGTLLNQQTAICR

SEQ ID NO: 4545 - protein, 840 aa, Escherichia coli
MNNKNTFSRDKLSHAIKNALSGVVCSLLFVLPVHAVEFNVDMIDAEDRENIDISRFEKKGYIPPGRYLVRVQINKNMLPQTLILEWVKADNESGSLLCLTKENLTNFGLNTEFIESLQNIAGSECLDLSQRQELTTRLDKATMILSLSVPQAWLKYQATNWTPPEFWDTGIAGFILDYNVYASQYAPHHGDSTQNVSSYGTLGFNLGAWRLRSDYQYNQNFADGRSVNRDSEFARTYLFRPIPSWSSKFTMGQYDLSSNLYDTFHFTGASLESDESMLPPDLQGYAPQITGIAQTNAKVTVAQNGRVLYQTTVAPGPFTISDLGQSFQGLLDVTVEEEDGRTSTFQVGSASIPYLTRKGQVRYKTSLGKPTSVGHNDINNPFFWTAEASWGWLNNVSLYGGGMFTADDYQAITTGIGFNLNQFGSLSFDVTGADASLQQQNSGNLRGYSYRFNYAKHFESTGSQITFAGYRFSDKDYVSMSEYLSSRNGDESIDNEKESYVISLNQYFETLELNSYLNVTRNTYWDSASNTNYSVSVSKNFDIGDFKGISASLAVSRIRWDDDEENQYYFSFSLPLQQNRNISYSMQRTGSSNTSQMISWYDSSDRNNIWNISASATDDNIRDGEPTLRGSYQHYSPWGRLNINGSVQPNQYNSVTAGWYGSLTATRHGIALHDYSYGDNARMMVDTDGISGIEINSNRTVTNGLGIAVIPSLSNYTTSMLRVNNNDLPEGVDVENSVIRTTLTQGAIGYAKLNATTGYQIVGVIRQENGRFPPLGVNVTDKATGKDVGLVAEDGFVYLSGIQENSTLHLTWGDNTCEVTPPNQSNISESAIILPCKTVK

SEQ ID NO: 4546 - protein, 260 aa, Escherichia coli
MVRWFFQQTHNNKFQLTDYLGKNMRKITQALSAVCLLFALNSSAVALASSPSPLNPGTNVAKLAEQAPIHWVSVAQIENSLAGRPPMAVGFDIDDTVLFSSPGFWRGKKTFSPESEDYLKNPVFWEKMNNGWDEFSIPKEVARQLIDMHVRRGDAIFFVTGRSPTKTETVSKTLADNFHIPATNMNPVIFAGDKPGQNTKSQWLQDKNIRIFYGDSDNDITAARDVGARGIRILRASNSTYKPLPQAGAFGEEVIVNSEY

SEQ ID NO: 4547 - protein, 368 aa, Escherichia coli
MNKTITALAIMMASFAANASVLPETPVPFKSGTGAIDNDTVYIGLGSAGTAWYKLDTQAKDKKWTALAAFPGGPRDQATSVFIDGDLYVFGGIGKNSKGLTQVFNDVHKYNPKTNSWVKLMSHAPMGMAGHVTFVHNGKAYVTGGVNQNIFNGYFEDLNEAGKDSTAIDKINAHYFDKKAEDYFFNKFLLSFDPSTQQWSYAGESPWYGTAGAAVVNKGDKTWLINGEAKPGLRTDAVFELDFTGDNLKWNRLAPVSSPDGVAGGFAGISNDSLIFAGGAGFKGSRENYQNGKNYAHEGLKKSYSTDIHLWHNGKWDKSGELSQGRAYGVSLPWNNSLLIIGGESAGGKAVTDSVLISVKDNKVTVQN

SEQ ID NO: 4548 - protein, 900 aa, Escherichia coli
MKLNIFTKSMIGMGLVCSALPALAMEAWNNQQGGNKYQVIFDGKIYENAWWVSSTNCPGKAKANDATNPWRLKRTATAAEISQFGNTLSCEKSGSSSSSTSNTPASNTPANGASATPAQGTVPSNSSVVAWNKQQGGQTWYVVFNGAVYKNAWWVASSNCPGDAKGNDASNPWRYVRAATATEISETSNPQSCTSAPQPAPDVKPAPDVKPAPDVQPAPADKSNDNYAVVAWKGQEGSSTWYVIYNGGIYKNAWWVGAANCPGDAKENDASNPWRYVRAATATEITQYGNPASCSVKPDNNGGAVTPVDPTPETPETPVTPTPDNNEPSTPADSSNDYSLQAWSGQEGSEIYHVIFNGNVYQNAWWVGSEDCPRGTSVENSNNPWRLVRTATAAEMSQYGNPTTCEIDNGGVIIADGFQASKAYSANSIVDYNDAHYKTSVDQDAWGFVPGGDNPWKKYEPAKAWSASTVYVKGDRVVVDGQAYEALFWTQSDNPALIANQNATGSNSRPWKPLGKTQSYSNEELNNAPQFNPETLYASDTLIRFNGENYISQSKVQKVSPSDSNPWRVFVDWTGTKERVGTPKKAWPKHVYAPYVDFTLNTIPDLAALAKSHNVNHFTLAFVVSKDANTCLPTWGTAYGMQNYAQYSKIKALREAGGDVMLSIGGANNAPLAASCKNVDDLMQHYYDIVDNLNLRVLDFDIEGTWVADQASIERRNLAVKKVQDKWKSEGKDIAIWYTLPILPTGLTPEGMNVLSDAKAKGVELAGVNVMTMDYGNAICQSANTEGQNIHGKCATSAIANLHSQLKGLHPNKSDAEIDAMMGTTPMVGVNDVQGEVFYLSDARLVMQDAQKRNLGMVGIWSIARDLPGGTNLSPEFHGLTKEQAPKYAFSEIFAPFTKQ

SEQ ID NO: 4549 - protein, 266 aa, Escherichia coli; identical to SEQ ID NO: 3745

SEQ ID NO: 4550 - protein, 836 aa, Escherichia coli
MKDRIPFAVNNITCVILLSLFCNAASAVEFNTDVLDAADKKNIDFTRFSEAGYVLPGQYLLDVIVNGQSISPASLQISFVEPALSGDKAEKKLPQACLTSDMVRLMGLTAESLDKVVYWHDGQCADFHGLPGVDIRPDTGAGVLRINMPQAWLEYSDATWLPPSRWDDGIPGLMLDYNLNGTVSRNYQGGDSHQFSYNGTVGGNLGPWRLRADYQGSQEQSRYNGEKTTNRNFTWSRFYLFRAIPRWRANLTLGENNINSDIFRSWSYTGASLESDDRMLPPRLRGYAPQITGIAETNARVVVSQQGRVLYDSMVPAGPFSIQDLDSSVRGRLDVEVIEQNGRKKTFQVDTASVPYLTRPGQVRYKLVSGRSRGYGHETEGPVFATGEASWGLSNQWSLYGGAVLAGDYNALAAGAGWDLGVPGTLSADITQSVARIEGERTFQGKSWRLSYSKRFDNADADITFAGYRFSERNYMTMEQYLNARYRNDYSSREKEMYTVTLNKNVADWNTSFNLQYSRQTYWDIRKTDYYTVSVNRYFNVFGLQGVAVGLAASRSKYLGRDNDSAYLRISVPLGTGTASYSGSMSNDRYVNMAGYTDTFNDGLDSYSLNAGLNSGGGLTSQRQINAYYSHRSPLANLSANIASLQKGYTSFGVSASGGATITGKGAALHAGGMSGGTRLLVDTDGVGGVPVDGGQVVTNRWGTGVVTDISSYYRNTTSVDLKRLPDDVEATRSVVESALTEGAIGYRKFSVLKGKRLFAILRLADGSQPPFGASVTSEKGRELGMVADEGLAWLSGVTPGETLSVNWDGKIQCQVNVPETAISDQQLLLPCTPQK

SEQ ID NO: 4551 - protein, 122 aa, Escherichia coli; identical to SEQ ID NO: 2915

SEQ ID NO: 4552 - protein, 111 aa, Escherichia coli; identical to SEQ ID NO: 3419

SEQ ID NO: 4553 - protein, 721 aa, Escherichia coli
MKTQITFAALLPALASFIPLHAHASSTSEDEMIVTGNTAADTTDSAAGAGFKTNDIDVGPLGTKSWIETPYSSTTVTKEMIENQQAQSVSEMLKYSPSTQMQARGGMDVGRPQSRGMQGCVVANSRLDGLNIVSTTAFPVEMLERMDVLNSLTGALYGPASPAGQFNFVAKRPTEETLRKVTLGYQSRSAFTGHADLGGHFDENKRFGYRVNLLDQEGEGNVDDSTLRRKLVSVALDWNIQPGTQLQLDASHYEFIQKGYVGSFNYGPNVKLPSAPNPKDKNLALSTAGNDLTTDTISTRLIHYFNDDWSMNAGVGWQQADRAMRSVSSKILNNQGDISRSMKDSTAAGRFRVLSNTAGLNGHIDTGSIGHDLSLSTTGYVWSLYSAKGTGSSYSWGTTNMYHPDAIDEQGDGKIRTGGPRYRSSVNTQQSVTLGDTVTFTPQWSAMFYLSQSWLQTKNYDKHGNQTNQVDENGLSPNAALMYKITPNTMAYVSYADSLEQGGTAPTDESVKNAGQTLNPYRSKQYEVGLKSDIGEMNLGAALFRLERPFAYLDTDNVYKEQGNQVNNGLELTAAGNVWQGLNIYSGVTFLDPKLKDTANASTSNKQVVGVPKVQANLLAEYSLPSIPEWVYSANVHYTGKRAANDTNTSYASSYTTWDLGTRYTTKVSNVPTTFRVVVNNVFDKHYWASIFPSGTDGDNGSPSAFIGGGREVRASVTFDF

SEQ ID NO: 4554 - protein, 362 aa, Escherichia coli
MMKRNILAVIVPALLVAGTANAAEIYNKDGNKVDLYGKAVGLHYFSKGNGENSYGGNGDMTYARLGFKGETQINSDLTGYGQWEYNFQGNNSEGADAQTGNKTRLAFAGLKYADVGSFDYGRNYGVVYDALGYTDMLPEFGGDTAYSDDFFVGRVGGVATYRNSNFFGLVDGLNFAVQYLGKNERDTARRSNGDGVGGSISYEYEGFGIVGAYGAADRTNLQEESSLGKGKKAEQWATGLKYDANNIYLAANYGETRNATPITNKFTNTSGFANKTQDVLLVAQYQFDFGLRPSIAYTKSKAKDVEGIGDVDLVNYFEVGATYYFNKNMSTYVDYIINQIDSDNKLGVGSDDTVAVGIVYQF

SEQ ID NO: 4555 - protein, 204 aa, Escherichia coli; identical to SEQ ID NO: 2957

SEQ ID NO: 4556 - protein, 250 aa, Escherichia coli
MIKVVIVLFSLLFSTAQAGLVIGGTRFAYPENQSSISVELKNTSDRDMLVKVAVSPDDARQLTGTVESLPSYSETVFIATPPLFVLKPDKNTKIRINRVGGSLSADRESLFILNVAALPTLENSHSVKTDNQLQIAVRNRMKIFYRPSNLSEDPNMSYQKLRWARKNEIVTVYNPGPRYVTLYNLHVDGKVIDGGMVAPFSHRQQSWCKSQGVCEIAWQTLDVYNNVLPAWKVKMNLLQMDVSGLQVKTD

SEQ ID NO: 4557 - protein, 729 aa, Escherichia coli
MLSTQFNRDNQHQAIIKPSLLAGCIALALLPSAAFAAPVTEETVIVEGSATAPDDGENDYNVTSTSAGTKMQMTQRDIPQSVTIVSQQRMEDQQLQTLGEVMENTLGISKSQADSDRALYYSRGFQIDNYMVDGIPTYFESRWNLGDALSDMALFERVEVVRGATGLMTGTGNPSAAINMVRKHATSREFKGDVSAEYGSWNKERYVADLQSPLTEDGKIRARIVGGYQNNDSWLDRYNSEKTFFSGIVDADLGDLTMLSAGYEYQRIDVNSPTWGGLPRWNTDGSSNSYDRARSTAPDWAYNDKEINKVFMTLKQRFADTWQATLNATHSEVEFDSKMMYVDAYVNKADGMLVGPYSNYGPGFDYVGGTGWNSGKRKVDALDLFADGSYELFGRQHNLMFGGSYSKQNNRYFSSWANIFPDEIGSFYNFNGNFPQTDWSPQSLAQDDTTHMKSLYAATRVTLADPLHLILGARYTNWRVDTLTYSMEKNHTTPYAGLVFDINDNWSTYASYTSIFQPQNDRDSSGKYLTPITGNNYELGLKSDWMNSRLTTTLAIFRIEQDNVAQSTGTPIPGSNGETAYKAVDGTVSKGVEFELNGAITDNWQLTFGATRYIAEDNEGNAVNPNLPRTTVKMFTSYRLPVMPELTVGGGVNWQNRVYTDTVTPYGTFRAEQGSYALVDLFTRYQVTKNFSLQGNVNNLFDKTYDTNVEGSIVYGAPRNFSITGTYQF

SEQ ID NO: 4558 - protein, 191 aa, Escherichia coli; identical to SEQ ID NO: 2727

SEQ ID NO: 4559 - protein, 331 aa, Escherichia coli
MKKPVVIGLAVVVLAAVVAGGYWWYQSRQDNGLTLYGNVDIRTVNLSFRVGGRVESLAVDEGDAIKAGQVLGELDHKPYEIALMQAKAGVSVAQAQYDLMLAGYRDEEIAQAAAAVKQAQAAYDYAQNFYNRQQGLWKSRTISANDLENARSSRDQAQATLKSAQDKLRQYRSGNREQDIAQAKASLEQAQAQLAQAELNLQDSTLIAPSDGTLLTRAVEPGTVLNEGGTVFTVSLTRPVWVRAYVDERNLDQAQPGRKVLLYTDGRPNKPYHGQIGFVSPTAEFTPKTVETPDLRTDLVYRLRIVVTDADDALRQGMPVTVQFGDEAGHE

SEQ ID NO: 4560 - protein, 656 aa, Escherichia coli
MRLKKRYLCTVLTLAFTQQAVAAQESDTLTVWSSPVSSTTTTVLDQPTMKALDKQNVAQALSVVPGVVLQKSGSRNEEQVKVRGFDSRQVPVYFDGVPIYVPYDGNLDLARILTNNLGAVEVSKGYSSLLQGPNQMGGAINITTQKPTKPLEASLGYRQGWSRSQDNAYDMHASFAASSDLGYLQVSGSQLKQDFLGLPHGVNNDIAGKHGKMINSSADDKRGIVKLGFTPRENDEYTLTYIKQDGEKDNPPYSGNSGQKSRYWQWPEYDKESFYYQGTTQLNDRFTLKSRLYRDTFENTLMMYNSLADLKNKKGSYSHYSDYSDGAGLQLAADVRENDLLSFAVNWKDDVHREKGAPHAAYDRYEDRTWSLASEYQWAAADNVDVVAGISYDWRDSVEAKKHEKDGSITHYDDNNQSAFNWQVMGKYHFANEDTLALSYYDRTRFPTLKERYTTSKPAYNQIAIVNPQLKPERARGVDLTWNGAFTHDWGFEVSVYYNRVSDAILSHNIDADTIQNQNSGTVDYSGLDAGIKGKISNILDVGLSYALIHADAKRKDIGKITDLPTQTMTAWMTLKPWEPLSVTLSEEARSSSYSNSDGSQKAAGFAVTHIRADYTLGHGFSVNASVNNLFDTKYAYSEGFIEEGRNFWAGIEYTF

SEQ ID NO: 4561 - protein, 431 aa, Escherichia coli; identical to SEQ ID NO: 3408

SEQ ID NO: 4562 - protein, 242 aa, Escherichia coli
MLVSTALMALLTTASLTAHASVTPDRTRLVFNESDKSISVTLRNNTEKLPYLAQSWLEDEKGNKITSPLAVLPPVQRIDAMMNGQVKIQALPDIHTLPSDRESLFYYNVREIPPKSGKANTLQIALQTRIKLFWRPKALEKIDMRRPWQFKVTLTRSGQDYTVNNPTPYHVIISDASTQKKGLTAAGFKPLVMPPKTSQPLKAKMASAPVLTYINDYGARMPLIFRCEGNTCKVDEDQSSKG

SEQ ID NO: 4563 - protein, 241 aa, Escherichia coli; identical to SEQ ID NO: 2922

SEQ ID NO: 4564 - protein, 121 aa, Escherichia coli; identical to SEQ ID NO: 2522

SEQ ID NO: 4565 - protein, 446 aa, Escherichia coli; identical to SEQ ID NO: 2177

SEQ ID NO: 4566 - protein, 700 aa, Escherichia coli
MKIFSVRQTVLPALLVLSPVVFAADEQTMIVSAAPQVVSELDTPAAVSVVDGEEMRLATPRINLSESLTGVPGLQVQNRQNYAQDLQLSIRGFGSRSTYGIRGIRLYVDGIPATMPDGQGQTSNIDLSSVQNVEVLRGPFSALYGNASGGVMNVTTQTGQQPPTIEASSYYGSFGSWRYGLKATGATGDGTQPGDVDYTVSTTRFTTHGYRDHSGAQKNLANAKLGVRIDDASKLSLIFNSVDIKADDPGGLTEAEWKANPQQAPRAEQYDTRKTIKQTQAGLRYERSLSAQDDMSVMMYAGERETTQYQSIPMAPQLNPSHAGGVITLQRHYQGIDSRWTHRGELGVPVTFTTGLNYENMSENRKGYNNFRLNRGVPEYGQKGELRRDERNLMWNVDPYLQTQWQLTDKLSLDAGVRYSSVWFDSNDHYVTPGNGDDSGDASYHKWLPAGSLKYAMTDAWNVYLAAGRGFETPTINELSYRADGQSGMNFGLKPSTNDTIEIGSKTRIGDGLLSLALFQTDTDDEIVVDSSSGGRTTYKNAGKTRRQGAELAWDQRFAGDFRVKASWTWLDATYRSNVCNEQDCNGNRMPGIARNMAFASIGYIPEDGWYAGTEARYMGDIMADDENTAKAPSYTLVGLFTGYKYNYHNLTVDLFGRVDNLFDKEYVGSVIVNESNGRYYEPAPGRNYGVGINIAWRFE

SEQ ID NO: 4567 - protein, 307 aa, Escherichia coli
MMKKYLALALIAPLLISCSTTKKGDTYNEAWVKDTNGFDILMGQFAHNIENIWGFKEVVIAGPKDYVKYTDQYQTRSHINFDDGTITIETIAGTEPAAHLRRAIIKTLLMGDDPSSVDLYSDVDDITISKEPFLYGQVVDNTGQPIRWEGRASNFADYLLKNRLKSRSNGLRIIYSVTINMVPNHLDKRAHKYLGMVRQASRKYGVDESLILAIMQTESSFNPYAVSRSDALGLMQVVQHTAGKDVFRSQGKSGTPSRSFLFDPASNIDTGTAYLAMLNNVYLGGIDNPTSRRYAVITAYNGGAGSG

SEQ ID NO: 4568 - protein, 360 aa, Escherichia coli; identical to SEQ ID NO: 4018

SEQ ID NO: 4569 - protein, 353 aa, Escherichia coli
MKMKKSTLALVVMGIVASVSVQAAEIYNKDGNKLDVYGKVKAMHYMSDNDSKDGDQSYIRFGFKGETQINVQLTGYGRWEAEFAGNKAESDTAQQKTRLAFAGLKYKDLGSFDYGRNLGALYDVEAWTDMFPEFGGDSSAQTDNFMTKRASGLATYRNTDFFGVIDGLNLTLQYQGKNENRDVKKQNGDGFGTSLTYDFGGSDFAISGAYTNSDRTNEQNLQSRGTGKRAEAWATGLKYDANNIYLATFYSETRKMTPISGGFANKTQNFEAVAQYQFDFGLRPSLGYVLSKGKDIEGIGDEDLVNYVDVGATYYFNKNMSAFVDYKINQLDSDNKLNINNDDIVAVGMTYQF

SEQ ID NO: 4570 - protein, 733 aa, Escherichia coli
MMISKKYTLWALNPLLLTMMAPAVAQQTDDETFVVSANRSNRTVAEMAQTTWVIENAELEQQIQGGKELKDALAQLIPGLDVSSRSRTNYGMNVRGRPLVVLVDGVRLNSSRTDSRQLDSIDPFNIDHIEVISGATSLYGGGSTGGLINIVTKKGQPETMMEFEAGTKSGFSSSKDHDERIAGAVSGGNEHISGRLSVAYQKFGGWFDGNGDATLLDNTQTGLQYSDRLDIMGTGTLNIDESRQLQLITQYYKSQGDDDYGLNLGKGFSAIRGTSTPFVSNGLNSDRIPGTERHLISLQYSDSAFLGQELVGQVYYRDESLRFYPFPTVNANKQVTAFSSSQQDTDQYGMKLTLNSKPMDGWQITWGLDADHERFTSNQMFFDLAQASASGGLNNKKIYTTGRYPSYDITNLAAFLQSGYDINNLFTLNGGVRYQYTENKIDDFIGYAQQRQIAAGKATSADAIPGGSVDYDNFLFNAGLLMHITERQQAWLNFSQGVELPDPGKYYGRGIYGAAVNGHLPLTKSVNVSDSKLEGVKVDSYELGWRFTGNNLRTQIAAYYSISDKSVVANKDLTISVVDDKRRIYGVEGAVDYLIPDTDWSTGVNFNVLKTESKVNGTWQKYDVKTASPSKATAYIGWAPDPWSLRVQSTTSFDVSDAQGYKVDGYTTADLLGSYQLPVGTLSFSIENLFDRDYTTVWGQRAPLYYSPGYGPASLYDYKGRGRTFGLNYSVLF

SEQ ID NO: 4571 - protein, 208 aa, Escherichia coli; identical to SEQ ID NO: 1948

SEQ ID NO: 4572 - protein, 432 aa, Escherichia coli; identical to SEQ ID NO: 2026

SEQ ID NO: 4573 - protein, 719 aa, Escherichia coli
MRDEMLYNIPCRIYILSTLSLCISGIVSTATATSSETKISNEETLVVTTNRSASNLWESPATIQVIDQQTLQNSTNASIADNLQDIPGVEITDNSLAGRKQIRIRGEASSRVLILIDGQEVTYQRAGDNYGVGLLIDESALERVEVVKGPYSVLYGSQAIGGIVNFITKKGGDKLASGVVKAVYNSATAGWEESIAVQGSIGGFDYRINGSYSDQGNRDTPDGRLPNTNYRNNSQGVWLGYNSGNHRFGLSLDRYRLATQTYYEDPDGSYEAFSVKIPKLEREKVGVFYDTDVDGDYLKKIHFDAYEQTIQRQFANEVKTTQPVPSPMIQALTVHNKTDTHDKQYTQAVTLQSHFSLPANNELVTGAQYKQDRVSQRSGGMTSSKSLTGFINKETRTRSYYESEQSTVSLFAQNDWRFADHWTWTMGVRQYWLSSKLTRGDGVSYTAGIISDTSLARESASDHEMVTSTSLRYSGFDNLELRAAFAQGYVFPTLSQLFMQTSAGGSVTYGNPDLKAEHSNNFELGARYNGNQWLIDSAVYYSEAKDYIASLICDGSIVCNGNTNSSRSSYYYYDNIDRAKTWGLEISAEYNGWVFSPYISGNLIRRQYETSTLKTTNTGEPAINGRIGLKHTLVMGQANIISDVFIRAASSAKDDSNGTETNVPGWATLNFAVNTEFGNEDQYRINLALNNLTDKRYRTAHETIPAAGFNAAIGFVWNF

SEQ ID NO: 4574 - protein, 728 aa, Escherichia coli
MIIVIVCIIVTPQSKKADKSEAVPAFWDDHLHTNKSTAMLPYARGRKEDVSDTHFIFVVTSWRYGMFRLNPFVRVGLCLSAISCAWPVLAVDDDGETMVVTASSVEQNLKDAPASISVITQEDLQRKPVQNLKDVLKEVPGVQLTNEGDNRKGVSIRGLDSSYTLILVDGKRVNSRNAVFRHNDFDLNWIPVDSIERIEVVRGPMSSLYGSDALGGVVNIITKKIGQKWSGTVTVDTTVQEHRDRGDTYNGQFFTSGPLIDGVLGMKAYGSLAKREKDDPQNSTTTDTGETPRIEGFSSRDGNVEFAWTPNQNHDFTAGYGFDRQDRDSDSLDKNRLERQNYSVSHNGRWDYGTSELKYYGEKVENKNPGNSSPITSESNTVDGKYTLPLTAINQFLTVGGEWRHDKLSDAVNLTGGTSSKTSASQYALFVEDEWRIFEPLALTTGVRMDDHETYGEHWSPRAYLVYNATDTVTVKGGWATAFKAPSLLQLSPDWTSNSCRGACKIVGSPDLKPETSESWELGLYYMGEEGWLEGVESSVTVFRNDVKDRISISRTSDVNAAPGYQNFVGFETGANGRRIPVFSYYNVNKARIQGVETELKIPFNDEWKLSINYTYNDGRDVSNGENKPLSDLPFHTANGTLDWKPLALEDWSFYVSGHYTGQKRADSATAKTPGGYTIWNTGAAWQVTKDVKLRAGVLNLGDKDLSRDDYSYNEDGRRYFMAVDYRF

SEQ ID NO: 4575 - protein, 721 aa, Escherichia coli
MSVYAQAAVEPKEDTITVTAAPAPQESAWGPAATIAARQSATGTKTDTPIQKVPQSISVVTAEEMALHQPKSVKEALSYTPGVSVGTRGASNTYDHLIIRGFAAEGQSQNNYLNGLKLQGNFYNDAVIDPYMLERAEIMRGPVSVLYGKSSPGGLLNMVSKRPTTEPLKEVQFKAGTDSLFQTGFDFSDALDDDGVYSYRLTGLARSANAQQKGSEEQRYAIAPAFTWRPDDKTNFTFLSYFQNEPETGYYGWLPKEGTVEPLPNGKRLPTDFNEGAKNNTYSRNEKMVGYSFDHEFNDTFTVRQNLRFAENKTSQNSVYGYGVCSDPANAYSKQCAALAPADKGHYLARKYVVDDEKLQNFSVDTQLQSKFATGDIDHTLLTGVDFMRMRNDINAWFGYDDSVPLLDLYNPVNTDFDFNAKDPDNSGPYRILNKQKQTGVYVQDQAQWDKVLVTLGGRYDWADQESLNRVAGTTDKRDDKQFTWRGGVNYLFDNGVTPYFSYSESFEPSSQVGKDGNIFAPSKGKQYEVGVKYVPEDRPIVVTGAVYNLTKTNNLMADPEGSFFSVEGGEIRARGVEIEAKAALSASVNVVGSYTYTDAEYTTDTTYKGNTPAQVPKHMASLWADYTFFDGPLSGLTLGTGGRYTGSSYGDPANSFKVGSYTVVDALVRYDLARVGMAGSNVALHVNNLFDREYVASCFNTYGCFWGAERQVVATATFRF

SEQ ID NO: 4576 - protein, 541 aa, Escherichia coli
MAMAAVCGTSGIASLFSQAAFAADSDIADGQTQRFDFSILQSMAHDLAQTAWRGAPRPLPDTLATMTPQAYNSIQYDAEKSLWHNVENRQLDAQFFHMGMGFRRRVRMFSVDPATHLAREIHFRPELFKYNDAGVDTKQLEGQSDLGFAGFRVFKAPELARRDVVSFLGASYFRAVDDTYQYGLSARGLAIDTYTDSKEEFPDFTAFWFDTVKPGATTFTVYALLDSASITGAYKFTIHCEKNQVIMDVENHLYARKDIKQLGIAPMTSMFSCGTNERRMCDTIHPQIHDSDRLSMWRGNGEWICRPLNNPQKLQFNAYTDNNPKGFGLLQLDRDFSHYQDIMGWYNKRPSLWVEPRNKWGKGTIGLMEIPTTGETLDNIVCFWQPEKAVKAGDEFAFQYRLYWSAQPPVHCPLARVMATRTGMGGFPEGWAPGEHYPEKWARRFAVDFVGGDLKAAAPKGIEPVITLSSGEAKQIEILYIEPIDGYRIQFDWYPTSDSTDPVDMRMYLRCQGDAISETWLYQYFPPAPDKRQYVDDRVMS

SEQ ID NO: 4577 - protein, 682 aa, Escherichia coli; identical to SEQ ID NO: 3817

SEQ ID NO: 4578 - protein, 224 aa, Escherichia coli
MATVLLLLLFACHSTIANAAVALGATRVIYPANQKQVLLPVTNNDPASVYLIQSWIENAGDQKDTQFVITPPLFSMQGKKENTLRIINATNHQLPGDRESLFWVNVKAIPAMEKDQKNENTLQLAIISRIKMFYRPTHLAMAPEEAPAMLRFRRSGSKLTLINPTPYFITVTNMKAGNSNLPNTMVPPKGEVSVDIPHAVTGDISFQTINDYGALTPRIKATMQ

SEQ ID NO: 4579 - protein, 274 aa, Escherichia coli; identical to SEQ ID NO: 2301

SEQ ID NO: 4580 - protein, 250 aa, Escherichia coli; identical to SEQ ID NO: 3811

SEQ ID NO: 4581 - protein, 222 aa, Escherichia coli
MKGLLALLISSMVLPAHAGIVIYGTRIIYPAEHKEVMVQLMNQGNRSSLMQAWIDDGDTSLPPEKIQVPFMLTPPVAKIGANSGQQVKIMPNKLPTNKESIFYLNVLDIPPNSPEQEGKNALKFAMQNRIKLFYRPAGIAPVNKVTFKKLLVNRSGNGLVIKNDSANWVTISDVKANNVKVNYETIMIAPLESQSVNVKSNNANNWHLTIIDDHGNYISDKI

SEQ ID NO: 4582 - protein, 518 aa, Escherichia coli; identical to SEQ ID NO: 2350

SEQ ID NO: 4583 - protein, 760 aa, Escherichia coli
MENNRNFPARQFHSLTFFAGLCIGITPVAQALAAEGQANADDTLVVEASTPSLYAPQQSADPKFSRPVADTTRTMTVISEQVIKDQGATNLTDALKNVPGVGAFFAGENGNSTTGDAIYMRGADTSNSIYIDGIRDIGSVSRDTFNTEQVEVIKGPSGTDYGRSAPTGSINMISKQPRNDSGIDASASIGSAWFRRGTLDVNQVIGDTTAVRLNVMGEKTHDAGRDKVKNERYGVAPSVAFGLGTANRLYLNYLHVTQHNTPDGGIPTIGLPGYSAPSAGTAALNHSGKVDTHNFYGTDSDYNDSTTDTATMRFEHDINDNTTIRNTTRWSRVKQDYLMTAIMGGASNITQPTSDVNSWTWSRTANTKDVSNKILTNQTNLTSTFYTGAIGHDVSTGVEFTRETQTNYGVNPVTLPAVNIYHPDSSIHPGGLTRNGANANGQTDTFAIYAFDTLQITRDFELNGGIRLDNYHTEYDSATACGGSGRGAITCPAGVAKGSPVTTVDTAKSGNLVNWKAGALYHLTENGNIYINYAVSQQPPGGNNFALAQSGSGNSANRTDFKPQKANTSEIGTKWQVLDKRLLLTAALFRTDIENEVEQNDDGTYSQYGKKRVEGYEISVAGNITPAWQMIGGYTQQKATIKNGKDVAQDGSSSLPYTPEHAFTLWSQYQATDDISVGAGARYIGSMHKGSDGAVGTPAFTEGYWVADAKLGYRVNRNLDFQLNVYNLFDTDYVASINKSGYRYHPGEPRTFLLTANMHF

SEQ ID NO: 4584 - protein, 725 aa, Escherichia coli
MRINKILWSLTVLLVGLNSQISVAKSSDDDNDETLVVEATAEQVLKQQPGVSVITSEDIKKTPPVNDLSDIIRKMPGVNLTGNSASGTRGNNRQIDIRGMGPENTLILIDGVPVTSRNSVRYSWRGERDTRGDTNWVPPEQVERIEVIRGPAAARYGSGAAGGVVNIITKRPTNDWHGSLSLYTNQPESSDEGATRRANFSLSGPLAGNALTTRLYGNLNKTDADSWDINSPVGTKNAAGHEGVRNKDINGVVSWKLNPQQILDFEAGYSRQGNIYAGDTQNSSSSAVTESLAKSGKETNRLYRQNYGITHNGIWDWGQSRFGVYYEKTNNTRMNEGLSGGGEGRILAGEKFTTNRLSSWRTSGELNIPLNVMVDQTLTVGAEWNRDKLDDPSSTSLTVNDSDISGISGSAADRSSKNHSQISALYIEDNIEPVPGTNIIPGLRFDYLSDSGGNFSPSLNLSQELGDYFKVKAGVARTFKAPNLYQSSEGYLLYSKGNGCPKDITSGGCYLIGNKDLDPEISVNKEIGLEFTWEDYHASVTYFRNDYQNKIVAGDNVIGQTASGAYILKWQNGGKALVDGIEASMSFPLVKDRLNWNTNATWMITSEQKDTGNPLSVIPKYTINNSLNWTITQAFSASVNWTLYGRQKPRTHAETRSEDTGGLSGKELGAYSLVGTNFNYDINKNLRLNVGVSNILNKQIFRSSEGANTYNEPGRAYYAGVTASF

SEQ ID NO: 4585 - protein, 213 aa, Escherichia coli; identical to SEQ ID NO: 2232

SEQ ID NO: 4586 - protein, 681 aa, Escherichia coli
MTLSIWRKKTTGLKTKKRLLPLMLAAALCSSPVWAEEATFTANFKDTDLKSFIETVGANLNKTIIMGPGVQGKVSIRTMTPLNERQYYQLFLNLLEAQGYAVVPMENDVLKVVKSSAAKVEPLPLVGEGSDNYAGDEMVTKVVPVRNVSVRELAPILRQMIDSAGSGNVVNYDPSNVIMLTGRASVVERLTEVIQRVDHAGNRTEEVIPLDNASASEIARVLESLTKNSGENQPATLKSQIVADERTNSVIVSGDPATRDKMRRLIRRLDSEMERSGNSQVFYLKYSKAEDLVDVLKQVSGTLTAAKEEAEGTVGSGREVVSIAASKHSNALIVTAPQDIMQSLQSVIEQLDIRRAQVHVEALIVEVAEGSNINFGVQWGSKDAGLMQFANGTQIPIGTLGAAISAAKPQKGSTVISENGATTINPDTNGDLSTLAQLLSGFSGTAVGVVKGDWMALVQAVKNDSSSNVLSTPSITTLDNQEAFFMVGQDVPVLTGSTVGSNNSNPFNTVERKKVGIMLKVTPQINEGNAVQMVIEQEVSKVEGQTSLDVVFGERKLKTTVLANDGELIVLGGLMDDQAGESVAKVPLLGDIPVIGNLFKSTADKKEKRNLMVFIRPTILRDGMAADGVSQRKYNYMRAEQIYRDEQGLSLMPHTAQPILPAQNQALPPEVRAFLNAGRTR

SEQ ID NO: 4587 - protein, 192 aa, Escherichia coli
MKSKKYFIILLALAAIAGLGTHAAWSSNGLPRIDNKTLARLAQQHPVVVLFRHAERCDRSTNQCLSDKTGITVKGTQDARELGNAFSADIPDFDLYSSNTVRTIQSATWFSAGKKLTVDKRFLQCGNEIYSAIKDLQRKAPDKNIVIFTHNHCLTYIAKDKRDATFKPDYLDGLVMHVEKGKVYLDGEFVNH

SEQ ID NO: 4588 - protein, 386 aa, Escherichia coli; identical to SEQ ID NO: 3810

SEQ ID NO: 4589 - protein, 654 aa, Escherichia coli; identical to SEQ ID NO: 3854

SEQ ID NO: 4590 - protein, 713 aa, Escherichia coli
MAMFTPSFSGLKGRALFSLLFAAPMIHATDSVTTKDGETITVTADANTATEATDGYQPLSTSTATLTDMPMLDIPQVVNTVSDQVLENQNATTLDEALYNVSNVVQTNTLGGTQDAFVRRGFGANRDGSIMTNGLRTVLPRSFNAATERVEVLKGPASTLYGILDPGGLINVVTKRPEKTFHGSVSATSSSFGGGTGQLDITGPIEGTQLAYRLTGEVQDEDYWRNFGKERSTFIAPSLTWFGDNATVTMLYSHRDYKTPFDRGTIFDLTTKQPVNVDRKIRFDEPFNITDGQSDLAQLNAEYHLNSQWTARFDYSYSQDKYSDNQARVTAYDATTGTLTRRVDATQGSTQRMHATRADLQGNVDIAGFYNEILGGVSYEYYDLLRTDMIRCKKAKDFNIYNPVYGNTSKCTTVSASDSDQTIKQENYSAYAQDALYLTDNWIAVAGIRYQYYTQYAGKGRPFNVNTDSRDEQWTPKLGLVYKLTPSVSLFANYSQTFMPQSSIASYIGDLPPESSNAYEVGAKFELFDGITADIALFDIHKRNVLYTESIGDETIAKTAGRVRSRGVEVDLAGALTENINIIASYGYTDAKVLEDPDYAGKPLPNVPRHTGSLFLTYDIHNMPGNNTLTFGGGGHGVSRRSATNGADYYLPGYFVADAFAAYKMKLQYPVTLQLNVKNLFDKTYYTSSIATNNLGNQIGDPREVQFTVKMEF

SEQ ID NO: 4591 - protein, 784 aa, Escherichia coli; identical to SEQ ID NO: 2241

SEQ ID NO: 4592 - protein, 244 aa, Escherichia coli; identical to SEQ ID NO: 2964

SEQ ID NO: 4593 - protein, 169 aa, Escherichia coli
MKKESKKMKTILPAVLFAAFATTSAWAAESVQPLEKIAPYPQAEKGMKRQVIQLTPQEDESTLKVELLIGQTLEVDCNLHRLGGKLESKTLEGWGYDYYVFDKVSSPVSTMMACPDGKKEKKFVTAYLGDAGMLRYNSKLPIVVYTPDNVDVKYRIWKAEEKIDNAVVR

SEQ ID NO: 4594 - protein, 554 aa, Escherichia coli
MALIPACIFLCFAALSVQAEETSVTPQPPDILLGPLFNDVQNAKLFPDQKTFADAVPNSDPLMILADYRMQQNQSGFDLRHFVNVNFTLPKEGEKYVPPEGQSLREHIDGLWPVLTRSTENTEKWDSLLPLPKPYVVPGGRFREVYYWDSYFTMLGLAESGHWDKVADMVANFAHEIDNYGHIPNGNRSYYLSRSQPPFFALMVELLAQHEGDAALKQYLPQMQKEYAYWMDGVENLQAGQQEKRVVKLQDGTLLNRYWDDRDTPRPESWVEDIATAKSNPNRPATEIYRDLRSAAASGWDFSSRWMDNPQQLNTLRTTSIVPVDLNSLMFKMEKILARASKAIGDNAMANQYETLANARQKGIEKYLWNDQQGWYADYDLKSHKVRNQLTAAALFPLYVNAAAKDRASKMATATKTHLLQPGGLNTTSVKSGQQWDAPNGWAPLQWVATEGLQNYGQKEVAMDISWHFLTNVQHTYDREKKLVEKYDVSTTGTGGGGGEYPLQDGFGWTNGVTLKMLDLICPKEQPCDNVPATRPLSESTTQPLKQKEAEPTP

SEQ ID NO: 4595 - protein, 222 aa, Escherichia coli
MSKLGISSLFKTILLTAALAVSFTASAFTEGTDYMVLEKPIPNADKTLIKVFSYACPFCYKYDKAVTGPVSEKVKDIVAFTPFHLETKGEYGKQASEVFAVLINKDKAAGISLFDANSQFKKAKFAYYAAYHDKKERWSDGKDPAAFIKTGLDAAGMSQADFEAALKEPAVQETLKKWKASYDVAKIQGVPAYVVNGKYLIYTKSIKSIDAMADLIRELASK

SEQ ID NO: 4596 - protein, 478 aa, Escherichia coli; identical to SEQ ID NO: 2405

SEQ ID NO: 4597 - protein, 746 aa, Escherichia coli
MNKKIHSLALLVNLGIYGVAQAQEPTDTPVSHDDTIVVTAAEQNLQAPGVSTITADEIRKNPVARDVSEIIRTMPGVNLTGNSTSGQRGNNRQIDIRGMGPENTLILIDGKPVSSRNSVRQGWRGERDTRGDTSWVPPEMIERIEVLRGPAAARYGNGAAGGVVNIITKKGSGEWHGSWDAYFNAPEHKEEGATKRTNFSLTGPLGDEFSFRLYGNLDKTQADAWDINQGHQSARAGTYATTLPAGREGVINKDINGVVRWDFAPLQSLELEAGYSRQGNLYAGDTQNTNSDAYTRSKYGDETNRLYRQNYSLTWNGGWDNGVTTSNWVQYEHTRNSRIPEGLAGGTEGKFNEKAAQDFVDIDLDDVMLHSEVNLPIDFLVNQTLTLGTEWNQQRMKDLSSNTQALTGTNTGGAIDGVSATDRSPYSKAEIFSLFAENNMELTDSTIVTPGLRFDHHSIVGNNWSPALNISQGLGDDFTLKMGIARAYKAPSLYQTNPNYILYSKGQGCYASAGGCYLQGNDDLKAETSINKEIGLEFKRDGWLAGVTWFRNDYRNKIEAGYVAVGQNAVGTDLYQWDNVPKAVVEGLEGSLNVPVSETVMWTNNITYMLKSENKTTGDRLSIIPEYTLNSTLSWQAREDLSMQTTFTWYGKQQPKKYNYKGQPAVGPETKEISPYSIVGLSATWDVTKNVSLTGGVDNLFDKRLWRAGNAQTTGDLAGANYIAGAGAYTYNEPGRTWYMSINTHF

SEQ ID NO: 4598 - protein, 230 aa, Escherichia coli
MAFSSSAIADIVISGTRVVYKSEQKSVNVRLENKGNNPLLVQSWLDTGDDNAEPGSITVPFTATPPVSRIDAKRGQTIKLMYTASSALPKDRESVFWFNVLEVPPKPDAAKAANQSLLQLAFRTRIKLFYRPEGLSGISSDAPLALKWSWATSEGKAALRVDNPTPYYVSFSSGDLEANGKRYPLDMTMIAPFSNDVIKVNGMSGRTSSAKVHFFAINDFGGSIEGNANL

SEQ ID NO: 4599 - protein, 614 aa, Escherichia coli; identical to SEQ ID NO: 1885

SEQ ID NO: 4600 - protein, 629 aa, Escherichia coli
MTVTATGNARSSFEAPMMVSVIDTSAPENQTATSATDLLRHVPGITLDGTGRTNGQDVNMRGYDHRGVLVLVDGVRQGTDTGHLNGTFLDPALIKRVEIVRGPSALLYGSGALGGVISYDTVDAKDLLQEGQSSGFRVFGTGGTGDHSLGLGASAFGRTENLDGIVAWSSRDRGDLRQSNGETAPNDESINNMLAKGTWQIDSAQSLSGLVRYYNNDAREPKNPQTVEASDSSNPMVDRSTIQRDAQLSYKLAPQGNDWLNADAKIYWSEVRINAQNTGSSGEYREQITKGARLENRSTLFADSFASHLLTYGGEYYRQEQHPGGATTGFPQAKIDFSSGWLQDEITLRDLPITLLGGTRYDSYRGSSDGYKDVDADKWSSRAGMTINPTNWLMLFGSYAQAFRAPTMGEMYNDSKHFSIGRFYTNYWVPNPNLRPETNETQEYGFGLRFDDLMLSNDALEFKASYFDTKAKDYISTTVDFAAATTMSYNVPNAKIWGWDVMTKYTTDLFSLDVAYNRTRGKDTDTGEYISSINPDTVTSTLNIPIAHSGFSVGWVGTFADRSTHISSSYSKQPGYGVNDFYVSYQGQQALKGVTTTLVLGNAFDKEYWSPQGIPQDGRNGKIFVSYQW

SEQ ID NO: 4601 - protein, 517 aa, Escherichia coli; identical to SEQ ID NO: 2462

SEQ ID NO: 4602 - protein, 249 aa, Escherichia coli
MNIMKSPLITTGMICLLGICNFAQATVSPDRTRIIFNASNKSATVRLTNQSKIDPYLAQSWIEDASGKKTRDYISTLPPMERIEPDEQIQIRLMALASLNDLPQDRETLFYYNVREIPPRAKEQNVMQIAMQSRLKLFWRPKAIELKEGEMIPLQKVTITRTAAGLTLNNPTPYHITVGYIGTNGKTLMPGADSIMVVPFTSATQHLSSLPSTFQLGFVADYGGLEMFKVECNSIQSLCQSSPAKKGKI

SEQ ID NO: 4603 - protein, 363 aa, Escherichia coli
MKVKVLSLLVPALLVAGAANAAEVYNKDGNKLDLYGKVDGLHYFSDDKSVDGDQTYMRLGFKGETQVTDQLTGYGQWEYQIQGNSAENENNSWTRVAFAGLKFQDVGSFDYGRNYGVVYDVTSWTDVLPEFGGDTYGSDNFMQQRGNGFATYRNTDFFGLVDGLNFAVQYQGKNGSVSGEGMTNNGRGALRQNGDGVGGSITYDYEGFGIGGAISSSKRTDDQNSPLYIGNGDRAETYTGGLKYDANNIYLAAQYTQTYNATRVGSLGWANKAQNFETVAQYQFDFGLRPSLAYLQSKGKNLGRGYDDEDILKYVDVGATYYFNKNMSTYVDYKINLLDDNQFTRDAGINTDNIVALGLVYQF

SEQ ID NO: 4604 - protein, 220 aa, Escherichia coli
TQTDVFMTGRTTGVATYRNNDFFGLVDGLNFAAQYQGKNDRTDVTEANGDGFGFSTTYEYEGFGVGATYAKSDRTNDQVIYGNNSLNASGQNAEVWAAGLKYDANNIYLATTYSETQNMTVFGNNHIANKAQNFEVVAQYQFDFGLRPSVAYLQSKGKDLGAWGDQDLVEYIDVGATYYFNKNMSTFVDYKINLIDKSDFTKASGVATDDIVAVGLVYQF

SEQ ID NO: 4605 - protein, 673 aa, Escherichia coli; identical to SEQ ID NO: 2919

SEQ ID NO: 4606 - protein, 161 aa, Escherichia coli; identical to SEQ ID NO: 2582

SEQ ID NO: 4607 - protein, 897 aa, Escherichia coli; identical to SEQ ID NO: 3934

SEQ ID NO: 4608 - protein, 851 aa, Escherichia coli; identical to SEQ ID NO: 3963

SEQ ID NO: 4609 - protein, 869 aa, Escherichia coli
MKIPTTTDIPQRYTWCLAGICYSSLAILPSFLSYAESYFNPAFLLENGTSVADLSRFERGNHQPAGVYRVDLWRNDEFIGSQDIVFESTTENTGDKSGGLMPCFNQVLLERIGLNSSAFPELAQQQNNKCINLLKAVPDATINFDFAAMRLNITIPQIALLSSAHGYIPPEEWDEGIPALLLNYNFTGNRGNGNDSYFFSELSGINIGPWRLRNNGSWNYFRGNGYHSEQWNNIGTWVQRAIIPLKSELVMGDGNTGSDIFDGVGFRGVRLYSSDNMYPDSQQGFAPTVHGIARTAAQLTIRQNGFIIYQSYVSPGAFEITDLHPTSSNGDLDVTIDERDGNQQNYTIPYSTVPILQREGRFKFDLTAGDFRSGNSQQSSPFFFQGTALGGLPQEFTAYGGTQLSANYTAFLLGLGRNLGNWGAVSLDVTHARSQLADDSRHEGDSIRFLYAKSMNTFGTNFQLMGYRYSTQGFYTLDDVAYRRMEGYEYDYDYDGEHRDEPIIVNYHNLRFSRKDRLQLNISQSLNDFGSLYISGTHQKYWNTSDSDTWYQVGYTSSWVGISYSLSFSWNESVGIPDNERIVGLNVSVPFNVLTKRRYTRENALDRAYASFNANRNSNGQNSWLAGVGGTLLEGHNLSYHVSQGDTSNNGYTGSATANWQAAYGTLGVGYNYDRDQHDVNWQLSGGVVGHENGITLSQPLGDTNVLIKAPGAGGVRIENQTGILTDWRGYAVMPYATVYRYNRIALDTNTMGNSIDVEKNISSVVPTQGALVRANFDTRIGVRALITVTQGGKPVPFGSLVRENSTGITSMVGDDGQVYLSGAPLSGELLVQWGDGANSRCIAHYVLPKQSLQQAVTVISAVCTHPGS

SEQ ID NO: 4610 - protein, 207 aa, Escherichia coli; identical to SEQ ID NO: 2211

SEQ ID NO: 4611 - protein, 219 aa, Escherichia coli
MSLNFTVIVWLRLSIGGVYVLAFCRSSLKSKKYFIILLALAAIAGLGTHAAWSSNGLPRIDNKTLARLAQQHPVVVLFRHAERCDRSTNQCLSDKTGITVKGTQDARELGNAFSADIPDFDLYSSNTVRTIQSATWFSAGKKLTVDKRLLQCGNEIYSAIKDLQRKAPDKNIVIFTHNHCLTYIAKDKRDATFKPDYLDGLVMHVEKGKVYLDGEFVNH

SEQ ID NO: 4612 - protein, 813 aa, Escherichia coli
MVLTGSGMLCTTANAEEYYFDPIMLETTKSGMQTTDLSRFSKKYAQLPGTYQVDIWLNKKKVSQKKITFTANAEQLLQPQFTVEQLRELGIKVDEIPALAEKDDDSVINSLEQIIPGTAAEFDFNHQRLNLSIPQIALYRDARGYVSPSRWDDGIPTLFTNYSFTGSDNRYRQGNRSQRQYLNMQNGANFGPWRLRNYSTWTRNDQTSSWNTISSYLQRDIKALKSQLLLGESATSGSIFSSYTFTGVQLASDDNMLPNSQRGFAPTVRGIANSSAIVTIRQNGYVIYQSNVPAGAFEINDLYPSSNSGDLEVTIEESDGTQRRFIQPYSSLPMMQRPGHLKYSATAGRYRADANSDSKEPEFAEATAIYGLNNTFTLYGGLLGSEDYYALGIGIGGTLGALGALSMDINRADTQFDNQHSFHGYQWRTQYIKDIPETNTNIAVSYYRYTNDGYFSFNEANTRNWDYNSRQKSEIQFNISQTIFDGVSLYASGSQQDYWGNNDKNRNISVGVSGQQWGVGYSLNYQYSRYTDQNNDRALSLNLSIPLERWLPRSRVSYQMTSQKDRPTQHEMRLDGSLLDDGRLSYSLEQSLDDDNNHNSSLNASYRSPYGTFSAGYSYGNDSSQYNYGVTGGVVIHPHGVTLSQYLGNAFALIDANGASGVRIQNYPGIATDPFGYAVVPYLTTYQENRLSVDTTQLPDNVDLEQTTQFVVPNRGAMVAARFNANIGYRVLVTVSDRNGKPLPFGALASNDETGQQSIVDEGGILYLSGISSKSQSWTVRWGNQADQQCQFAFSTPDSEPTTSVLQGTAQCH

SEQ ID NO: 4613 - protein, 266 aa, Escherichia coli; identical to SEQ ID NO: 1894

SEQ ID NO: 4614 - protein, 831 aa, Escherichia coli
MQELPMLRMTPLASAIVALLLGIEAYAAEETFDTHFMIGGMKDQQVANIRLDDNQPLPGQYDIDIYVNKQWRGKYEIIVKDTPQETCLSREVIKRLGINSDNFASGKQCLTFEQLVQGGSYTWDIGVFRLDFSVPQAWVEELESGYVPPENWERGINAFYTSYYLSQYYSDYKASGNNKSTYVRFNSGLNLLGWQLHSDASFSKTNNNPGVWKSNTLYLERGFAQLLGTLRVGDMYTSSDIFDSVRFRGVRLFRDMQMLPNSKQNFTPRVQGIAQSNALVTIEQNGFVVYQKEVPPGPFAITDLQLAGGGADLDVSVKEADGSVTTYLVPYAAVPNMLQPGVSKYDLAAGRSHIEGASKQSDFVQAGYQYGFNNLLTLYGGSMVANNYYAFTLGAGWNTRIGAISVDATKSHSKQDNGDVFDGQSYQIAYNKFVSQTSTRFGLAAWRYSSRDYRTFNDHVWANNKDNYRRDENDVYDIADYYQNDFGRKNSFSANMSQSLPEGWGSVSLSTLWRDYWGRSGSSKDYQLSYSNNLRRISYTLAASQAYDENHHEEKRFNIFISIPFDWGDDVSTPRRQIYMSNSTTFDDQGFASNNTGLSGTVGSRDQFNYGVNLSHQHQGNETTAGANLTWNAPVATVNGSYSQSSTYRQAGASVSGGIVAWSGGVNLANRLSETFAVMNAPGIKDAYVNGQKYRTTNRNGVVIYDGMTPYRENHLMLDVSQSDSEAELRGNRKIAAPYRGAVVLVNFDTDQRKPWFIKALRADGQSLTFGYEVNDIHGHNIGVVGQGSQLFIRTNEVPPSVNVAIDKQQGLSCTITFGKEIDKSRNYICQ

SEQ ID NO: 4615 - protein, 803 aa, Escherichia coli
MAMPCALAVEFNLNVLDKSMRDRIDISLLKEKGVIAPGEYFVSVAVNNNQISNGQKINWQKKGDKTIPCINDSLVDKFGLKPDIRQSLPQIDRCIDFSSRPEMLFNFDQANQQLNISIPQAWLAWHSENWAPPSTWKEGVAGVLMDYNLFASNYRPQDGSSSTNLNAYGTTGINAGSWRLRSDYQLNNTDSEDSHEQSGGISRTYLFRPLPQLGSKLTLGETDFSSNIFDGFSYTGAALASDDRMLPWELRGYAPQISGIAQTNATVTISQSGRVIYQKKVPPGPFIIDDLNQSVQGTLDVKVTEEDGRVNNFQVSAASTPFLTRQGQVRYKLAAGQPRPSMSHQTENETFFSNEVSWGMLSNTSLYGGLLLSGDDYHSAAMGIGQNMLWLGALSFDVTWASSHFDTQQDERGLSYRFNYSKQVDATNSTISLAAYRFSDRHFHSYANYLDHKYNDSDAQDEKQTISLSVGQPITSLNLNLYANLLHQTWWNADASTTANITAGFNVDIGDWRDISISTSFNTTHYEDKDRDNQIYLSISLPFGNGGRVGYDMQNSSHSTTHRMSWNDTLDERNSWGMSAGLQSDRPDNGAQVSGNYQHLSSAGEWDISGTYAANDYSSVSSSWSGSFTATQYGAAFHRRSSTNEPRLMVSTDGVADIPVQGNLDYTNHFGIAVVPLISSYQPSTVAVNMNDLPDGVTVAENVIKETWIEGAIGYKSLASRSGKDVNVIIRNASGQFPPLGADIRQDDSGISVGMVGEEGHAWLSGVAENQKFTVVWGDSQHCSLHLPEHMEDTANRLILPCH

SEQ ID NO: 4616 - protein, 368 aa, Escherichia coli
MNKTITALAIMMASFAANASVLPETPVPFKSGTGAIDNDTVYIGLGSAGTAWYKLDTQAKDKKWTALAAFPGGPRDQATSAFIDGNLYVFGGIGKNSEGLTQVFNDVHKYNPKTNSWVKLMSHAPMGMAGHVTFVHNGKAYVTGGVNQNIFNGYFEDLNEAGKDSTAIDKINAHYFDKKAEDYFFNKFLLSFDPSTQQWSYAGESPWYGTAGAAVVNKGDKTWLINGEAKPGLRTDAVFELDFTGNNLKWNKLDPVSSPDGVAGGFAGISNDSLIFAGGAGFKGSRENYQNGKNYAHEGLKKSYSTDIHLWHNGKWDKSGELSQGRAYGVSLPWNNSLLIIGGETAGGKAVTDSVLISVKDNKVTVQN

SEQ ID NO: 4617 - protein, 860 aa, Escherichia coli
MSGSYVNAWAEDEIQFDSRFLELKDDTKIDLKRFSSQGYVEPGKYNLQVQLNKQPLAEEYDIYWYASENDASKTYACLTPELVSQFGLKEDVAKNLQWIHDGKCLKPGQLEGIDIKADLSQSALVISLPQAYLEYTDINWDPPSRWDDGISGLIADYSITAQTRHEENGGDDSNEISGNGTVGVNLGAWRLRADWQTDYLHSKSNDDDVINGDDTQKNWEWSRYYAWRALPSLKAKLGLGEDYLNSDIFDGFNYVGGSISTDDQMLPPNLRGYAPDISGVAHTTAKVTVSQMGRVIYETQVPAGPFRIQDLGDSVSGTLHIRIEEQNGQVQEYDINTASMPFLTRPGQVRYKLMMGRPQEWGHHVEGGFFSGGEASWGIANGWSLYGGALADEHYQSAALGVGRDLSVFGAVAFDIPHSHTRLDKETAYGKGSLDGNSFRVSYSKDFDELNSRVTFAGYRFSEENFMTMSEYLDASDSEMVRTGNDKEMYTATYNQNFRDAGVSVYLNYTRHTYWDRDEQTNYNVMLSHYFNLGSIRNMSVSMTGYRYEYDNQTDKGVYISLSMPWGDSSTISYNGNYGSGSDSSQVGYFSRVDDATHYQLNVGTSDNHSSVDGYYSHDGSLAQVDLSANYHEGQYTSAGISLQGGATLTAQGGALHRTQNMGGTRLLIDADGVAGVPVEGNGAAVYTNMFGKAVVADVNNYYRNQAYIDLNNLPENAEATQSVVQATLTEGAIGYRKFSVISGQKAMAVLRLQDGSHPPFGAEVKNDNAQNVGLVDDDGNVYLAGVKPGEHMIVSWGGVAHCDIHLPDPLPADLFNGLLLPCQQTGAISSPVHNEIKPVIQEQTQQVTPTEPPVSVSAN

SEQ ID NO: 4618 - protein, 825 aa, Escherichia coli
MGQNASNIDLSRYSEGNPAIPGMYDLSVYVNDQPIINQSITFIEIEGKKNAQACITLKNLLQFHINSPDINNEKAVLLARDETLGNCLNLTKIIPQASVRYDVNEQRLDIDVPQAWVMKNYQNYVDPSLWENGINAAMLSYNLNGYHSETPGRRNDSIYAAFNGGMNLGAWRLRASGNYNWMTDSGSNYDFKNRYIQRDIASLRSQLILGESYTTGETFDSVSIRGIRLYSDSRMLPPTLASFAPIIHGVANTNAKVTITQGGYKIYETTVPPGAFVIDDLSPSGYGSDLIVTVEESDGSKRTFSQPFSSVVQMLRPGVGRWDISGGQVLKDDIQDEPNLFQASYYYGLNNYLTGYTGIQITDNNYTAGLLGLGLNTSVGAFSFDVTHSNVRIPDDKTYQGQSYRVSWNKLFEETSTSLNIAAYRYSTQNYLGLNDALTLIDEVKHPEQDLEPKSMRNYSRMKNQVTVSINQPLKFEKKDYGSFYLSGSWSDYWASGQNRSNYSIGYSNSASWGSYSVSAQRSWNEDGDTDDSVYLSFTIPIEKLLGTEQRTSGFQSIDTQMSSDFKGNNQLNVSSSGYSDNARVSYSVNTGYTMNKASKDLSYVGGYASYESPWGTLAGSVSANSDNSRQVSLSTDGGFVLHSGGLTFSNDSFSDSDTLAVVQAPGAQGARINYGNSTIDRWGYGVTSALSPYHENRIALDINDLENDVELKSTSAVAVPRQGSVVFADFETVQGQSAIMNITRSDGKNIPFAADIYDEQGNVIGNVGQGGQAFVRGIEQQGNISIKWLEESKPVSCLAHYQQSSEAEKIAQSIILNGIRCQIQ

SEQ ID NO: 4619 - protein, 834 aa, Escherichia coli
MYKKLKLTTISELIKNIYCSLSVIIIGCASAYAVEFNKDLIEAEDRENVNLSQFETDGQLPVGKYSLSTLINNKRTPIHLDLQWVLIDNLTAVCVTPEQLTLLGFTDEFIEKTQQTLIDGCYPIEKEKQITTYLDKGKMQLSISAPQAWLKYKDANWTPPELWDHGIAGAFLDYNLYASHYAPHQGDNSQNISSYGQAGVNLGAWRLRTDYQYDQSFNNGKSQANNLDFPRIYLFRPIPAINAKLTIGQYDTESSIFDSFHFSGVSLKSDENMLPPDLRGYAPQITGVAQTNAKVTVSQNNRIIYQENVPPGPFAITNLFNTLQGQLDVKVEEEDGQVTQWQVASNSIPYLTRKGQIRYTTAMGKPTSVGGDSLQQPFFWTGEFSWGWLNNVSLYGGSVLTNRDYQSLAAGVGFNLNSLGSLSFDVTRSDAQLHNQDKETGYSYRANYSKRFESTGSQLTFAGYRFSDKNFVTMNEYINDTNHYTNYQNEKESYIVTFNQYLESLRLNTYVSLARNTYWDASSNVNYSLSLSRDFDIGPLKNVSTSLTFSRINWEDDNQDQLYLNISIPWGTSRTLSYGMQRNQDNKISHTASWYDSSDRNNSWSVSASGDNDEFKDMKASLRASYQHNTENGRLYLSGTSQRDSYYSLNASWNGSFTATRHGAAFHDYSGSADSRFMIDADGAEDIPLNNKRAVTNRYGIGVIPSVSSYITTSLSVDTRNLPENVDIENSVITTTLTEGAIGYAKLDTRKGYQIIGVIRLADGSHPPLGISVKDETSHKELGLVADGGFVYLNGIQDDNKLALRWGDKSCFIQPPNSSNLTTGTVILPCISQN

SEQ ID NO: 4620 - protein, 122 aa, Escherichia coli
SQNDIAKSSIELINQLVDTVSSINSTVDSFSEQLNQLGSFLSSKPRLSSVGGKLQNLPDLGPLGDGLDVVSGILSAVSASFILGNSDAHTGTKAAAGIELTTQVLGNVGKAVSQYILAQRMA

SEQ ID NO: 4621 - protein, 998 aa, Escherichia coli
MTVNKIKNIFNNATLTTKSAFNTASSSVRSAGKKLILLIPDNYEAQGVGINELVKAADELGIEIHRTERDDTAIANQFFGAAEKVVGLTERGVAIFAPQLDKLLQKYQKVGSKIGGTAENVGNNLGKAGTVLSALQNFTGIALSGMALDELLRKQREGEDISQNDIAKSSIELINQLVDTVSSINSTVDSFSEQLNQLGSFLSSKPRLSSVGGKLQNLPDLGPLGDGLDVVSGILSAVSASFILGNSDAHTGTKAAAGIELTTQVLGNVGKAVSQYILAQRMAQGLSTTAASAGLITSAVMLAISPLSFLAAADKFERAKQLESYSERFKKLNYEGDALLAAFHKETGAIDAALTTINTVLSSVSAGVSAASSASLIGAPISMLVSALTGTISGILEASKQAMFEHVAEKFAARINEWEKEHGKNYFENGYDARHAAFLEDSLSLLADFSRQHAVERAVAITQQHWDEKIGELAGITRNADRSQSGKAYINYLENGGLLEAQPKEFTQQVFDPQKGTIDLSTGNVSSVLTFITPTFTPGEEVRERKQSGKYEYMTSLIVNGKDTWSVKGIKNHKGVYDYSKLIQFVEKNNKHYQARIISELGDKDDVVYSGAGSSEVFAGEGYDTVSYNKTDVGKLTIDATGASKPGEYIVSKNMYGDVKVLQEVVKEQEVSVGKRTEKIQYRDFEFRTGGIPYDVIDNLHSVEELIGGKHDDEFKGGKFNDIFHGADGNDYIEGNYGNDRLYGDDGDDYISGGQGDDQLFGGSGNDKLSGGDGNNYLTGGSGNDELQAHGAYNILSGGTGDDKLYGGGGIDLLDGGEGNDYLNGGFGNDIYVYGQNYGHHTIADEGGKGDRLHLSDISFDDIAFKRVGNDLIMNKAINGVLSFNESNDVNGITFKNWFAKDASGADNHLVEVITDKDGREIKVDKIPHNNNERSGYIKASNIASEKNMVNITSVTNDINKIISSVSGFDSGDERLASLYNLSLHQNNTHSTTLTTTV

SEQ ID NO: 4622 - protein, 446 aa, Escherichia coli [sequence omitted]

SEQ ID NO: 4623 - protein, 650 aa, Escherichia coli; identical to SEQ ID NO: 2146

SEQ ID NO: 4624 - protein, 230 aa, Escherichia coli
MMTKIKLLMLIIFYLIISASAHAAGGIALGATRIIYPADAKQTAVWIRNSHTNERFLVNSWIENSSGVKKKSFIITPPLFVSEPKSENTLRIIYTGPPLAADRESLFWMNVKTIPSVDKNALNGRNVLQLAILSRMKLFLRPIQLQELPAEAPDTLKFSRSGNYINVHNPSPFYVTLVNLQVGSQKLGNAMAAPRVNSQIPLPSGVQGKLKFQTVNDYGSVTPVREVNLN

SEQ ID NO: 4625 - protein, 431 aa, Escherichia coli; identical to SEQ ID NO: 3408

SEQ ID NO: 4626 - protein, 353 aa, Escherichia coli
MKMKKSTLALVVMGIVASASVQAAEIYNKDGNKLDVYGKVKAMHYMSDNDSKDGDQSYIRFGFKGETQINDQLTGYGRWEAEFAGNKAESDTAQQKTRLAFAGLKYKDLGSFDYGRNLGALYDVEAWTDMFPEFGGDSSAQTDNFMTKRASGLATYRNTDFFGVIDGLNLTLQYQGKNENRDVKKQNGDGFGTSLTYDFGGSDFAISGAYTNSDRTNEQNLQSRGTGKRAEAWATGLKYDANNIYLATFYSETRKMTPITGGFANKTQNFEAVAQYQFDFGLRPSLGYVLSKGKDIEGIGDEDLVNYIDVGATYYFNKNMSAFVDYKINQLDSDNKLNINNDDIVAVGMTYQF

SEQ ID NO: 4627 - protein, 252 aa, Escherichia coli
MKLMRYLNTKNIIAAGVLLSCMSSIAWGAIIPDRTRIIMNESDKGEALKLTNQSKNLPYLAQTWIEDTKGNKSRDFIVTVPPMVRLNPSEQIQIRMITQKKIAQLPKDRETLFYFNVREIPPKTDKKNVMQVTMQHALKLFWRPKAIELEDDGVMTYEKVEIIRRNDGSIRFNNKMPYHVTLGYIGTNGVTMLPQTQSLMVTPFSHANTQFKNVPSTFQVGYINDFGGLSFYEINCPVVNNICNISVAKRDQ

SEQ ID NO: 4628 - protein, 360 aa, Escherichia coli
MKKLTVAISAVAASVLMAMSAQAAEIYNKDSNKLDLYGKVNAKHYFSSYDADDGDTTYARLGFKGETQINDQLTGFGQWEYEFKGNRAESQGSSKDKTRLAFAGLKFGDYGSIDYGRNYGVAYDIGAWTDVLPEFGGDTWTQTDVFMTGRTTGVATYRNNDFFGLVDGLNFAAQYQGKNDRTDVTEANGDGFGFSTTYEYEGFGVGATYAKSDRTDGQVAYGKSKFNASGKNAEVWAAGLKYDANNIYLATTYSETQNMTVFGNNHIANKAQNFEAVAQYQFDFGLRPSVAYLQSKGKDLGVHGDRDLVKYVDVGATYYFNKNMSTFVDYKINLIDDSKFTKTAGIDTDDIVAVGLVYQF

SEQ ID NO: 4629 - protein, 614 aa, Escherichia coli; identical to SEQ ID NO: 1888

SEQ ID NO: 4630 - protein, 554 aa, Escherichia coli; identical to SEQ ID NO: 3409

SEQ ID NO: 4631 - protein, 663 aa, Escherichia coli
MFRLNPFVRVGLCLSAISCAWPVLAVDDDGETMVVTASSVEQNLKDAPASISVITQEDLQRKPVQNLKDVLKEVPGVQLTNEGDNRKGVSIRGLDSSYTLILVDGKRVNSRNAVFRHNDFDLNWIPVDSIERIEVVRGPMSSLYGSDALGGVVNIITKKIGQKWSGTVTVDTTIQEHRDRGDTYNGQFFTSGPLIDGVLGMKAYGSLAKREKDDPQNSTTTDTGETPRIEGFSSRDGNVEFAWTPNQNHDFSAGYGFDRQDRDSDSLDKNRLERQNYSVSHNGRWDYGTSELKYYGEKVENKNPGNSSPITSESNTVDGKYTLPLTAINQFLTVGGEWRHDKLSDAVNLTGGTSSKTSASQYALFVEDEWRIFEPLALTTGVRMDDHETYGEHWSPRAYLVYNATDTVTVKGGWATAFKAPSLLQLSPDWTSNSCRGACKIVGSPDLKPETSESWELGLYYMGEEGWLEGVESSVTVFRNDVKDRISISRTSDVNAAPGYQNFVGFETGANGRRIPVFSYYNVNKARIQGVETELKIPFNDEWKLSINYTYNDGRDVSNGENKPLSDLPFHTANGTLDWKPLALEDWSFYVSGHYTGQKRADSATAKTPGGYTIWNTGAAWQVTKDVKLRAGVLNLGDKDLSRDDYSYNEDGRRYFMAVDYRF

SEQ ID NO: 4632 - protein, 274 aa, Escherichia coli; identical to SEQ ID NO: 2891

SEQ ID NO: 4633 - protein, 239 aa, Escherichia coli; identical to SEQ ID NO: 2759

SEQ ID NO: 4634 - protein, 578 aa, Escherichia coli
MALFERVEVVRGATGLMTGTGNPSAAINMVRKHATSREFKGDVSAEYGSWNKERYVADLQSPLTEDGKIRARIVGGYQNNDSWLDRYNSEKTFFSGIVDADLGDLTTLSAGYEYQRIDVNSPTWGGLPRWNTDGSSNSYDRARSTAPDWAYNDKEINKVFMTLKQRFADTWQATLNATHSEVEFDSKMMYVDAYVNKADGMLVGPYSNYGPGFDYVGGTGWNSGKRKVDALDLFADGIYELFGRQHNLMFGGSYSKQNNRYFSSWANIFPDEIGSFYNFNGNFPQTDWSPQSLAQDDTTHMKSLYAATRVTLADPLHLILGARYTNWRVDTLTYSMEKNHTTPYAGLVFDINDNWSTYASYTSIFQPQNDRDSSGKYLAPITGNNYELGLKSDWMNSRLTTTLAIFRIEQDNVAQSTGTPIPGSNGETAYKAVDGTVSKGVEFELNGAITDNWQLTFGATRYIAEDNEGNAVNPNLPRTTVKMFTSYRLPVMPELTVGGGVNWQNRVYTDTVTPYGTFRAEQGSYALVDLFTRYQVTKNFSLQGNVNNLFDKTYDTNVEGSIVYGAPRNFSITGTYQF

SEQ ID NO: 4635 - protein, 235 aa, Escherichia coli; identical to SEQ ID NO: 4365

SEQ ID NO: 4636 - protein, 169 aa, Escherichia coli
MKKESKKMKTILPAVLFAAFATTSAWAAESVQPLEKIAPYPQAEKGMKRQVIQLTPQEDESTLKVELLIGQTLEVDCNLHRLGGKLENKTLEGWGYDYYVFDKVSSPVSTMMACPDGKKEKKFVTAYLGDAGMLRYNSKLPIVVYTPDNVDVKYRVWKAEEKIDNAVVR

SEQ ID NO: 4637 - protein, 432 aa, Escherichia coli; identical to SEQ ID NO: 2026

SEQ ID NO: 4638 - protein, 331 aa, Escherichia coli; identical to SEQ ID NO: 2705

SEQ ID NO: 4639 - protein, 208 aa, Escherichia coli; identical to SEQ ID NO: 1949

SEQ ID NO: 4640 - protein, 517 aa, Escherichia coli
MKHKLQMMKMRWLSAAVMLTLYTSSSWAFSIDDVAKQAQSLAGKGYETPKSNLPSVFRDMKYADYQQIQFNHDKAYWNNLKTPFKLEFYHQGMYFDTPVKINEVTATAVKRIKYSPDYFTFGDVQHDKDTVKDLGFAGFKVLYPINSKDKNDEIVSMLGASYFRVIGAGQVYGLSARGLAIDTALPSGEEFPRFKEFWIERPKPTDKRLTIYALLDSPRATGAYKFVVMPGRDTVVDVQSKIYLRDKVGKLGVAPLTSMFLFGPNQPSPANNYRPELHDSNGLSIHAGNGEWIWRPLNNPKHLAVSSFSMENPQGFGLLQRGRDFSRFEDLDDRYDLRPSAWVTPKGEWGKGSVELVEIPTNDETNDNIVAYWTPDQLPEPGKEMNFKYTITFSRDEDKLHAPDNAWVQQTRRSTGDVKQSNLIRQPDGTIAFVVDFTGAEMKKLPEDTPVTAQTSIGDNGEIVESTVRYNPVTKGWRLVMRVKVKDAKKTTEMRAALVNTDQTLSETWSYQLPANE

SEQ ID NO: 4641 - protein, 249 aa, Escherichia coli
MTNLFSAKTVATTLALLITATSLQAQASVTPDRTRLIFNESDKSISVTLRNNDPKMPYLAQSWMEDEQGNKISSPLTVLPPVQRIDAMMNGQVKVQGMPDINKLPADRESVFYFNVREIPPKSNKPNTLQIALQTRIKLFWRPKALENVSMKNPWQHKVTLTRSGQEFTVNNPTPYFVVISNASAQKNGNPAAGFSPMVISPKTSVPLKVKMDSVPVLTYVNDYGARMPLYFKCGGDTCQVDVEQSRKG

SEQ ID NO: 4642 - protein, 204 aa, Escherichia coli; identical to SEQ ID NO: 2957

SEQ ID NO: 4643 - protein, 213 aa, Escherichia coli; identical to SEQ ID NO: 2232

SEQ ID NO: 4644 - protein, 510 aa, Escherichia coli; identical to SEQ ID NO: 3982

SEQ ID NO: 4645 - protein, 774 aa, Escherichia coli; identical to SEQ ID NO: 2066

SEQ ID NO: 4646 - protein, 122 aa, Escherichia coli; identical to SEQ ID NO: 2915

SEQ ID NO: 4647 - protein, 746 aa, Escherichia coli
MNKKIHSLALLVNLGIYGVAQAQEPTDTPVSHDDTIVVTAAEQNLQAPGVSTITADEIRKNPVARDVSEIIRTMPGVNLTGNSTSGQRGNNRQIDIRGMGPENTLILIDGKPVSSRNSVRQGWRGERDTRGDTSWVPPEMIERIEVLRGPAAARYGNGAAGGVVNIITKKGSGEWHGSWGAYFNAPEHKEEGATKRTNFSLTGPLGDEFSFRLYGNLDKTQADAWDINQGHQSARAGTYATTLPAGREGVINKDINGVVRWDFAPLQSLELEAGYSRQGNLYAGDTQNTNSDSYTRSKYGDETNRLYRQNYALTWNGGWDNGVTTSNWVQYEHTRNSRIPEGLAGGTEGKFNEKATQDFVDIDLDDVMLHSEVNLPIDFLVNQTLTLGTEWNQQRMKDLSSNTQALTGTNTGGAIDGVSTTDRSPYSKAEIFSLFAENNMELTDSTIVTPGLRFDHHSIVGNNWSPALNISQGLGDDFTLKMGIARAYKAPSLYQTNPNYILYSKGQGCYASAGGCYLQGNDDLKAETSINKEIGLEFKRDGWLAGVTWFRNDYRNKIEAGYVAVGQNAVGTDLYQWDNVPKAVVEGLEGSLNVPVSETVMWTNNITYMLKSENKTTGDRLSIIPEYTLNSTLSWQAREDLSMQTTFTWYGKQQPKKYNYKGQPAVGPETKEISPYSIVGLSATWDVTKNVSLTGGVDNLFDKRLWRAGNAQTTGDLAGANYIAGAGAYTYNEPGRTWYMSVNTHF

SEQ ID NO: 4648 - protein, 241 aa, Escherichia coli; identical to SEQ ID NO: 2863

SEQ ID NO: 4649 - protein, 784 aa, Escherichia coli; identical to SEQ ID NO: 2244

SEQ ID NO: 4650 - protein, 700 aa, Escherichia coli
MKIFSVRQTVLPALLALSPVVFAADEQTMIVSAAPQVVSELDTPAAVSVVDGEEMRLATPRINLSESLTSVPGLQVQNRQNYAQDLQLSIRGFGSRSTYGIRGIRLYVDGIPATMPDGQGQTSNIDLSSVQNVEVLRGPFSALYGNASGGVMNVTTQTGQQPPTIEASSYYGSFGSWRYGLKATGATGDGTQPGDVDYTVSTTRFTTHGYRDHSGAQKNLANAKLGVRIDEASKLSLIFNSVDIKADDPGGLTKAEWKANPQQAPRAEQYDTRKTIKQTQAGLRYERSLSSRDDMSVMMYAGERETTQYQSIPMTPQLNPSHAGGVITLQRHYQGIDSRWTHRGELGVPVTFTTGLNYENMSENRKGYNNFRLNSGMPEYGQKGELRRDERNLMWNIDPYLQTQWQLSEKLSLDADVRYSSVWFDSNDHYVTPGNGDDSGDASYHKWLPAGSLKYAMTDAWNIYLAAGRGFETPTINELSYRADGQSGMNLGLKPSTNDTIEIGSKTRIGDGLLSLALFQTDTDDEIVVDSSSGGRTTYKNAGKTRRQGAELAWDQRFAGDFRVNASWTWLDATYRSNVCNEQDCNGNRMPGIARNMGFASIGYVPEDGWYAGTEARYMGDIMADDENTAKAPSYTLVGLFTGYKYNYHNLTVDLFGRVDNLFDKEYVGSVIVNESNGRYYEPSPGRNYGVGMNIAWRFE

SEQ ID NO: 4651 - protein, 478 aa, Escherichia coli; identical to SEQ ID NO: 2404

SEQ ID NO: 4652 - protein, 590 aa, Escherichia coli
MLPDSQRGFAPVIHGIARGTAQVTIKQNGYDIYNSTVPPGPFTINDIYAAGNSGDLQVTIKEADGSTQIFTVPYSSVPLLQREGHTRYSITAGEYRSGNAQQEKPRFFQSTLLHGLPAGWTIYGGTQLADRYRAFNFGIGKNMGALGALSVDMTQANSTLPDDSQHDGQSVRFLYNKSLNESGTNIQLVGYRYSTSGYFNFADTTYSRMNGYNIETQDGVIQVKPKFTDYYNLAYNKRGKLQLTVTQQLGRTSTLYLSGSHQTYWGTSNVDEQFQAGLNTAFEDINWTLSYSLTKNAWQKGRDQMLALNVNIPFSHWLRSDSKSQWRHASASYSMSHDLNGRMTNLAGIYGTLLEDNDLSYSVQTGYAGGGDGNSGSTGYATLNYRGGYGNANIGYSHSDDIKQLYYGVSGGVLAHANGVTLGQPLNDTVVLVKAPGAKDAKVENQTGVRTDWRGYAVLPYATEYRENRVALDTNTLADNVDLDNAVANVVPTRGAIVRAEFKARVGIKLLMTLTHNNKPLPFGAMVTSESSQSSGIVADNGQVYLSGMPLAGKVQVKWGEEENAHCVANYQLPPESQQQLLTQLSAECR

SEQ ID NO: 4653 - protein, 89 aa, Escherichia coli
MKKTLLITASLSFFSASALATPDCVTGKVEYTKYNDDDTFTVKVGDKELFTNRWNLQSLLLSAQITGMTVTIKTNACHNGGGFSEVIFR

SEQ ID NO: 4654 - protein, 362 aa, Escherichia coli; identical to SEQ ID NO: 2434

SEQ ID NO: 4655 - protein, 360 aa, Escherichia coli
MMKKYLALALIAPLLISCSTTKKGDTYNEAWVKDTNGFDILMGQFAHNIENIWGFKEVVIAGPKDYVKYTDQYQTRSHINFDDGTITIETIAGTEPAAHLRRAIIKTLLMGDDPSSVDLYSDVDDITISKEPFLYGQVVDNTGQPIRWEGRASNFADYLLKNRLKSRSNGLRIIYSVTINMVPNHLDKRAHKYLGMVRQASRKYGIDESLILAIMQTESSFNPYAVSRSDALGLMQVVQHTAGKDVFRSQGKSGTPSRSFLFDPASNIDTGTAYLAMLNNVYLGGIDNPTSRRYAVITAYNGGAGSVLRVFSNDKIQAANIINTMTPGDVYQTLTTRHPSAESRRYLYKVNTAQKSYRRR

SEQ ID NO: 4656 - protein, 245 aa, Escherichia coli
MKMTFMKGLPLLLLVASLCSHAALQPDRTRIVFNANDKATSLRVDNRSDKLPYLAYSWLENEKGEKSDDLLVALPPIQRLEPKATTQVRIVKQASTAKLPGDRETLFFYNMREIPPAPEKNSDHAVLQVAIQSRIKVFWRPAALRKKAGEKVELQLQVSQQGNQLTLKNPTAYYLTIAYLGRNEKGVFPGFKTVMIAPFSTVNTNTGSYSGSQFYLGYMDDYGALRMTTLNCSGECRLQAVEAKK

SEQ ID NO: 4657 - protein, 541 aa, Escherichia coli
MAMAAVCGTSGIASLFSQAAFAADSDIADGQTQRFDFSILQSMAHDLAQTAWRGAPRPLPDTLATMTPQAYNSIQYDAEKSLWHNVENRQLDAQFFHMGMGFRRRVRMFSVDPATHLAREIHFRPELFKYNDAGVDTKQLEGQSDLGFAGFRVFKAPELARRDVVSFLGASYFRAVDDTYQYGLSARGLAIDTYTDSKEEFPDFTAFWFDTVKPGATTFTVYALLDSASITGAYKFTIHCEKSQVIMDVENHLYARKDIKQLGIAPMTSMFSCGTNERRMCDTIHPQIHDSDRLSMWRGNGEWICRPLNNPQKLQFNAYTDNNPKGFGLLQLDRDFSHYQDIMGWYNKRPSLWVEPRNKWGKGTIGLMEIPTTGETLDNIVCFWQPEKAVKAGDEFAFQYRLYWSAQPPVHCPLARVMATRTGMGGFSEGWAPGEHYPEKWARRFAVDFVGGDLKAAAPKGIEPVITLSSGEAKQIEILYIEPIDGYRIQFDWYPTSDSTDPVDMRMYLRCQGDAISETWLYQYFPPAPDKRQYVDDRVMS

SEQ ID NO: 4658 - protein, 686 aa, Escherichia coli; identical to SEQ ID NO: 3015

SEQ ID NO: 4659 - protein, 191 aa, Escherichia coli; identical to SEQ ID NO: 2727

SEQ ID NO: 4660 - protein, 760 aa, Escherichia coli; identical to SEQ ID NO: 3992

SEQ ID NO: 4661 - protein, 367 aa, Escherichia coli
MKVKVLSLLVPALLVAGAANAAEVYNKDGNKLDLYGKVDGLHYFSDNKDVDGDQTYMRLGFKGETQVTDQLTGYGQWEYQIQGNSAENENNSWTRVAFAGLKFQDVGSFDYGRNYGVVYDVTSWTDVLPEFGGDTYGSDNFMQQRGNGFATYRNTDFFGLVDGLNFAVQYQGKNGNPSGEGFTSGVTNNGRDALRQNGDGVGGSITYDYEGFGIGGAISSSKRTDAQNTAAYIGNGDRAETYTGGLKYDANNIYLAAQYTQTYNATRVGSLGWANKAQNFEAVAQYQFDFGLCPSLAYLQSKGKNLGRGYDDEDILKYVDVGATYYFNKNMSTYVDYKINLLDDNQFTRDAGIDTDNIVALGLVYQF

SEQ ID NO: 4662 - protein, 233 aa, Escherichia coli; identical to SEQ ID NO: 2006

SEQ ID NO: 4663 - protein, 83 aa, Escherichia coli
  MOD_RES (13)..(13): Any amino acid
  MOD_RES (43)..(43): Any amino acid
MKKMFMAVLFALXSVNAMAADCAKGKIEFSKYNEBDTFTVKVXGKEYWTSRWNLQPLLQSAQLTGMTVTIKSSTCESGSGFAE

SEQ ID NO: 4664 - protein, 236 aa, Escherichia coli; identical to SEQ ID NO: 2726

SEQ ID NO: 4665 - protein, 386 aa, Escherichia coli; identical to SEQ ID NO: 3094

SEQ ID NO: 4666 - protein, 747 aa, Escherichia coli; identical to SEQ ID NO: 4126

SEQ ID NO: 4667 - protein, 230 aa, Escherichia coli; identical to SEQ ID NO: 3348

SEQ ID NO: 4668 - protein, 83 aa, Escherichia coli
MKKMFMAVLFALASVNAMAADCAKGKIEFSKYNEDDTFTVKVDGKEYWTSRWNLQPLLQSAQLTGMTVTIKSSTCESGSGFAE

SEQ ID NO: 4669 - protein, 161 aa, Escherichia coli; identical to SEQ ID NO: 2582

SEQ ID NO: 4670 - protein, 729 aa, Escherichia coli
MLSTQFNRDNQHQAIIKPSLLAGCIALALLPSAAFAAPVTEETVIVEGSATAPDDGENDYNVTSTSAGTKMQMTQRDIPQSVTIVSQQRMEDQQLQTLGEVMENTLGISKSQADSDRALYYSRGFQIDNYMVDGIPTYFESRWNLGDALSDMALFERVEVVRGATGLMTGTGNPSAAINMVRKHATSREFKGDVSAEYGSWNKERYVADLQSPLTEDGKIRARIVGGYQNNDSWLDRYNSEKTFFSGIVDADLGDLTMLSAGYEYQRIDVNSPTWGGLPRWNTDGSSNSYDRARSTAPDWAYNDKEINKVFMTLKQRFADTWQATLNATHSEVEFDSKMMYVDAYVNKADGMLVGPYSNYGPGFDYVGGTGWNSGKRKVDALDLFADGSYELFGRQHNLMFGGSYSKQNNRYFSSWANIFPDEIGSFYNFNGNFPQTDWSPQSLAQDDTTHMKSLYAATRVTLADPLHLILGARYTNWRVDTLTYSMEKNHTTPYAGLVFDINDNWSTYASYTSIFQPQNDRDSSGKYLTPITGNNYELGLKSDWMNSRLTTTLAIFRIEQDHVAQSTGTPIPGSNGETAYKAVDGTVSKGVEFELNGAITDNWQLTFGATRYIAEDNEGNAVNPNLPRTTVKMFTSYRLPVMPELTVGGGVNWQNRVYTDTVTPYGTFRAEQGSYALVDLFTRYQVTKNFSLQGNVNNLFDKTYDTNVEGSIVYGAPRNFSITGTYQF

SEQ ID NO: 4671 - protein, 191 aa, Escherichia coli; identical to SEQ ID NO: 2727

SEQ ID NO: 4672 - protein, 118 aa, Escherichia coli [sequence omitted]

SEQ ID NO: 4673 - protein, 412 aa, Escherichia coli
MPNHSNFRLRGIACYIALAISGGSVNAWADDSIQFDPRFLELKGDTKIDLGKFSKKGYVDAGKYNLRVFINKQPLSDEYDINWYVSENDPTKTYACLTPELVAALGLKEGIAKSLQWTHNDECLKPGQLDGMEVENDLSQSALLLTVPQAYLEYTSSDWDPPSRWDDGIPGLIADYSLNAQTRHQEQGGEDSHDISGNGTVGANLGAWRFRADWQSDYQHTRSNDDDDDSSNSTTSKNWDWSRYYAWRALPSLKAKLSLGEDYLNSDIFDGFNYIGSSVSTDDQMLPPNLRGYAPDVSGVAHSSAKVTISQMGRVLYETQVPAGPFRIQDIGDSVSGTLHVRVEEQNGQVQEYDVTTASMPFLTRQGQVRYKVMSGASGRLEPQDRRRLFLWRRSVMGGGRWLVALRWRAGR

SEQ ID NO: 4674 - protein, 200 aa, Escherichia coli; identical to SEQ ID NO: 1801

SEQ ID NO: 4675 - protein, 518 aa, Escherichia coli; identical to SEQ ID NO: 2350

SEQ ID NO: 4676 - protein, 364 aa, Escherichia coli; identical to SEQ ID NO: 2848

SEQ ID NO: 4677 - protein, 828 aa, Escherichia coli; identical to SEQ ID NO: 2388

SEQ ID NO: 4678 - protein, 663 aa, Escherichia coli
MFRLNPFVRVGLCLSAISCAWPVLAVDDDGETMVVTASSVEQNLKDAPASISVITQEDLQRKPVQNLKDVLKEVPGVQLTNEGDNRKGVSIRGLDSSYTLILVDGKRVNSRNAVFRHNDFDLNWIPVDSIERIEVVRGPMSSLYGSDALGGVVNIITKKIGQKWSGTVTVDTTVQEHRDRGDTYNGQFFTSGPLIDGVLGMKAYGSLAKREKDDPQNSTTTDTGETPRIEGFSSRDGNVEFAWTPNQNHDFTAGYGFDRQDRDSDSLDKNRLERQNYSVSHNGRWDYGTSELKYYGEKVENKNPGNSSPITSESNTVDGKYTLPLTAINQFLTVGGEWRHDKLSDAVNLTGGTSSKTSASQYALFVEDEWRIFEPLALTTGVRMDDHETYGEHWSPRAYLVYNATDTVTVKGGWATAFKAPSLLQLSPDWTSNSCRGACKIVGSPDLKPETSESWELGLYYMGEEGWLEGVESSVTVFRNDVKDRISISRTSDVNAAPGYQNFVGFETGANGRRIPVFSYYNVNKARIQGVETELKIPFNDEWKLSLNYTYNDGRDVSNGENKPLSDLPFHTANGTLDWKPLALEDWSFYVSGHYTGQKRADSATAKTPGGYTIWNTGAAWQVTKDVKLRAGVLNLGDKDLSRDDYSYNEDGRRYFMAVDYRF

SEQ ID NO: 4679 - protein, 866 aa, Escherichia coli
MSRKIIKTHNNKLTYIASFCALLLSPCAISAEHVEYDNTFLMGQDASNIDLSRYTEGNPTLPGVYDVSVYINDQPVINQSISFITLEGKKNAQACITLKNLLQFHINKPDINAENSILLQREGELGDCLDLANIIPQASVHYDVNDQRLDINVPQAWVMKNYQNYVDSSLWENGINAAMLAYNVNAYHSEIPDRKNDSVYAAFNGGINLGAWRLRATGNYNWMTNVGSDYDFQNRYLQRDLASLRSQLIVGESYTTGETFDAVSIRGIRLYSDSRMLPPALASFAPIIHGVANTNAKVTITQGGYKIYETTVPPGAFVIDDLSPSGYGSDLIITIEESDGIKRTFSQPFSSVIQMQRPGVGRWDISAGQVLKDDIQNEPNLFQASYYYGLNNYLTGYTGIQITDNNYTAGLLGLGLNTAYGAFSVDVTHSDVQIPDDKTYRGQSYRISWNKLFEDTRTSLNIAAYRYSTQNYLGLNDALTLIDEVKHPEQDLEPKNMRNYSRMKNQVTVSINQPLKFEKKDYGSFYLAGSWSDYWADGQNNTNYSIGYSNSASWGSYSISAQRSWSQDGGNEDSIYLSFSIPIEKLLGSEHRDSGFQSIDTQLNSDFNGSNQLSISSSGYSTENHISYSVNTGYSMMKSSDDLGYIGGYASYESPWGTLSSSVSASSDNSRQISFNTDGGFVLHSGGLTFSNDSFSDSDTLAVVQAPGAKGARINYGNSTIDRWGYGVTNALSPYHENRIALDINGLENDVELKSTSAITVPRQGSVVFAGFETVQGQSAIMNIKRTDGKNIPFAADIYDENGNIIGNVGQGGQAFVRGIEQQGNIRINWLDDGKPVTCLAHYQQSAAPEKIAQTIILNGISCQIQ

SEQ ID NO: 4680 - protein, 266 aa, Escherichia coli; identical to SEQ ID NO: 3338

SEQ ID NO: 4681 - protein, 102 aa, Escherichia coli
MKKVLALVVAAAMGLSSAAFAAETATTPAPTVTTTKAAPAKTTHHKKQHKAAPAQKAQAAKKHHKNTKAEQKAPEQKAQAAKKHAKKHSHQQPAKPAAQPAA

SEQ ID NO: 4682 - protein, 883 aa, Escherichia coli
MTAFRAAFKAYRMHQVLLLPRFARLTIALGLATAVFPVDAEYYFNPRFLSNDLAESVDLSAFTKGREAPPGTYRVDIYLNDEFMTSRDITFIADDNNADLIPCLSTDLLVSLGIKKSALLDNKEHSAEKHVPDNSACTPLQDRLADASTEFDVGQQHLSLSVPQIYVGRMARGYVSPDLWEEGINAGLLNYSFNGNSINNRSNHNAGKSNYAYLNLQSGINIGSWRLRDNSTWSYNSGSSNSSDSNKWQHINTSAERDIIPLRSRLTVGDSYTDGDIFDSVNFRGLKINSTEAMLPDSQHGFAPVIHGIARGTAQVSVKQNGYDVYQTTVPPGPFTIDDINSAANGGDLQVTIKEADGSIQTLYVPYSSVPVLQRAGYTRYALAMGEYRSGNNLQSSPKFIQGSLMHGLEGNWTPYGGMQIAEDYQAFNLGIGKDLGLFGAFSFDITQANTTLADGTRHSGQSIKSVYSKSFYQTGTNIQVAGYRYSTQGFYNLSDSAYSRMSGYTVKPPTGDSNEQTQFIDYFNLFYSKRGQEQISISQQLGHYGTTFFSASRQSYWNTSRSDQQISFGLNVPFGDITTSLNYSYSNNIWQNDRDHLLAFTLNVPFSHWMRTDSQSAFRNSNASYSMSNDLKGGMTNLSGVYGTLLPDNNLNYSVQVGNTHGGNTSSGTSGYSSLNYRGAYGNTNIGYSRSGDSSQIYYGMSGGIIAHADGITFGQPLGDTMVLVKAPGADNVKIENQTGIHTDWRGYAILPFATEYRENRVALNANSLADNVELDETVVTVIPTHGAIARATFNAQIGGKVLMTLKYGNKSVPFGAIVTHGENKNGSIVAENGQVYLTGLPQSGKLQVSWGNDKNSNCIVDYKLPAVSPGTLLNQQTAICR

SEQ ID NO: 4683 - protein, 369 aa, Escherichia coli
MKKLTVTISAVATAVLMAVSAQAAEIYNKDGNKLDLYGKVDGLHYFSSNKDENGDESYMRMGIKGETQINDDLTGYGHWEYQIQANTPENENHAWTRLAFAGLKLSDYGSLDYGRNYGVVYDVTSWTDVLPEFGGDTYSADNFMQGRGNGFATYRNTDFFGLVDGLNFAVQYQGENGGVSGENTTNNGRGALRQNGNGVGGSITYEYDGFSIGGAVSSSQRTWDQNHTGLMGTGNRAETYTGGLKYDANNVYLAAQYTQTYNATLAGNLGWANKAQNLELVAQYQFDFGLRPSLAFLQSKGKKLGSINGRNYDNQDILKYVDVGATYYFNKNMSTYVDYKINLLKDNQFTRDAGINTDDIVAVGLVYQF

SEQ ID NO: 4684 - protein, 208 aa, Escherichia coli; identical to SEQ ID NO: 1949

SEQ ID NO: 4685 - protein, 656 aa, Escherichia coli
MRLKKRYLCTALSLAFTQQAVAAQESDTLTVWSSPVSSTTTTVLDQPTMKALDKQNVAQALSVVPGVVLQKSGSRNEEQVKVRGFDSRQVPVYFDGVPIYVPYDGNLDLARILTNNLGAVEVSKGYSSLLQGPNQMGGAINITTQKPTKPLEASLGYRQGWSRSQDNAYDMHASFAASSDLGYLQVSGSQLKQDFLGLPHGVNNDIAGKHGKMINSSADDKRGIVKLGFTPRENDEYTVTYIKQDGEKDNPPYSGNSGQKSRYWQWPEYDKESFYYQGTTQLNDRFTLKSRLYRDTFENTLMMYNSLADLKNKKGSYSHYSDYSDGAGLQLAADVRENDLLSFAVNWKDDVHREKGAPHAAYDRYEDRTWSLASEYQWAAADNVDVVAGISYDWRDSVEAKKHEKDGSITHYDDNNQSAFNWQVMGKYHFANEDTLALSYYDRTRFPTLKERYTTSKPAYNQIAIVNPQLKPERARGVDLTWNGAFTHDWGFEVSVYYNRVSDAILSHNIDADTIQNQNSGTVDYSGLDAGIKGKISNILDVGLSYALIHADAKRKDIGKITDLPTQTMTAWMTLKPWEPLSVTLSEEARSSSYSNSDGSQKAAGFAVTHIRADYTLGHGFSVNASVNNLFDTKYAYSEGFIEEGRNFWAGIAYTF

SEQ ID NO: 4686 - protein, 880 aa, Escherichia coli; identical to SEQ ID NO: 3456

SEQ ID NO: 4687 - protein, 837 aa, Escherichia coli
MEQMYKKLKLTTISELIKNIYCSLSVLIIGCASAYAVEFNKDLIEAEDRENVNLSQFETDGQLPVGKYSLNALINNKRTPIHLDLQWVLIDNQTAVCLTPEQLTLLGFTDEIIEEAQQNLIDGCYPIEKEKQITTYLDKGKMQLSISAPQAWLKYKDANWTPPELWDHGIAGAFLDYNLYASHYAPHQGDNSQNISSYGQAGVNLGAWRLRTDYQYDQSFNNGKSQANNLDFPRIYLFRPIPAINAKLTIGQYDTESSIFDSFHFSGVSLKSDENMLPPDLRGYAPQITGVAQTNAKVTVSQNNRIIYQENVPPGPFAITNLFNTLQGQLDVKVEEEDGQVTQWQVASNSIPYLTRKGQIRYTTAMGKPTSVGGDSLQQPFFWTGEFSWGWLNNVSLYGGSVLTNRDYQSLAAGVGFNLNSLGSLSFDVTRSDAQLHNQDKETGYSYRANYSKRFESTGSQLTFAGYRFSDKNFVTMNEYINDTNHYTNYQNEKESYIVTFNQYLESLRLNTYVSLARNTYWDASSNVNYSFSLSRDFDIGPLKNVSTSLTFSRINWEEDNQDQLYLNISIPWGTSRTLSYGMQRNQDNKISHTASWYDSSDRNNSWSVSASGDNDEFKDMKASLRASYQHNTENGRLYLSGTSQRDNYYSLNASWNGSFTATRHGAAFHDYSGSADSRFMIDADGAEDIPLNNKRAVTNRYGIGVIPSVSSYITTSLSVDTRNLPENVDIENSVITTTLTEGAIGYAKLDTRKGYQIMGVIRLADGSHPPLGISVKDKTSHKELGLVADGGFVYLNGIQDDSKLTLRWGDKSCFIQPPNSSNLTTGTVILPCISQN

SEQ ID NO: 4688 - protein, 351 aa, Escherichia coli
MKKSTLALVVMGIVASVSVQAAEIYNKDGNKLDVYGKVKAMHYMSDNDSKDGDQSYIRFGFKGETQINDQLTGYGRWEAEFAGNKAESDTAQQKTRLAFAGLKYKDLGSFDYGRNLGALYDVEAWTDMFPEFGGDSSAQTDNFMTKRASGLATYRNTDFFGVIDGLNLTLQYQGKNENRDVKKQNGDGFGTSLTYDFGGSDFAISGAYTNSDRTNEQNLQSRGTGKRAEAWATGLKYDANNIYLATFYSETRKMTPITGGFANKTQNFEAVAQYQFDFGLRPSLGYVLSKGKDIEGIGDEDLVNYIDVGATYYFNKNMSAFVDYKINQLDSDNKLNINNDDIVAVGMTYQF

SEQ ID NO: 4689 - protein, 816 aa, Escherichia coli
MNIYRLSFVSCLVVAMPCALAVEFNLNVLDKSMRDRIDISLLKEKGVIAPGEYFVSVAVNNNQISNGQKINWHKNDDKTIPCINDLLVDKFGLKPEVRQSLPLINQCVDFSSRPEMLFNFDQANQQLNITIPQAWLAWHSENWTPPSTWKEGVAGVLMDYNLFASSYRPQDGSSSTNLNAYGTAGINTGAWRLRSDYQLNQTDSDDNHEQSGEISRTYLFRPLPQLGSKLTLGETDFSSNIFDGFSYTGAALASDDRMLPWELRGYAPQISGIAKTNATVTISQSGRVIYQKKVPPGPFIIDDLNQSVQGTLDVKVTEEDGRVNNFQVSAASTPFLTRQGQVRYKLAAGQPRPSMSHQTENETFFSNEVSWGMLSNTSLYGGLLLSGDDYHSAAIGIGQNMLWLGALSFDVTWASSHFDTQQDERGLSYRFNYSKQVDATNSTISLAAYRFSDRHFHSYANYLDHKYNDSDAQDEKQTISLSVGQPITPLNLNLYANLLHQTWWNADASTTANITAGFNVDIGDWRDISISTSFNTTHYEDKDRDNQIYLSISLPFGNGGRVGYDMQNSSHSTTHRMSWNDTLDERNSWGMSAGLQSDRPDNGAQVSGNYQHLSSAGEWDISGTYAANDYSSVSSSWSGSFTATQYGAAFHRRSSTNEPRLMVSTDGVADIPIQGNLDYTNHFGIAVVPLISSYQPSTVAVNMNDLPDGVTVAENVIKETWIEGAIGYKSLASRSGKDVNVIIRNASGQFPPLGADIRQDDSGISVGMVGEEGHAWLSGVAENQKFTVVWGDSQHCSLHLPEHMEDTANRLILPCH

SEQ ID NO: 4690 - protein, 678 aa, Escherichia coli
MVPSTFSRLKAARCLPVVLAALIFAGCGTHTPDQSTAYMQGTAQADSAFYLQQMQQSSDDTRINWQLLAIRALVKEGKTGQAVELFNQLPQELNDSQRREKTLLAAEIKLAQKDFAGAQNLLAKITPADLEQNQQARYWQAKIDASQGRPSIDLLRALIAQEPLLGAKEKQQNIDATWQALSSMTQEQANTLVINADENILQGWLDLQRIWFDNRNDPDMMKAGIADWQKRYPNNPGAKMLPTQLVNVKAFKPASTNKIALLLPLNGQAAVFGRTIQQGFEAAKNIGTQPVAAQVAAAPAADVAEQPQPQTVDGVASPAQASVSDLTGEQPAAQPVPVSAPAATTAAVSAPANPSAELKIYDTSSQPLSQILNQVQQDGASIVVGPLLKNNVEELLKSNTPLNVLALNQPENIENRVNICYFALSPEDEARDAARHIRDQGKQAPLVLIPRSSLGDRVANAFAQEWQKLGGGTVLQQKFGSTSELRAGVNGGSGIALTGSPITPRATTDSDMTTNNPTLQTTPTDDQFTNNGGRVDAVYIVATPGEIAFIKPMIAMRNGSQSGATLYASSRSAQGTAGPDFRLEMEGLQYSEIPMLAGGNLPLMQQALSAVNNDYSLARMYAMGVDAWSLANHFSQMRQVQGFEINGNTGSLTANPDCVINRKLSWLQYQQGQVVPAS

SEQ ID NO: 4691 - protein, 869 aa, Escherichia coli
MKIPTTTDIPQRYTWCLAGICYSSLAILPSFLSYAESYFNPAFLLENGTSVADLSRFERGNHQPAGVYRVDLWRNDEFIGSQDIVFESTTVNTGDKSGGLMPCFNQALLERIGLNSSAFPELAQQQNNKCINLLKAVPDATINFDFAAMRLNITIPQIALLSSAHGYIPPEEWDEGIPALLLNYNFTGNRGNGNDSYFFSELSGINIGPWRLRNNGSWNYFRGNGYHSEQWNNIGTWVQRAIIPLKSELVMGDGNTGSDIFDGVGFRGVRLYSSDNMYPDSQQGFAPTVRGIARTAAQLTIRQNGFIIYQSYVSPGAFEITDLHPTSSNGDLDVTIDERDGNQQNYTIPYSTVPILQREGRFKFDLTAGDFRSGNSQQSSPFFFQGTALGGLPQEFTAYGGTQLSANYTAFLLGLGRNLGNWGAVSLDVTHARSQLADDSRHEGDSIRFLYAKSMNTFGTNFQLMGYRYSTQGFYTLDDVAYRRMEGYEYDYDYDGEHRDEPIIVNYHNLRFSRKDRLQLNISQSLNDFGSLYISGTHQKYWNTSDSDTWYQVGYTSSWVGISYSLSFSWNESVGIPDNERIVGLNVSVPFNVLTKRRYTRENALDRDYASFNANRNSNGQNSWLAGVGGTLLEGHNLSYHVSQGDTSNNGYTGSATANWQAAYGTLGVGYNYDRDQHDVNWQLSGGVVGHENGITLSQPLGDTNVLIKAPGAGGVRIENQTGILTDWRGYAVMPYATVYRYNRIALDTNTMGNSIDVEKNISSVVPTQGALVRANFDTRIGVRALITVTQGGKPVPFGSLVRENSTGITSMVGDDGQVYLSGAPLSGELLVQWGNGANSRCIAHYVLPKQSLQQAVTVISAVCTHPGS

SEQ ID NO: 4692 - protein, 746 aa, Escherichia coli
MNKKIHSLALLVNLGIYGVAQAQEPTDTPVSHDDTIVVTAAEQNLQAPGVSTITADEIRKNPVARDVSEIIRTMPGVNLTGNSTSGQRGNNRQIDIRGMGPENTLILIDGKPVSSRNSVRQGWRGERDTRGDTSWVPPEMIERIEVLRGPAAARYGNGAAGGVVNIITKKGSGEWHGSWDAYFNAPEHKEEGATKRTNFSLTGPLGDEFSFRLYGNLDKTQADAWDINQGHQSARAGTYATTLPAGREGVINKDINGVVRWDFAPLQSLELEAGYSRQGNLYAGDTQNTNSDSYTRSKYGDETNRLYRQNYSLTWNGGWDNGVTTSNWVQYEHTRNSRIPEGLAGGTEGKFNEKATQDFVDIDLDDVMLHSEVNLPIDFLVNQTLTLGTEWNQQRMKDLSSNTQALTGTNTGGAIDGVSATDRSPYSKAEIFSLFAENNMELTDSTIVTPGLRFDHHSIVGNNWSPALNISQGLGDDFTLKMGIARAYKAPSLYQTNPNYILYSKGQGCYASAGGCYLQGNDDLKAETSINKEIGLEFKRDGWLAGVTWFRNDYRNKIEAGYVAVGQNVVGTDLYQWDNVPKAVVEGLEGSLNVPVSETVMWTNNITYMLKSENKTTGDRLSIIPEYTLNSTLSWQAREDLSMQTTFTWYGKQQPKKYNYKGQPAVGPETKEISPYSIVGLSATWDVTKNVSLTGGVDNLFDKRLWRAGNAQTTGDLAGANYIAGAGAYTYNEPGRTWYMSVNTHF

SEQ ID NO: 4693 - protein, 430 aa, Escherichia coli; identical to SEQ ID NO: 2617

SEQ ID NO: 4694 - protein, 193 aa, Escherichia coli; identical to SEQ ID NO: 2252

SEQ ID NO: 4695 - protein, 331 aa, Escherichia coli
MKKPVVIGLAVVVLAAVVAGGYWWYQSRQDNGLTLYGNVDIRTVNLSFRVGGRVESLAVDEGDAVKAGQVLGELDHKPYEIALMQAKAGVSVAQAQYDLMLAGYRDEEIAQAAAAVKQAQAAYDYAQNFYNRQQGLWKSRTISANDLENARSSRDQAQATLKSAQDKLRQYRSGNREQDIAQAKASLEQAQAQLAQAELNLQDSTLIAPSDGTLLTRAVEPGTVLNEGGTVFTVSLTRPVWVRAYVDERNLDQAQPGRKVLLYTDGRPDKPYHGQIGFVSPTAEFTPKTVETPDLRTDLVYRLRIVVTDADDALRQGMPVTVQFGDEAGHE

SEQ ID NO: 4696 - protein, 660 aa, Escherichia coli
MGAFFAGENGNSTTGDAIYMRGADTSNSIYIDGIRDIGSVSRDTFNTEQVEVIKGPSGTDYGRSAPTGSINMISKQPRNDSGIDASASIGSAWFRRGTLDVNQVIGDTTAVRLNVMGEKTHDAGRDKVKNERYGVAPSVAFGLGTANRLYLNYLHVTQHNTPDGGIPTIGLPGYSAPSAGTAALNHSGKVDTHNFYGTDSDYDDSTTDTATMRFEHDINDNTTIRNTTRWSRVKQDYLMTAIMGGASNITQPTSDVNSWTWSRTANTKDVSNKILTNQTNLTSTFYTGSIGHDVSTGVEFTRETQTNYGVNPVTLPAVNIYHPDSSIHPGGLTRNGANANGQTDTFAIYAFDTLQITRDFELNGGIRLDNYHTEYDSATACGGSGRGAITCPAGVAKGSPVTTVDTAKSGNLVNWKAGALYHLTENGNVYINYAVSQQPPGGNNFALAQSGSGNSANRTDFKPQKANTSEIGTKWQVLDKRLLLTAALFRTDIENEVEQNDDGTYSQYGKKRVEGYEISVAGNITPAWQVIGGYTQQKATIKNGKDVAQDGSSSLPYTPEHAFTLWSQYQATDDISVGAGARYIGSMHKGSDGAVGTPAFTEGYWVADAKLGYRVNRNLDFQLNVYNLFDTDYVASINKSGYRYHPGEPRTFLLTANMHF

SEQ ID NO: 4697 - protein, 751 aa, Escherichia coli
MRYGVKTEKYPKLFLSHYGKKDERQCADLSVIPQATEEFLFEAQKLVLSIPQVAIRSPLRGVASDLIWEDGISTFLLNWQVEAGHSEFQHYEKTTSDNFWVSLEPGINIGPWRIRNLTTLNKSSGQVGKWESSYIRAERGLNNIKSRLTLGEDYTPADIFASVPFRGVMLGTDENMIPYDQRGFAPVIRGIARTQARIEIRQNGYLIQSQTVAAGPFALTDLPITGSGGEFQVTIFESDGAIQSFNVPFTTPAIALREGYLKYNISAGQYRSSDESVEKAYLWQATAMYGLPRALTVFGGVQTAEHYQAAALGVGLSLGNMGAASLDTIYSRGQQKGYDFDTGNSWRIRYDKSFELTDTSFSAASYQYSNEGYHELSDILDTYRSGANFVFNDTDRKRRRITININQSLGPWGFIGLSGGRDEYKGGDRQDYIGASYSMSWKDISFSVNWTRNRNVGDYFSNRTFNEDTVGMWMSIPLKHWLGKNDNDVNATAQIQHSTRQNTRYEMGLNGRAFDQKLYWDIREQIVPGSKYDADTSRLNMRWSGSYGELVGMYSYNSHTRQMNAGMSGSIAMHSEGITFGQRFGDTMALIAAPGVRGASVGGWPGVSTDSRGYALVSYITPYQENIITLDPTTFPENAEVLQTDTRVVPTKGAVVRAKFKTRVGNRAVVRLARADGTPLPFGTVVTLEGKTEVSNSTGVVDDKGMVYLSGLSEAGKLKAQWGMNSHCYANYRLPVKKGPAGLYLTSAVCI

SEQ ID NO: 4698 - protein, 232 aa, Escherichia coli; identical to SEQ ID NO: 2087

SEQ ID NO: 4699 - protein, 207 aa, Escherichia coli; identical to SEQ ID NO: 2211

SEQ ID NO: 4700 - protein, 478 aa, Escherichia coli
MTRIKINARRIFSLFIPFFFFTSVHAEQTAAPAKPVTVEAKNETFAPQHPDQYLSWKATSEQSERVDALAEDPRLVILWAGYPFSRDYNKPRGHAFAVTDVRETLRTGAPKNAEDGPLPMACWSCKSPDVARLIQKDGEDGYFHGKWARGGPEIVNNLGCADCHNTASPEFAKGKPELTLSRPYAARAMEAIGKPFEKAGRFDQQSMVCGQCHVEYYFDGKNKAVKFPWDDGMKVENMEQYYDKIAFSDWTNSLSKTPMLKAQHPEYETWTAGIHGKNNVTCIDCHMPKVQNAEGKLYTDHKIGNPFDNFAQTCANCHTQDKAALQKVVAERKQSINDLKIKVEDQLVHAHFEAKAALDAGATEAEMKPIQDDIRHAQWRWDLAIASHGIHMHAPEEGLRMLGTAMDKAADARTKLARLLATKGIIHEIQIPDISTKEKAQQSIGLNMEQIKAEKQDFIKTVIPQWEEQARKNGLLSQ

SEQ ID NO: 4701 - protein, 866 aa, Escherichia coli
MYRTQRQHSLLSSGGVPSFIGGLVVFVSAAFNAQAETWFDPAFFKDDPSMVADLSRFEKGQKITPGVYRVDIVLNQTIVDTRNVNFVEITPEKGIAACLTTESLDAMGVNTDAFPAFKQLDKQACAPLAEIIPDASVTFNVNKLRLEISVPQIAIKSNARGYVPPERWDEGINALLLGYSFSGANSIHSSAGSDSGDSYFLNLNSGVNLGPWRLRNNSTWSRSSGQTAEWKNLSSYLQRAVIPLKGELTVGDDYTAGDFFDSVSFRGVQLASDDNMLPDSLKGFAPVVRGIAKSNAQVTIKQNGYTIYQTYVSPGAFEISDLYSTSSSGDLLVEIKEADGSVNSYSVPFSSVPLLQRQGRIKYAVTLAKYRTNSNDQQESKFAQATLQWGGPWGTTWYGGGQYAEYYRAAMFGLGFNLGDFGAISFDATQAKSTLADQSEHKGQSYRFLYAKTLNQLGTNFQLMGYRYSTSGFYTLSDTMYKHMDGYEFNDGDDEDTPMWSRYYNLFYTKRGKLQVNISQQLGEYGSFYLSGSQQTYWHTDQQDRLLQFGYNTQIKDLSLGVSWNYSKSRGQPDADQVFALNFSLPLNLLLPKSNDSYTRKKNYAWMTSNTSIDNEGHTTQNLGLTETLLDDGNLSYSVQQGYNSEGKTANGSTSMDYKGAFADARVGYNYSDNGSQQQLNYALSGSLVAHSQGITLGQSLGETNVLIAAPGAENTRVANSTGLKTDWRGYTVVPYATSYRENRIALDAASLKRNVDLENAVVNVVPTKGALVLAEFNAHAGARVLMKTSKQGMPLRFGAMATLDGAQTISGIIDDDGSLYMSGLPAKGTITVRWGDAPDQICHISYELTEQQINAAITRMDSVCE

SEQ ID NO: 4702 - protein, 362 aa, Escherichia coli
MKKFTVAISAVAVSVLMAMSAQAAEIYNKDGNKLDLYGKVNAEHYFSESAKHAGDMTYTRLGFRGETQINDQLTGFGQWEYEFEGNRPEGTGATDDDHTRLAFAGLRFGDYGAIDYGRNYGVAYDIGSWTDVLPEFGGDALTQTDVFMLGRATGVATYRNNDFFGMVDGLNFALQYQGKNDDRDATEANGDGYGMSASYDYEGVAVGAAYTKSDRTNAQETYANVSPLNASGKTAEVWATGFKYDANNIYIATTYSKTQNMTVFGKNHIANNARNFEAVAQYQFDFGLRPSIAYLHSRGDNLKGFASQDLLEYVDLGATYYFNKNMSTFVDYKINLIDKSEFTQKAGIATDDIVAVGMTYQF

SEQ ID NO: 4703 - protein, 614 aa, Escherichia coli
MIKKASLLTACSVTAFSAWAQDTSPDTLVVTANRFEQPRSTVLAPTTVVTRQDIDRWQSTSVNDVLRRLPGVDITQNGGSGQLSSIFIRGTNASHVLVLIDGVRLNLAGVSGSADLSQFPIALVQRIEYIRGPRSAVYGSDAIGGVVNIITTRDEPGTEISAGWGSNSYQNYDVSTQQQLGDKTRVTLLGDYAHTHGYDVVAYGNTGTQAQTDNDGFLSKTLYGALEHNFTDAWSGFVRGYGYDNRTNYDAYYSPGSPLLDTRKLYSQSWDAGLRYNGELIKSQLITSYSHSKDYNYDPHYGRYDSSATLDEMKQYTVQWANNVIVGHGSIGAGVDWQKQTTTPGTGYVEDGYDQRNTGIYLTGLQQVGDFTFEGAARSDDNSQFGRHGTWQTSAGWEFIEGYRFIASYGTSYKAPNLGQLYGFYGNPSLNPEKSKQWEGAFEGLTAGVNWRISGYRNDVSDLIDYDDHTLKYYNEGKARIKGVEATANFDTGPLTHTVSYDYVDARNAITDVPLLRRAKQQVKYQLDWQLYDFDWGITYQYLGTRYDKDYSSYPYQTVKMGGVSLWDLAVAYPVTSHLTVRGKIANLFDKDYETVYGYQTAGREYTLSGSYTF

SEQ ID NO: 4704 - protein, 713 aa, Escherichia coli
MAKFTPSFSGIKGRALFSLLFAAPMIHATDTATTKDGETITVTANANTATEATDGYQPLSTSTATLTDMPMLDIPQVVNTVSDQVLENQNATTLDEALYNVSNVVQTNTLGGTQDAFVRRGFGANRDGSIMTNGLRTVLPRSFNAATERVEVLKGPASTLYGILDPGGLINVVTKRPEKTFHGSVSATSSSFGGGTGQLDITGPIEGTQLAYRLTGEVQDEDYWRNFGKERSTFIAPSLTWFGDNATVTMLYSHRDYKTPFDRGTIFDLTTKQPVNVDRKIRFDEPFNITDGQSDLAQLNAEYHLNSQWTARFDYSYSQDKYSDNQARVTAYDATTGTLTRRVDATQGSTQRMHATRADLQGNVDIAGFYNEILGGVSYEYYDLLRTDMIRCKKAKDFNIYNPVYGNTSKCTTVSASDSDQTIKQESYSAYAQDALYLTDNWIAVAGIRYQYYTQYAGKGRPFNVNTDSRDEQWTPKLGLVYKLTPSVSLFANYSQTFMPQSSIASYIGDLPPESSNAYEVGAKFELFDGITADIALFDIHKRNVLYTESIGDETIAKTAGRVRSRGVEVDLAGALTENINIIASYGYTDAKVLEDPDYAGKPLPNVPRHTGSLFLTYDIHNMPGNNTLTFGGGGHGVSRRSATNGADYYLPGYFVADAFAAYKMKLQYPVTLQLNVKNLFDKTYYTSSIATNNLGNQIGDPREVQFTVKMEF

SEQ ID NO: 4705 - protein, 207 aa, Escherichia coli
MPLPDFRLIRLLPLAALVLTACSVTTPKGPGKSPDSPQWRQHQQDVRNLNQYQTRGSFAYISDQQKVYARFFWQQTGQDRYRLLLTNPLGSTELELNAQPGNVQLVDNKGQRYTADDAEEMIGKLTGMPIPLNSLRQWILGLPGDATDYKLDDQYRLSEITYSQNGKNWKVVYGDYDTKTQPAMPANMELTDGGQRIKLKMDNWIVK

SEQ ID NO: 4706 - protein, 660 aa, Escherichia coli
MSRPQFTSLRLSLLALAVSATLPTFAFATETMTVTATGNARSSFEAPMMVSVIDTSAPENQTATSATDLLRHVPGITLDGTGRTNGQDVNMRGYDHRGVLVLVDGVRQGTDTGHLNGTFLDPALIKRVEIVRGPSALLYGSGALGGVISYDTVDAKDLLQEGQRSGFRVFGTGGTGDHSLGLGASAFGRTENLDGIVAWSSRDRGDLRQSNGETAPNDESINNMLAKGTWQIDSAQSLSGLVRYYNNDAREPKNPQTVEASDSSNPMVDRSTIQRDAQLSYKLAPQGNDWLNADAKIYWSEVRINAQNTGSSGEYREQITKGARLENRSTLFADSFASHLLTYGGEYYRQEQHPGGATTGFPQAKIDFSSGWLQDEITLRDLPITLLGGTRYDSYRGSSDGYKDVDADKWSSRAGMTINPTNWLMLFGSYAQAFRAPTMGEMYNDSKHFSIGRFYTNYWVPNPNLRPETNETQEYGFGLRFDDLMLSNDALEFKASYFDTKAKDYISTTVDFAAATTMSYNVPNAKIWGWDVMTKYTTDLFSLDVAYNRTRGKDTDTGEYISSINPDTVTSTLNIPIAHSGFSVGWVGTFADRSTHISSSYSKQPGYGVNDFYVSYQGQQALKGMTTTLVLGNAFDKEYWSPQGIPQDGRNGKIFVSYQW

SEQ ID NO: 4707 - protein, 432 aa, Escherichia coli; identical to SEQ ID NO: 2026

SEQ ID NO: 4708 - protein, 826 aa, Escherichia coli; identical to SEQ ID NO: 3256

SEQ ID NO: 4709 - protein, 747 aa, Escherichia coli
MARSKTAQPKHSLRKIAVVVATAVSGMSVYAQAAVEPKEDTITVTAAPAPQESAWGPAATIAARQSATGTKTDTPIQKVPQSISVVTAEEMALHQPKSVKEALSYTPGVAVGTRGASNTYDYLIIRGFAADGQSQNNYLNGLKMQGNFYNDAVIDPYMLERAEIMRGPVSVLYGKSSPGGLLNMVSKRPTTEPLKEIQFKAGTDSLFQTGFDFSDALDDDGVYSYRLTGIARSANAQQKGAEEQRYAIAPAFTWRPDDKTNFTFLSYFQNEPETGYYGWLPKEGTVEPLPNGKRLPTDFNEGAKNNTYSRNEKMVGYSFDHEFNDTFTVRQNLRFAENKTSQNSVYGYGVCSDPANAYSKQCAALAPADKGHYLARKYVVDDEKLQNFSVDTQLQSKFATGDIDHTLLTGVDFMRMRNDINAWFGYDDSVPLLDLYNPVNTDFDFNAKDPDNSGPYRILNKQKQTGVYVQDQAQWDKVLVTLGGRYDWADQESLNRVAGTTDKRDDKQFTWRGGVNYLFDNGVTPYFSYSESFEPSSQVGKDGNIFAPSKGKQYEVGVKYVPEDRPIVVTGAVYNLTKTNNLMADPEGSFFSVEGGEIRARGVEIEAKAALSASVNVVGSYTYTDAEYTTDTTYKGNTPAQVPKHMASLWADYTFFDGPLSGLTLGTGGRYTGSSYGDPANSFKVGSYTVVDALVRYDLARVGMAGSNVALHVNNLFDREYVASCFNTYGCFWGAERQVVATATFRF

SEQ ID NO: 4710 - protein, 878 aa, Escherichia coli
MSYLNLRLYQRNTQCLHIRKHRLAGFFVRLFVACAFTAQAPLSSAELYFNPRFLADDPQAVADLSRFENGQELPPGTYRVDIYLNNGYMATRDVTFNTGDSEQGIVPCLTRAQLASMGLNTASVSGMNLLADDACVPLTSMIHDATAQLDVGQQRLNLTIPQAFMSNRARGYIPPELWDPGINAGLLNYNFSGNSVQNRIGGNSHYAYLNLQSGLNIGAWRLRDNTTWSYNSSDSSSGSKNKWQHINTWLERDIIPLRSRLTLGDGYTQGDIFDGINFRGAQLASDDNMLPDSQRGFAPVIHGIARGTAQVTIKQNGYDIYNSTVPPGPFTINDIYAAGNSGDLQVTIKEADGSTQIFTVPYSSVPLLQREGHTRYSITAGEYRSGNAQQEKPRFFQSTLLHGLPAGWTIYGGTQLADRYRAFNFGIGKNMGALGALSVDMTQANSTLPDDSQHDGQSVRFLYNKSLNESGTNIQLVGYRYSTSGYFNFADTTYSRMNGYNIETQDGVIQVKPKFTDYYNLAYNKRGKLQLTVTQQLGRTSTLYLSGSHQTYWGTSNVDEQFQAGLNTAFEDINWTLSYSLTKNAWQKGRDQMLALNVNIPFSHWLRSDSKSQWRHASASYSMSHDLNGRMTNLAGVYGTLLADNNLSYSVQTGYAGGGDGNSGSTGYATLNYRGGYGNANIGYSHSDDIKQLYYGVSGGVLAHANGVTLGQPLNDTVVLVKAPGAKDAKVENQTGVRTDWRGYAVLPYATEYRENRVALDTNTLADNVDLDNAVANVVPTRGAIVRAEFKARVGIKLLMTLTHNNKPLPFGAMVTSESSQSSGIVADNGQVYLSGMPLAGKVQVKWGEEENAHCVANYQLPPESQQQLLTQLSAECR

SEQ ID NO: 4711 - protein, 785 aa, Escherichia coli
MKKEIFIAAIIFHLLSKGALAEEFNYSFIRGGSKDIPDVLNSNKENVPGKYVVDVVFNGSKIASSTEMSIAKEDAEGICLSDEWLTENGIIINKDFYKNVYNSARQCYLLGNEANSKVAFDQSLQEVSIDLPQAGFQDAAKDGGVWDYGSNGFKIAYDVNTAKNSNQERTTYSSIDGQVNLGEWVLLGKGYAYQGENFDTNNLLLTRAIKSLKSDLQLGKTQLYNSLNNGFTFYGAQLKSNQDMYPWNSRAYSPVINGIARTHARVTIEQSGYTLKSIVVPPGPFVINDLNGVYSGDLIMKIYEEDGSVREQRFPVAVLPNLLRPGTYNYALAMGSKVNQDNGERDKESLFAQMSYDYGFEPFTLNSSLLLDKNYNNIGLGLIRSFGWFGAMSFSGNLSQAKYHNGKNLKGYSTSLKYAKALGDNANLQLIGYRFNSEDYIDYADFTYNSYSFIRNRPKQRYESIVTYQLPEKGMFLNFSAWKEDYWDNYNEVGANLSLTKSFDQITMTLNGGYSRLQNMDADYNVGLSLSVPLSLFDKTHYSFSNVNYDRRTGTSMNTGISGMINQRLSYNASVNQTRDTTGGTLSASYLFDWMQTSATYSQTGKNSSTSLQLGGSVIGVPEGGIIFTPVKNDQLAIVQMKDVPGVMFNGSLPGDKYGRAVIPLTAYNNNTISVNAEKLPKNIELTDNAINVTPTGNAIIYKNVKFKKINTYVVKLYGKNGYVVPMGSIAKNTQGKEVGYVNNGGILLMNLETHDEGVISLDQCQFNTQSLKKNHDQTQEIHCE

SEQ ID NO: 4712 - protein, 222 aa, Escherichia coli
MSKLGISSLFKSILLTAALAVSFTASAFTEGTDYMVLEKPIPNADKTLIKVFSYACPFCYKYDKAVTGPVSEKVKDIVAFTPFHLETKGEYGKQASEVFAVLINKDKAAGISLFDANSQFKKAKFAYYAAYHDKKERWSDGKDPAAFIKTGLDAAGMSQADFEAALKEPAVQETLEKWKASYDVAKIQGVPAYVVNGKYLIYTKSIKSIDAMADLIRELASK

SEQ ID NO: 4713 - protein, 883 aa, Escherichia coli
MTAIRAAFKAYRMHQVLIMPRFARLTIALGLATAVFPVDAEYYFNPRFLSNDLAESVDLSAFTKGREAPPGTYRVDIYLNDEFMTSRDITFIADDNNAELIPCLSTDLLVSLGIKKSELLDNKEHSAEKHVPDNSACTPLQDRLADASTEFDVGQQHLSLSVPQIYVGRMARGYVSPELWEEGINAGLLNYSFNGNSINNRSNHNAGKSNYAYLNLQSGINIGSWRLRDNSTWSYNSGSSNSSNSNKWQHINTSAERDIIPLRSRLTVGDSYTDGDIFDSVNFRGLKINSTEAMLPDSQHGFAPVIHGIARGTAQVSVKQNGYDVYQTTVPPGPFTIDDINSAANGGDLQVTIKEADGSIQTLYVPYSSVPVLQRAGYTRYALAMGEYRSGNNLQSSPKFIQGSLMHGLEGNWTPYGGMQIAEDYQAFNLGIGKDLGLFGAFSFDITQANTTLADGTRHSGQSVKSVYSKSFYQTGTNIQVAGYRYSTQGFYNLSDSAYSRMSGYTVKPPTGDTNEQTQFIDYFNLFYSKRGQEQISISQQLGNYGTTFFSASRQSYWNTSRSDQQISFGLNVPFGDITTSLNYSYSNNIWQNDRDHLLAFTLNVPFSHWMRTDSQSAFRNSNASYSMSNDLKGGMTNLSGVYGTLLPDNNLNYSVQVGNTHGGNTSSGTSGYSSLNYRGAYGNTNVGYSRNGDSSQIYYGMSGGIIAHADGITFGQPLGDTMVLVKAPGADNVKIENQTGIHTDWRGYAILPFATEYRENRVALNANSLADNVELDETVVTVIPTHGAIARATFNAQIGGKVLMTLKYGNKSVPFGAIVTHGENKNGSIVAENGQVYLTGLPQSGKLQVSWGKDKNSNCIVEYKLPEVSPGTLLNQQTAICR

SEQ ID NO: 4714 - protein, 715 aa, Escherichia coli
MLYNIPCRIYILSTLSLCISGIVSTATATSSETKISNEETLVVTTNRSASNLWESPATIQVIDQQTLQNSTNASIADNLQDIPGVEITDNSLAGRKQIRIRGEASSRVLILIDGQEVTYQRAGDNYGVGLLIDESALERVEIVKGPYSVLYGSQAIGGIVNFITKKGGNKLASGVVKAVYNSATAGWEESIAVQGSIGGFDYRINGSYSDQGNRDTPDGRLPNTNYRNNSQGVWLGYNSGNHRFGLSLDRYRLATQTYYEDPDGSYEAFSVKIPKLEREKVGVFYDTDVDGDYLKKIHFDAYEQTIQRQFANEVKTTQPVPSPMIQALTVHNKTDTHDKQYTQAVTLQSHFSLPANNELVTGAQYKQDRVNQRSGGMTSSKSLTGFINKETRTRSYYESEQSTVSLFAQNDWQFADHWTWTMGVRQYWLSSKLTRGDGVSYTAGIISDTSLARESASDHEMVTSTSLRYSGFDNLELRAAFAQGYVFPTLSQLFMQTSAGGSVTYGNPDLKAEHSNNFELGARYNGNQWLIDSAVYYSEAKDYIASLICDGSIVCNGNTNSSRSSYYYYDNIDRAKTWGLEISAEYNGWVFSPYISGNLIRRQYETSTLKTTNTGEPAINGRIGLKHTLVMGQANIISDVFIRAASSAKDDSNGTETNVPGWATLNFAVNTEFGNEDQYRINLALNNLTDKRYRTAHETIPAAGFNAAIGFVWNF

SEQ ID NO: 4715 - protein, 161 aa, Escherichia coli
MKKWLLAAGLGLALATSAQAADKIAIVNMGSLFQQVAQKTGVSNTLENEFKGRASELQRMETDLQAKMKKLQSMKAGSDRTKLEKDVMAQRQTFAQKAQAFEQDRARRSNEERGKLVTRIQTAVKSVASSQSIDLVVDANAVAYNSSDVKDITADVLKQVK

SEQ ID NO: 4716 - protein, 785 aa, Escherichia coli
MKKRIPTLLATMIATALYSQQGLAADLASQCMLGVPSYDRPLVQGDTNDLPVTINADHAKGDYPDDAVFTGSVDIMQGNSRLQADEVQLHQKEAPGQPEPVRTVDALGNVHYDDNQVILKGPKGWANLNTKDTNVWEGDYQMVGRQGRGKADLMKQRGENRYTILDNGSFTSCLPGSDTWSVVGSEIIHDREEQVAEIWNARFKVGPVPIFYSPYLQLPVGDKRRSGFLIPNAKYTTTNYFEFYLPYYWNIAPNMDATITPHYMHRRGNIMWENEFRYLTQAGAGLMELDYLPSDKVYEDEHPEDSNSRRWLFYWQHSGVMDQVWRFNIDYTKVSDPTYFNDFDNKYGSSTDGYATQKFSVGYAVQNFDATLSTKQFQVFDDTSGNSYAAEPQLDVNYYHNDLGPFDTRVYGQAVHFVNTNSNMPEATRVHLEPTINLPLSNTWGSINTEAKLLATHYQQTNLDWYNSNPQNNKLADSVNRVMPQFKVDGKMVFERDMEMLAPGYTQTLEPRAQYLYVPYRDQSDIYNYDSSLLQSDYSGLFRDRTYGGLDRIASANQVTTGITTRVYDDAAVERFNISVGQIYYFTESRTGDDNITWENDDKTGSLVWAGDTYWRISERWGLRGGIQYDTRLDNVATSNSSIEYRRDEDRLVQLNYRYASPEYIQATLPKYYSTAEQYKNGISQVGAVASWPIADRWSIVGAYYYDTNANKQADSMLGVQYSSCCYAIRVGYERKLNGWDNDKQHAVYDNAIGFNIELRGLSSNYGLGTQEMLRSNILPYQNTL

SEQ ID NO: 4717 - protein, 366 aa, Escherichia coli; identical to SEQ ID NO: 4014

SEQ ID NO: 4718 - protein, 446 aa, Escherichia coli; identical to SEQ ID NO: 2182

SEQ ID NO: 4719 - protein, 826 aa, Escherichia coli
MLRMTPLASAIVALLLGIEAYAAEETFDTHFMIGGMKDQQVANIRLDDNQPLPGQYDIDIYVNKQWRGKYEIIVKDNPQETCLSREIIKRLGINTDNFASGKQCLTFEQLVQGGSYTWDIGVFRLDFSVPQAWVEELESGYVPPENWERGINAFYTSYYVSQYYSDYKASGNSKSTYVRFNSGLNLLGWQLHSDASFSKTNSNPGVWKSNTLYLERGFAQLLGTLRVGDMYTSSDIFDSVRFSGVRLFRDMQMLPNSKQNFTPRVQGIAQSNALVTIEQNGFVVYQKEVPPGPFAITDLQLAGGGADLDVSVKEADGSVTTYLVPYAAVPNMLQPGVSKYDFAAGRSHIEGASKQSDFVQAGYQYGFNNLLTLYGGSMVANNYYAFTLGTGWNTRIGAISVDATKSHSKQDNGDVFDGQSYQIAYNKFVSQTSTRFGLAAWRYSSRDYRTFNDHVWANNKDNYRRDENDIYDIADYYQNDFGRKNSFSANMSQSLPEGWGSVSLSTLWRDYWGRSGSSKDYQLSYSNNLRRISYTLAASQAYDENHHEEKRFNIFISIPFDWGDDVTTPRRQIYMSNSTTFDDQGVASNNTGLSGTVGSRDQFNYGVNLSYQYQGNETTAGANLTWNAPVATVNGSYSQSSAYRQAGASVSGGIVAWSGGVNLANRLSETFAVMNAPGIKDAYVNGQKYRTTNRNGVVVYDGMTPYRENYLMLDVSQSDSEAELRGNRKIAAPYRGAVVLVNFDTDQRKPWFIKALRADGQPLTFGYEVNDIHGHNIGVVGQGSQLFIRTNEVPPSVNVAIDKQQGLSCTITFGKEIDESKNYICQ

SEQ ID NO: 4720 - protein, 866 aa, Escherichia coli; identical to SEQ ID NO: 3025

SEQ ID NO: 4721 - protein, 203 aa, Escherichia coli; identical to SEQ ID NO: 2009

SEQ ID NO: 4722 - protein, 539 aa, Escherichia coli; identical to SEQ ID NO: 3050

SEQ ID NO: 4723 - protein, 213 aa, Escherichia coli; identical to SEQ ID NO: 2232

SEQ ID NO: 4724 - protein, 869 aa, Escherichia coli; identical to SEQ ID NO: 3012

SEQ ID NO: 4725 - protein, 843 aa, Escherichia coli; identical to SEQ ID NO: 3042

SEQ ID NO: 4726 - protein, 274 aa, Escherichia coli; identical to SEQ ID NO: 2301

SEQ ID NO: 4727 - protein, 402 aa, Escherichia coli
MLIPGVQAAKPQKVTLMVDDVPVAQVLQALAEQEKLNLVVSPDVSGTVSLHLTDVPWKQALQTVVKSAGLITRQEGNILSVHSVAWQNDNIARQEAEQTRAQANLPLENRNITLQYADAGELAKAGEKLLSAKGSMTVDKRTNRLLLRDNKTALSALEQWVAQMDLPVGQVELSAHIVTINEKSLRELGVKWTLADAQQAGGVGQVTTLGSDLSVATATTHVGFNIGRINGRLLDLELSALEQKQQLDIIASPRLLASHLQPASIKQGSEIPYQVSSGESGATSVEFKEAVLGMEVTPTVLQKGRIRLKLHISQNVPGQVLQQADGEVLAIDKQEIETQVEVKSGETLALGGIFTRKNKSGQDSVPLLGDIPWFGQLFRHDGKEDERRELVVFITPRLVSSE

SEQ ID NO: 4728 - protein, 565 aa, Escherichia coli
MKSPAPSRPQKMALIPACIFLCFAALSVQAEETPVTPQPPDILLGPLFNDVQNAKLFPDQKTFADAVPNSDPLMILADYRMQQNQSGFDLRHFVNVNFTLPKEGEKYVPPEGQSLREHIDGLWPVLTRSTENTEKWDSLLPLPEPYVVPGGRFREVYYWDSYFTMLGLAESGHWDKVADMVANFAHEIDTYGHIPNGNRSYYLSRSQPPFFAMMVELLAQHEGDAALKQYLPQMQKEYAYWMDGVENLQAGQQEKRVVKLQDGTLLNRYWDDRDTPRPESWVEDIATAKSNPNRPATEIYRDLRSAAASGWDFSSRWMDNPQQLNTLRTTSIVPVDLNSLMFKMEKILARASKAAGDNAMANQYETLANARQKGIEKYLWNDQQGWYADYDLKSHKVRNQLTAAALFPLYVNAAAKDRANKMATATKTHLLQPGGLNTTSVKSRQQWDAPNGWAPLQWVATEGLQNYGQKEVAMDISWHFLTNVQHTYDREKKLVEKYDVSTTGTGGGGGEYPLQDGFGWTNGVTLKMLDLICPKEQPCDNVPATRPLSESTTQPVKQNEAEPTP

SEQ ID NO: 4729 - protein, 237 aa, Escherichia coli; identical to SEQ ID NO: 3022

SEQ ID NO: 4730 - protein, 838 aa, Escherichia coli; identical to SEQ ID NO: 3041

SEQ ID NO: 4731 - protein, 368 aa, Escherichia coli
MNKTIMALAIMMASFAANASVLPETPVPFKSGTGAIDNDTVYIGLGSAGTAWYKLDTQAKDKKWTALAAFPGGPRDQATSAFIDGNLYVFGGIDKNSEGLTQVFNDVHKYNPKTNSWVKLMSHAPMGMAGHVTFVHNGKAYVTGGVNQNIFNGYFEDLNEAGKDSTAIDKINAHYFDKKAEDYFFNKFLLSFDPSTQQWSYAGESPWYGTAGAAVVNKGDKTWLINGEAKPGLRTDAVFELDFTGNNLKWNKLDPVSSPDGVAGGFAGISNDSLIFAGGAGFKGSRENYQNGKNYAHEGLKKSYSTDIHLWHNGKWDKSGELSQGRAYGVSLPWNNSLLIIGGETAGGKAVTDSVLISVKDNKVTVQN

SEQ ID NO: 4732 - protein, 266 aa, Escherichia coli; identical to SEQ ID NO: 1894

SEQ ID NO: 4733 - protein, 162 aa, Escherichia coli; identical to SEQ ID NO: 1967

SEQ ID NO: 4734 - protein, 357 aa, Escherichia coli; identical to SEQ ID NO: 2888

SEQ ID NO: 4735 - protein, 673 aa, Escherichia coli
MKMTRLYPLALGGLLLPAIANAQTSQQDESTLVVTASKQSSRSASANNVSSTVVSAPELSDAGVTASDKLPRVLPGLNIENSGNMLFSTISLRGVSSAQDFYNPAVTLYVDGVPQLSTNTIQALTDVQSVELLRGPQGTLYGKSAQGGIINIVTQQPDSTPRGYIEGGVSSRDSYRSKFNLSGPIQDGLLYGSVTLLRQVDDGDMINPATGSDDLGGTRASIGNVKLRLAPDDQPWEMGFAASRECTRATQDAYVGWNDIKGRKLSISDGSPDPYMRRCTDSQTLSGKYTTDDWVFNLISAWQQQHYSRAFPSGSLIVNMPQRWNQDVQELRAATLGDARTVDMVFGLYRQNTREKLNSAYDMPTMPYLSSTGYTTAETLAAYSDLTWHLTDRFDIGGGVRFSHDKSSTQYHGSMLGNPFGDQGKSNDDQVLGQLSAGYMLTDDWRVYTRVAQGYKPSGYNIVPTAGLDAKPFVAEKSINYELGTRYETADVTLQAATFYTHTKDMQLYSGPVGMQTLSNAGKADATGVELEAKWRFAPGWSWDINGNVIRSEFTNDSELYHGNRVPFVPRYGAGSSVNGVIDTRYGALMPRLAVNLVGPHYFDGDNQLRQGTYATLDSSLGWQATERMNISVYVDNLFDRRYRTYGYMNGSSAVAQVNMGRTVGINTRIDFF

SEQ ID NO: 4736 - protein, 686 aa, Escherichia coli
MFWRDMTLSVWRKKTTGLKTKKRLLPLVLAAALCSSPVWAEEATFTANFKDTDLKSFIETVGANLNKTIIMGPGVQGKVSIRTMTPLNERQYYQLFLNLLEAQGYAVVPMENDVLKVVKSSAAKVEPLPLVGEGSDNYAGDEMVTKVVPVRNVSVRELAPILRQMIDSAGSGNVVNYDPSNVIMLTGRASVVERLTEVIQRVDHAGNRTEEVIPLDNASASEIARVLESLTKNSGENQPATLKSQIVADERTNSVIVSGDPATRDKMRRLIRRLDSEMERSGNSQVFYLKYSKAEDLVDVLKQVSGTLTAAKEEAEGTVGSGREVVSIAASKHSNALIVTAPQDIMQSLQSVIEQLDIRRAQVHVEALIVEVAEGSNINFGVQWASKDAGLMQFANGTQIPIGTLGAAISQAKPQKGSTVISENGATTINPDTNGDLSTLAQLLSGFSGTAVGVVKGDWMALVQAVKNDSSSNVLSTPSITTLDNQEAFFMVGQDVPVLTGSTVGSNNSNPFNTVERKKVGIMLKVTPQINEGNAVQMVIEQEVSKVEGQTSLDVVFGERKLKTTVLANDGELIVLGGLMDDQAGESVAKVPLLGDIPLIGNLFKSTADKKEKRNLMVFIRPTILRDGMAADGVSQRKYNYMRAEQIYRDEQGLSLMPHTAQPVLPAQNQALPPEVRAFLNAGRTR

SEQ ID NO: 4737 - protein, 359 aa, Escherichia coli; identical to SEQ ID NO: 2329

SEQ ID NO: 4738 - protein, 700 aa, Escherichia coli
MKIFSVRQTVLPALLVLSPVVFAADEQTMIVSAAPQVVSELDTPAAVSVVDGEEMRLATPRINLSESLTGVPGLQVQNRQNYAQDLQLSIRGFGSRSTYGIRGIRLYVDGIPATMPDGQGQTSNIDLSSVQNVEVLRGPFSALYGNASGGVMNVITQTGQQPPTIEASSYYGSFGSWRYGLKATGATGDGTQPGDVDYTVSTTRFTTHGYRDHSGAQKNLANAKLGVRIDEASKLSLIFNSVDIKADDPGGLTKAEWKANPQQAPRAEQYDTRKTIKQTQAGLRYERSLSSRDEMSVMMYAGERETTQYQSIPMAPQLNPSHAGGVITLQRHYQGIDSRWTHRGELGVPLTFTTGLNYENMSENRKGYNNFRLNSGVPEYGQKGELRRDERNLMWNVDPYLQTQWQLSEKLSLDAGVRYSSVWFDSNDHYVTPGNGDDSGDASYHKWLPAGSLKYAMTDAWNIYLAAGRGFETPTINELSYRADGQSGMNFGLKPSTNDTIEIGSKTRIGDGLLSLALFQTDTDDEIVVDSSSGGRTTYKNAGKTRRQGAELAWDQRFAGDFRVKASWTWLDATYRSNVCNEQDCNGNRMPGIARNMGFASIGYIPEDGWYAGTEARYMGDIMADDENTAKAPSYTLVGLFTGYKYNYHNLTVDLFGRVDNLFDKEYVGSVIVNESNGRYYEPAPGRNYGIGVNVAWRFE

SEQ ID NO: 4739 - protein, 784 aa, Escherichia coli; identical to SEQ ID NO: 2244

SEQ ID NO: 4740 - protein, 246 aa, Escherichia coli; identical to SEQ ID NO: 3021

SEQ ID NO: 4741 - protein, 614 aa, Escherichia coli; identical to SEQ ID NO: 3301

SEQ ID NO: 4742 - protein, 446 aa, Escherichia coli; identical to SEQ ID NO: 2179

SEQ ID NO: 4743 - protein, 229 aa, Escherichia coli
MALLIFAVLSLLVASELQAGVVVGGTRFIFPADRDSISISLTNTSQESWLINSKINRPTRWAGGEASTVPAPLLPAPPLILLKPGTTGTLRLLRTESDILPVDRETLFELSIASVPSGKVENQSVKVAMRSVFKLFWRPEGLPGDPLEAYQQLRWTRNSQGVQLTNPTPYYINLIQVSVNGKALSNAGVVPPKSQRQTSWCQAITPCHVSWRTINDYGGLSAKKEQNLP

SEQ ID NO: 4744 - protein, 233 aa, Escherichia coli
MKTCITKGIVTVSLTAILLSCSFTWAAGKGGVGLAATRLVYSEGEEQISLGVRNTSPDVPYLIQSWVMTPDNKKSADFIITPPLFVLNPANENLLRIMYIGAPLAKDRETLFFTSVRAVPSTTKREEGNTLKIATQSVIKLFWRPKGLAYPLAEAPAKLRCTSSADMVTVSNPTPYFITLTDLKIGGKVVKNQMISPFDKYQFSLPMGAKNSSVTYRTINDYGAETPQLNCKS

SEQ ID NO: 4745 - protein, 224 aa, Escherichia coli
MKGLFALLISSMVLPAHAGIVIYGTRIIYPAENKEVMVQLMNQGNRSSLLQAWIDDGDTSLPPEKIQVPFMLTPPVAKIGANSGQQVKIKIMPNKLPTNKESIFYLNVLDIPPNSPEQEGKNALKFAMQNRIKLFYRPAGIAPVNKATFKKLRVNRSGNGLVIKNDSANWVTISDVKANNVKVNYETIMIAPLESQSINVKSNNANNWHLTIIDDHGNYISDKI

SEQ ID NO: 4746 - protein, 250 aa, Escherichia coli
MSYKLSSSMVVSTALAALLSTVSLAAHASVTPDRTRLVFNESDKSISVTLRNNNEKLPYLAQSWLEDEKGNKITSPLAVLPPVQRIDAMMNGQVKIQALPDIHTLPSDRESLFYYNVREIPPKTGKANTLQIALQTRIKLFWRPKALEKIDMRKPWQFKVTLTRSGQEYTVNNPTPYHVIISDASTQKKGPTAAGFKPLVMSPKTSQPLKVKMDSAPVLTYINDYGARLPLIFRCEGDTCKVDEDQSSKG

SEQ ID NO: 4747 - protein, 203 aa, Escherichia coli
MKKIAITCVLLSSLVASSVWADAASDLKSRLDKVSSFHASFTQKVTDGSGAAVQEGQGDLWVKRPNLFNWHMTQPDESILVSDGKTLWFYNPFVEQATATWLKDATGNTPFMLIARNQSSDWQQYNIKQNGDDFVLTPKASNGNLKQFTINVGRDGTIHQFSAVEQDDQRSSYQLKSQQNGAVDAAKFTFTPPQGVTVDDQRK

SEQ ID NO: 4748 - protein, 243 aa, Escherichia coli
MSRKSCLIRLFKTTVSCKLFTAIILSVFLVQPALTYAGVVIGGTRVVYLSNNPDKSISVFSKEEKIPYLIQAWVDPFNKEDKSKAPFTVIPPVSRLEPAQEKVLRIIHTKGVSLPDDRESVFWLNIKNIPPSASNKAANSLEIAVKTRIKLFWRPASIRLIPEDAAPKVKWHREGRNLIAENPNPIHISVMDVIVDGHDVPLNMIRPFETLTLPLPANSAGGQMIWRFINDYGAVSDPIKMTL

SEQ ID NO: 4749 - protein, 224 aa, Escherichia coli; identical to SEQ ID NO: 3035

SEQ ID NO: 4750 - protein, 663 aa, Escherichia coli; identical to SEQ ID NO: 1910

SEQ ID NO: 4751 - protein, 230 aa, Escherichia coli; identical to SEQ ID NO: 3019

SEQ ID NO: 4752 - protein, 162 aa, Escherichia coli; identical to SEQ ID NO: 1965

SEQ ID NO: 4753 - protein, 200 aa, Escherichia coli; identical to SEQ ID NO: 1784

SEQ ID NO: 4754 - protein, 193 aa, Escherichia coli; identical to SEQ ID NO: 2246

SEQ ID NO: 4755 - protein, 250 aa, Escherichia coli; identical to SEQ ID NO: 3048

SEQ ID NO: 4756 - protein, 203 aa, Escherichia coli; identical to SEQ ID NO: 2201

SEQ ID NO: 4757 - protein, 233 aa, Escherichia coli; identical to SEQ ID NO: 3276

SEQ ID NO: 4758 - protein, 653 aa, Escherichia coli
MRNNSTWSRSSGQTAEWKNLSSYLQRAVIPLKGELTVGDDYTAGDFFDSVSFRGVQLASDDNMLPDSLKGFAPVVRGIAKSNAQITIKQNGYTIYQTYVSPGAFEISDLYSTSSSGDLLVEIKEADGSVNSYSVPFSSVPLLQRQGRIKYAVTLAKYRTNSNEQQESKFAQATLQWGGPWGTTWYGGGQYAEYYRAAMFGLGFNLGDFGAISFDATQAKSTLADQSEHKGQSYRFLYAKTLNQLGTNFQLMGYRYSTSGFYTLSDTMYKHMDGYEFNDGDDEDTPMWSRYYNLFYTKRGKLQVNISQQLGEYGSFYLSGSQQTYWHTDQQDRLLQFGYNTQIKDLSLGVSWNYSKSRGQPDADQVFALNFSLPLNLLLPRSNDSYTRKKNYAWMTSNTSIDNEGHITQNLGLTETLLDDGNLSYSVQQGYNSEGKTANGSASMDYKGAFADARVGYNYSDNGSQQQLNYALSGSLVAHSQGITLGQSLGETNVLIAAPGAENTRVANSTGLKTDWRGYTVVPYATSYRENRIALDAASLKRNVDLENAVVNVVPTKGALVLAEFNAHAGARVLMKTSKQGIPLRFGAIATLDGIQTNSGIIDDDGSLYMSGLPAQGAITVRWGEAPDQICHISYQLTEQQINSAITRMDAICR

SEQ ID NO: 4759 - protein, 229 aa, Escherichia coli; identical to SEQ ID NO: 3277

SEQ ID NO: 4760 - protein, 432 aa, Escherichia coli; identical to SEQ ID NO: 2026

SEQ ID NO: 4761 - protein, 191 aa, Escherichia coli; identical to SEQ ID NO: 2727

SEQ ID NO: 4762 - protein, 729 aa, Escherichia coli; identical to SEQ ID NO: 3052

SEQ ID NO: 4763 - protein, 213 aa, Escherichia coli; identical to SEQ ID NO: 2232

SEQ ID NO: 4764 - protein, 565 aa, Escherichia coli; identical to SEQ ID NO: 2669

SEQ ID NO: 4765 - protein, 678 aa, Escherichia coli; identical to SEQ ID NO: 3014

SEQ ID NO: 4766 - protein, 700 aa, Escherichia coli; identical to SEQ ID NO: 3047

SEQ ID NO: 4767 - protein, 236 aa, Escherichia coli; identical to SEQ ID NO: 3286

SEQ ID NO: 4768 - protein, 402 aa, Escherichia coli
MLIPGVQAAKPQKVTLMVDDVPVAQVLQALAEQEKLNLVVSPDVSGTVSLHLTDVPWKQALQTVVKSAGLITRQEGNILSVHSIAWQNDNIARQEAEQARAQANLPLENRSITLQYADAGELAKAGEKLLSAKGSMTVDKRTNRLLLRDNKTALSALEQWVAQMDLPVGQVELSAHIVTINEKSLRELGVKWTLADAQHAGGVGQVTTLGSDLSVATATTHVGFNIGRINGRLLDLELSALEQKQQLDIIASPRLLASHLQPASIKQGSEIPYQVSSGESGATSVEFKEAVLGMEVTPTVLQKGRIRLKLHISQNVPGQVLQQADGEVLAIDKQEIETQVEVKSGETLALGGIFTRKNKSGQDSVPLLGDIPWFGQLFRHDGKEDERRELVVFITPRLVSSE

SEQ ID NO: 4769 - protein, 430 aa, Escherichia coli; identical to SEQ ID NO: 2617

SEQ ID NO: 4770 - protein, 228 aa, Escherichia coli; identical to SEQ ID NO: 3034

SEQ ID NO: 4771 - protein, 774 aa, Escherichia coli
MTPLRVFRKTTPLVNAIRLSLLPLAGLSFSAFAAQVNIAPGSLDKALNQYAAHSGFTLSVDASLTRGKQSNGLHGDYDVESGLQQLLDGSGLQVKPLGNNSWTLEPAPAPKEDALTVVGDWLGDARENDVFEHAGARDVIRREDFAKTGATTMREVLNRIPGVSAPENNGTGSHDLAMNFGIRGLNPRLASRSTVLMDGIPVPFAPYGQPQLSLAPISLGNMDAIDVVRGGGAVRYGPQSVGGVVNFVTRAIPQDFGIEAGVEGQLSPTSSQNNPKETHNLMVGGTADNGFGTALLYSGTRGSDWREHSATRIDDLMLKSKYAPDEVHTFNSLLQYYDGEADMPGGLSRADYDADRWQSTRPYDRFWGRRKLASLGYQFQPDSQHKFNIQGFYTQTLRSGYLEQGKRITLSPRNYWVRGIEPRYSQIFMIGPSAHEVGVGYRYVNESTHEMRYYTATSSGQLPSGSSPYDRDTRSGTEAHAWYLDDKIDIGNWTITPGMRFEHIESYQNNAITGTHEEVSYNAPLPALNVLYHLTDSWNLYANTEGSFGTVQYSQIGKAVQSGNVEPEKARTWELGTRYDDGALTAEMGLFLINFNNQYDSNQTNDTVTARGKTRHTGLETQARYDLGTLTPTLDNVSIYASYAYVNAEIREKGDTYGNLVPFSPKHKGTLGVDYKPGNWTFNLNSDFQSSQFADNANTVKESADGSTGRIPGFMLWGARVAYDFGPQMADLNLAFGVKNIFDQDYFIRSYDDNNKGIYAGQPRTLYMQGSLKF

SEQ ID NO: 4772 - protein, 478 aa, Escherichia coli; identical to SEQ ID NO: 2404

SEQ ID NO: 4773 - protein, 243 aa, Escherichia coli; identical to SEQ ID NO: 3483

SEQ ID NO: 4774 - protein, 231 aa, Escherichia coli
MSNNVMKKINLMPVLALLLICFNSHAAFVLNSTRYIFAGDKDNISVQVNNESSQEYGGQIWIDNANARDQNVYFAPSPTFFKVSGGHKQILRVLKINDSLPKDKESLFWVNVQEIPKAPKEGTNSLAIALHTQVKMIYRPESLKEGREDAEKNIKIIHEGGNTILYNNSPYYFAVINVKQNGHDVKLSEETKNKIAAFAPFEKVSLGSKLSGKDISIVSFDDYGVDREYKL

SEQ ID NO: 4775 - protein, 243 aa, Escherichia coli; identical to SEQ ID NO: 2910

SEQ ID NO: 4776 - protein, 331 aa, Escherichia coli; identical to SEQ ID NO: 2700

SEQ ID NO: 4777 - protein, 351 aa, Escherichia coli; identical to SEQ ID NO: 3010

SEQ ID NO: 4778 - protein, 747 aa, Escherichia coli; identical to SEQ ID NO: 2072

SEQ ID NO: 4779 - protein, 696 aa, Escherichia coli; identical to SEQ ID NO: 3314

SEQ ID NO: 4780 - protein, 686 aa, Escherichia coli; identical to SEQ ID NO: 3015

SEQ ID NO: 4781 - protein, 208 aa, Escherichia coli; identical to SEQ ID NO: 1949

SEQ ID NO: 4782 - protein, 360 aa, Escherichia coli; identical to SEQ ID NO: 3032

SEQ ID NO: 4783 - protein, 232 aa, Escherichia coli; identical to SEQ ID NO: 2087

SEQ ID NO: 4784 - protein, 102 aa, Escherichia coli; identical to SEQ ID NO: 1824

SEQ ID NO: 4785 - protein, 362 aa, Escherichia coli; identical to SEQ ID NO: 2434

SEQ ID NO: 4786 - protein, 539 aa, Escherichia coli; identical to SEQ ID NO: 3050

SEQ ID NO: 4787 - protein, 518 aa, Escherichia coli; identical to SEQ ID NO: 2349

SEQ ID NO: 4788 - protein, 120 aa, Escherichia coli; identical to SEQ ID NO: 3383

SEQ ID NO: 4789 - protein, 359 aa, Escherichia coli; identical to SEQ ID NO: 2328

SEQ ID NO: 4790 - protein, 731 aa, Escherichia coli; identical to SEQ ID NO: 3290

SEQ ID NO: 4791 - protein, 231 aa, Escherichia coli; identical to SEQ ID NO: 3055

SEQ ID NO: 4792 - protein, 89 aa, Escherichia coli; identical to SEQ ID NO: 2810

SEQ ID NO: 4793 - protein, 241 aa, Escherichia coli
MSNKNVNVRKSQEITFCLLAGILMFMAMMVAGRAEAGVALGATRVIYPAGQKQVQLAVTNNDENSTYLIQSWVENADGVKDGRFIVTPPLFAMKGKKENTLRILDATNNQLPQDRESLFWMNVKAIPSMDKSKLTENTLQLAIISRIKLYYRPAKLALPPDQAAEKLRFRRSANSLMLINPTPYYLTVTELNAGTRVLENALVPPMGESTVKLPSDAGSNITYRTINDYGALTPKMTGVME

SEQ ID NO: 4794 - protein, 828 aa, Escherichia coli; identical to SEQ ID NO: 2380

SEQ ID NO: 4795 - protein, 760 aa, Escherichia coli; identical to SEQ ID NO: 3026

SEQ ID NO: 4796 - protein, 746 aa, Escherichia coli; identical to SEQ ID NO: 3031

SEQ ID NO: 4797 - protein, 118 aa, Escherichia coli [sequence omitted]

SEQ ID NO: 4798 - protein, 203 aa, Escherichia coli; identical to SEQ ID NO: 2009

SEQ ID NO: 4799 - protein, 367 aa, Escherichia coli; identical to SEQ ID NO: 3016

SEQ ID NO: 4800 - protein, 300 aa, Escherichia coli
MTKSVSTSKKASIRCSINSYYQCMIFFYLTINWRTIYSILEMHMTTLRKYMKIRTALLVSSLPLCFFVSANAKTFENEGNKTQMFSLHLGATRVIYNIFSSGETLTIINDYDYPMLVQSEVLLEDQKTPAPFIITPPLFRLDALQSSRLRIVRTGGDFPKDRETLQWICVKGIPPKSDEKWAESNKNSLNNVTLNVQVSLSTCIKMFVRPSSVKGHPEDVAGEVKWQRVNNKLKGVNPTPFYINLSELRVGGEEISEHHYIAPFSSFEYPIPVSKSSKVQWKIVTDYGGVSEFFETDINL

SEQ ID NO: 4801 - protein, 274 aa, Escherichia coli; identical to SEQ ID NO: 2303

SEQ ID NO: 4802 - protein, 249 aa, Escherichia coli; identical to SEQ ID NO: 3028

SEQ ID NO: 4803 - protein, 230 aa, Escherichia coli
MMTKIKLLMLIIFYLIISTSAHAAGGIALGATRIIYPADAKQTAVWIRNSHTNERFLVNSWIENSSGVKEKSFIITPPLFVSEPKSENTLRIIYTGPPLAADRESLFWMNVKTIPSVDKNALNGRNVLQLAILSRMKLFLRPIQLQELPAEAPDTLKFSRSGNYINVHNPSPFYVTLVNLQVGSQKLGNAMAAPRVNSQIPLPSGVQGKLKFQTVNDYGSVTPVREVNLN

SEQ ID NO: 4804 - protein, 673 aa, Escherichia coli; identical to SEQ ID NO: 3295

SEQ ID NO: 4805 - protein, 246 aa, Escherichia coli
MFLNAKHTAAVCFATCMSLSASAIADIVISGTRVIYKSNEKSVNVRLENKGNNPLLVQSWLDTGDDSAEPGSITVPFTATPPVSRIDAKRGQTIKLMYTASSPLPKDRESVFWFNVLEVPPKPDADKVANQSLLQLAFRTRIKLFYRPEGLNGLPSDAPAALKWSWATSAGKTALRVANPTPYHVSFSSGDLVANGKTYPLDVKMVAPLSEETFYIKGMSGKASSAKVHFFAINDFGGAIEGNASL

SEQ ID NO: 4806 - protein, 236 aa, Escherichia coli
MQTTRIPYSISFMATVLLLLLFACHSTIANAAVALGATRVIYPANQKQVLLPVTNNDPASVYLIQSWIENAGDQKDTQFVITPPLFSMQGKKENTLRIINATNHQLPGDRESLFWVNVKAIPAMEKDQKNENTLQLAIISRIKMFYRPTNLAMAPEEAPAMLRFRRSGSKLTLINPTPYFITVTNMKAGNSNLPNTMVPPKGEVSVDIPHAAPGDISFQTINDYGALTPRIKATMQ

SEQ ID NO: 4807 - protein, 207 aa, Escherichia coli; identical to SEQ ID NO: 2211

SEQ ID NO: 4808 - protein, 565 aa, Escherichia coli
MKSPAPSRPQKMALIPACIFLCFAALSVQAEETPVTPQPPDILLGPLFNDVQNAKLFPDQKTFADAVPNSDPLMILADYRMQQNQSGFDLRHFVNVNFTLPTEGEKYVPPEGQSLREHIDGLWPVLTRSTENTEKWDSLLPLPEPYVVPGGRFREVYYWDSYFTMLGLAESGHWDKVADMVANFAHEIDTYGHIPNGNRSYYLSRSQPPFFALMVELLAQHEGDAALKQYLPQMQKEYAYWMDGVENLQAGQQEKRVVKLQDGTLLNRYWDDRDTPRPESWVEDIATAKSNPNRPATEIYRDLRSAAASGWDFSSRWMDNPQQLNTLRTTSIVPVDLNSLMFKMEKILARASKAAGDNAMANQYETLANARQKGIEKYLWNDQQGWYADYDLKSHKVRNQLTAAALFPLYVNAAAKDRANKMATATKTHLLQPGGLNTTSVKSGQQWDAPNGWAPLQWVATEGLQNYGQKEVAMDISWHFLTNVQHTYDREKKLVEKYDVSTTGTGGGGGEYPLQDGFGWTNGVTLKMLDLICPKEQPCDNVPATRPLSESTTQPVKQKEAEPTP

SEQ ID NO: 4809 - protein, 656 aa, Escherichia coli
MRLKKHYLCTALSLAFTQQAVAVQESDSLTVWSSPVSSTTTTVLDQPTMKALDKQNVAQALSVVPGVVLQKSGSRNEEQVKVRGFDSRQVPVYFDGVPIYVPYDGNLDLARILTNNLGAVEVSKGYSSLLQGPNQMGGAINITTQKPTKPLEASLGYRQGWSRSQDNAYDMHASFAASSDLGYLQVSGSQLKQDFLGLPHGVNNDIAGKHGKMINSSADDKRGIVKLGFTPRENDEYTLTYIKQDGEKDNPPYSGNSGQKSRYWQWPEYDKESFYYQGTTQLNDRFTLKSRLYRDTFENTLMMYNSLADLKNKKGSYSHYSDYSDGAGLQLAADVRENDLLSFAANWKDDVHREKGAPHAAYDRYEDRTWSLASEYQWAAADNVDVVAGISYDWRDSVEAKKHEKDGSITHYDDNNQSAFNWQVMGKYHFVNEDTLALSYYDRTRFPTLKERYTTSKPAYNQIAIVNPQLKPERARGVDLTWNGAFTRDWGFEVSVYYNRVSDAILSHNIDADTIQNQNSGTVDYSGLDAGIKGKISNILDVGLSYALIHADAKRKDIGKITDLPTQTMTAWMTLKPWEPLSVTLSEEARSSSYSNSDGSQKAAGFAVTHIRADYTLGHGFSVNASVNNLFDTQYAYSEGFIEEGRNFWAGVEYTF

SEQ ID NO: 4810 - protein, 193 aa, Escherichia coli; identical to SEQ ID NO: 2246

SEQ ID NO: 4811 - protein, 866 aa, Escherichia coli
MYRTHRQHSLLSSGGVPSFIGGLVVFVSAAFNAQAETWFDPAFFKDDPSMVADLSRFEKGQKITPGVYRVDIVLNQTIVDTRNVNFVEITPEKGIAACLTTESLDAMGVNTDAFPAFKQLDKQACALLAEIIPDASVTFNVNKLRLEISVPQIAIKSNARGYVPPERWDEGINALLLGYSFSGANSIHSSADSDSGDSYFLNLNSGVNLGPWRLRNNSTWSRSSGQTAEWKNLSSYLQRAVIPLKGELTVGDDYTAGDFFDSVSFRGVQLASDDNMLPDSLKGFAPVVRGIAKSNAQITIKQNGYTIYQTYVSPGAFEISDLYSTSSSGDLLVEIKEADGSVNSYSVPFSSVPLLQRQGRIKYAVTLAKYRTNSNEQQESKFAQATLQWGGPWGTTWYGGGQYAEYYRAAMFGLGFNLGDFGAISFDVTQAKSTLADQSEHKGQSYRFLYAKTLNQLGTNFQLMGYRYSTSGFYTLSDTMYKHMDGYEFNDGDDEDTPMWSRYYNLFYTKRGKLQVNISQQLGEYGSFYLSGSQQTYWHTDQQDRLLQFGYNTQIKDLSLGVSWNYSKSRGQPDADQVFALNFSLPINLLLPRSNDSYTSKKNYAWMTSNTSIDNEGHTTQNLGLTETLLDDGNLSYSVQQGYNSEGKTANGSASMDYKGAFADARVGYNYSDNGSQQQLNYALSGSLVTHSQGITLGQSLGETNVLIAAPGAENTRVANSTGLKTDWRGYTVVPYATSYRENRIALDAASLKRNVDLENAVVNVVPTKGALVLAEFNAHAGARVLMKTSKQGIPLRFGAIATLDGVQANSGIIDDDGSLYMAGLPAKGTITVRWGEAPDQICHISYELTEQQINSAITRMDAICR

SEQ ID NO: 4812 - protein, 213 aa, Escherichia coli; identical to SEQ ID NO: 2232

SEQ ID NO: 4813 - protein, 191 aa, Escherichia coli; identical to SEQ ID NO: 2727

SEQ ID NO: 4814 - protein, 567 aa, Escherichia coli
MKIKLRITIILISVLCIFNGLLTPGAYAAAANGYVANKENLRSFFETVSSYAGKPTIVSKLAMKKQISGNFDLTEPYALIERLSAQMGLIWYDDGKAIYIYDSSEMRNALINLRKVSTNEFNNFLKKSGLYNSRYEIKGGGNGTFYVSGPPVYVDLVVNAAKLMEQNSDGIEIGRNKVGIIHLVNTFVNDRTYELRGEKIVIPGMAKVLSTLLNNNIKQSTGVNVLSEISSRQQLKNVSRMPPFPGAEEDDDLQVEKIISTAGAPETDDIQIIAYPDTNSLLVKGTVSQVDFIEKLVATLDIPKRHIELSLWIIDIDKTDLEQLGADWSGTIKIGSSLSASFNNSGSISTLDGTQFIATIQALAQKRRAAVVARPVVLTQENIPAIFDNNRTFYTKLVGERTAELDEVTYGTMISVLPRFAARNQIELLLNIEDGNEINSDKTNVDDLPQVGRTLISTIARVPQGKSLLIGGYTRDTNTYESRKIPILGSIPFIGKLFGYEGTNANNIVRVFLIEPREIDERMMNNANEAAVDARAITQQMAKNKEINDELLQKWIKTYLNREVVGG

SEQ ID NO: 4815 - protein, 362 aa, Escherichia coli; identical to SEQ ID NO: 2998

SEQ ID NO: 4816 - protein, 395 aa, Escherichia coli
MKRKVLAMLVPALLVAGAANAAEVYNKDGNKLDLYGKVAGLHYFSDDSGSDGDMSYARIGFKGETQIADQFTGYGQWEFNIGANGPESDKGNTATRLAFAGFGFGQNGTFDYGRNYGVVYDVEAWTDMLPEFGGDTYAGADNFMNGRANSVATYRNNGFFGQVDGLNFALQYQGNNEKSGLFDQEGSGNGNGRKLAKENGDGYGMSTSYDFDFGLSLGAAYSNSDRTDNQVHKGTHNTRYGDRFDATAGGETAEAWTVGAKYDANNVYLAAMYAETRNMTGYGDADAIANKTQNFEVVAQYQFDFGLRPSIAYLQSKGKDLGGVNSDNFDSQGNHHYTNKDLVKYVDIGMTYYFNKNMSTYVDYKINLLDNDDDFYKENGIATDDIVAVGLVYQF

SEQ ID NO: 4817 - protein, 816 aa, Escherichia coli; identical to SEQ ID NO: 4456

SEQ ID NO: 4818 - protein, 710 aa, Escherichia coli
MSSAELYFNPRFLADDPQAVADLSRFENGQELPPGTYRVDIYLNNGYMATRDVTFNTGDSEQGIVPCLTRAQLASMGLNTASVAGMNLLADDACVPLTTMVQDATAHLDVGQQRLNLTIPQAFMSNRARGYIPPELWDPGINAGLLNYNFSGNSVQNRIGGNSHYAYLNLQSGLNIGAWRLRDNTTWSYNSSDRSSGSKNKWQHINTWLERDIIPLRSRLTLGDGYTQGDIFDGINFRGAQLASDDNMLPDSQRGFAPVIHGIARGTAQVTIKQNGYDIYNSTVPPGPFTINDIYAAGNSGDLQVTIKEADGSTQIFTVPYSSVPLLQREGHTRYSITAGEYRSGNAQQEKPRFFQSTLLHGLPAGWTIYGGTQLADRYRAFNFGIGKNMGALGALSVDMTQANSTLPDDSQHDGQSVRFLYNKSLNESGTNIQLVGYRYSTSGYFNFADTTYSRMNGYNIETQDGVIQVKPKFTDYYNLAYNKRGKLQLTVTQQLGRSSTLYLSGSHQTYWGTSNVDEQFQAGLNTAFEDINWTLSYSLTKNAWQKGRDQMLARNVNIPFSHWLRSDSKSQWRHASASYSMSHDLNGRMTNLAGVYGTLLEDNNLSYSVQTGYAGGGDGNSGSTGYATLNYRGGYGNANIGYSHSDDIKQLYYGVSGGVLAHANGVTLGQPLNDTVVLVKAPGAKDAKVENQTGGAYRLARLCRAALCH

SEQ ID NO: 4819 - protein, 866 aa, Escherichia coli; identical to SEQ ID NO: 3025

SEQ ID NO: 4820 - protein, 161 aa, Escherichia coli; identical to SEQ ID NO: 2582

SEQ ID NO: 4821 - protein, 826 aa, Escherichia coli; identical to SEQ ID NO: 3563

SEQ ID NO: 4822 - protein, 161 aa, Escherichia coli; identical to SEQ ID NO: 2582

SEQ ID NO: 4823 - protein, 237 aa, Escherichia coli; identical to SEQ ID NO: 2816

SEQ ID NO: 4824 - protein, 838 aa, Escherichia coli; identical to SEQ ID NO: 2916

SEQ ID NO: 4825 - protein, 838 aa, Escherichia coli; identical to SEQ ID NO: 3041

SEQ ID NO: 4826 - protein, 880 aa, Escherichia coli; identical to SEQ ID NO: 3008

SEQ ID NO: 4827 - protein, 837 aa, Escherichia coli; identical to SEQ ID NO: 4687

SEQ ID NO: 4828 - protein, 118 aa, Escherichia coli [sequence omitted]

SEQ ID NO: 4829 - protein, 351 aa, Escherichia coli; identical to SEQ ID NO: 2872

SEQ ID NO: 4830 - protein, 731 aa, Escherichia coli
MARSKTAQPKHSLRKIAVVVATAVSGMSVYAQAAVEPKEDTITVTAAPAPQESAWGPAATIAAKHSATATKTDTPIEKTPQSISVVTREEMDIKQPATVKEALDYTPSVFSTRGSSTTYDVVSIRGFTTPSTVNTNQYLDGLKLQGDNYSEASIDPYFLERVELLRGPVSVLYGKSHPGGVVSMVSKRPSTDPIKEIQFKMGTDNLWQTGFDFSDAIDDDGVWSYRLTGLGRSQDAQQKYAKTTRYAVAPSFSWRPDDKTDLTFLSNFQSDPDAGYYGWLPRQGTVVPYQDANGSWHKLPTDFNEGEKDNKMSRRQQLIGYSFAHEFNDTFTVRQNLRYTRIHTLYDAVYGNSYIAPAQISRAYVRSDEDLNSFTVDTQLQSNFATGAVAHTLLTGVDYLRMRNDIDANYGTADPISMQDPQYGNANININFPYAVINRQEQTGLYIQDQSEWNKWVLTLGGRYDFAKTSTYTRSTSSLDEINDQQFTWRGGINYLFDNGISPYFSYSESFEPVSGATKEGKPFDPSRGKQYEAGVKYVPKDTPVTVTASVFQLTKDKNLTADPSNILFSVQGGEIRSRGFEIEAKAALNANINVTAAYSYTDAEYTKDTLYKGKRPAEVPRNMASLWADYTFRETALSGLSFGAGARYFGDTSSFYTTGEKANQTFNVGGYTLVDAMIKYDLARFGMPGSSVGVNVNNLFDREYVSSCYRDYACYWGAERQVVATATFRF

SEQ ID NO: 4831 - protein, 879 aa, Escherichia coli
MPDHSLFRLRVLPCCVALAMSGSYVNAWAEDEIQFDSRFLELKGDTKIDLKRFSSQGYVEPGKYNLQVQLNKQPLTEEYDIYWYASENDASKTYACLTPELVAQFGLKEDVAKNLQWIHDGKCLKPGQLEGIDIKADLSQSALVISLPQAYLEYTDINWDPPSRWDDGISGLIADYSITAQTRHEENGGDDSNEISGNGTVGVNLGAWRLRADWQTDYQHSKSNDDDVINGDDTLKNWEWSRYYAWRALPSLKAKLGLGEDYLNSDIFDGFNYVGGSISTDDQMLPPNLRGYAPDISGVAHTTAKVTVSQMGRVIYETQVPAGPFRIQDLGDSVSGTLHIRIEEQNGQVQEYDINTASMPFLTRPGQVRYKLMMGRPQEWGHHVEGGFFSGGEASWGIANGWSLYGGALADEHYQSAALGVGRDLSVFGAVAFDITHSHTRLDKETAYGKGALDGNSFRVSYSKDFDELNSRVTFAGYRFSEENFMTMSEYLDASDSEMVRTGNDKEMYTATYNQNFRDAGVSVYLNYTRHTYWDRDEQTNYNVMLSHYFNLGSIRNMSVSMTGYRYEYDNQTDKGVYISLSMPWGDSSTISYNGNYGSGSDSSQVGYFSRVDDATHYQLNVGTSDNHSSVDGYYSHDGSLAQVDLSANYHEGQYTSAGISLQGGATLTAQGGALHRTQNMGGTRLLIDADGVAGVPVEGNGAAVYTNMFGKAVVADVNNYYRNQAYIDLNNLPENAEATQSVVQATLTEGAIGYRKFSVISGQKAMAVLRLQDGSHPPFGAEVKNDNAQNVGLVDDDGNVYLAGVKPGEHMIVSWGGVAHCDIHLPDPLPADLFNGLLLPCQQTGAISSPVHNEIKPVIQEQTQQVTPTEPPVSVSAN

SEQ ID NO: 4832 - protein, 200 aa, Escherichia coli
MLAFCRSSLKSKKYFIILLALAAIAGLGTHAAWSSNGLPRIDNKTLARLAQQHPVVVLFRHAERCDRSTNQCLSDKTGITVKGTQDARELGNAFSADIPDFDLYSSNTVRTIQSATWFSAGKKLTVDKRLLQCGNEIYSAIKDLQRKAPDKNIVIFTHNHCLTYIAKDKRDATFKPDYLDGLVMHVEKGKVYLDGEFVNH

SEQ ID NO: 4833 - protein, 840 aa, Escherichia coli; identical to SEQ ID NO: 3591

SEQ ID NO: 4834 - protein, 826 aa, Escherichia coli
MLRMTPLASAIVALLLGIEAYAAEETFDTHFMIGGMKDQQVANIRLDDNQPLPGQYDIDIYVNKQWRGKYEIIVKDNPQETCLSREIIKRLGINSDNFASGKQCLTFEQLVQGGSYTWDIGVFRLDFSVPQAWVEELESGYVPPENWERGINAFYTSYYVSQYYSDYKASGNSKSTYVRFNSGLNLLGWQLHSDASFSKTNNNPGVWKSNTLYLERGFAQLLGTLRVGDMYTSSDIFDSVRFRGVRLFRDMQMLPNSKQNFTPRVQGIAQSNALVTIEQNGFVVYQKEVPPGPFAITDLQLAGGGADLDVSVKEADGSVTTYLVPYAAVPNMLQPGVSKYDFAAGRSHIEGASKQSDFVQAGYQYGFNNLLTLYGGSMVANNYYAFTLGTGWNTRIGAISVDATKSHSKQDNGDVFDGQSYQIAYNKFVSQTSTRFGLAAWRYSSRDYRTFNDHVWANNKDNYRRDENDVYDIADYYQNDFGRKNSFSANMSQSLPEGWGSVSLSTLWRDYWGRSGSSKDYQLSYSNNLRRISYTLAASQAYDENHHEEKRFNIFISIPFDWGDDVSTPRRQIYMSNSTTFDDQGFASNNTGLSGTVGSRDQFNYGVNLSHQHQGNETTAGANLTWNAPVATVNGSYSQSSTYRQAGASVSGGIVAWSGGVNLANRLSETFAVMNAPGIKDAYVNGQKYRTTNRNGVVVYDGMTPYRENHLMLDVSQSDSEAELRGNRKIAAPYRGAVVLVNFDTDQRKPWFIKALRADGQPLTFGYEVNDIHGHNIGVVGQGSQLFIRTNEVPPSVNVAIDKQQGLSCTITFGKEIDESKNYICR

SEQ ID NO: 4835 - protein, 228 aa, Escherichia coli
MRGVQPVNANFIKEDAGMLKKLILTILCCFLAMNTLKTAQAAVPEEGYQYNRIEHFVADAPPVVEFFSFYCPPCAAFSGRLGVTQATEKVLPAGSRVVKYHVGYMGQFGEALTEAWSVARVLGVESQVEMPLFKAVQETKSIKSKADIRQVFIDSGIPAEQFDAAMNSMVVRAMTATQIQAVKAFGVSGTPSFIVKGKYLVRNNGIASATEAEYGTAFAKVVDFLLNK

SEQ ID NO: 4836 - protein, 518 aa, Escherichia coli; identical to SEQ ID NO: 2349

SEQ ID NO: 4837 - protein, 331 aa, Escherichia coli; identical to SEQ ID NO: 2705

SEQ ID NO: 4838 - protein, 539 aa, Escherichia coli; identical to SEQ ID NO: 3050

SEQ ID NO: 4839 - protein, 368 aa, Escherichia coli
MNKTITALAIIMASFAANASVLPETPVPFKSGTGAIDNDTVYIGLGSAGTAWYKLDTQAKDKKWTALAAFPGGPRDQATSAFIDGNLYVFGGIGKNSKGLTQVFNDVHKYNPKTNSWVKLMSHAPMGMAGHVTFVHNGKAYVTGGVNQNIFNGYFEDLNEAGKDSATIDKINAHYFDKKAEDYFFNKFLLSFDPSTQQWSYAGESPWYGTAGAAVVNKGDKTWLINGEAKPGLRTDAVFELDFTGNNLKWNRLAPVSSPDGVAGGFAGISNDSLIFAGGAGFKGSRENYQNGKNYAHEGLKKSYSADIHLWHNGKWDKSGELSQGRAYGVSLPWNNSLLIIGGETAGGKAVTDSVLISVKDNKVTVQN

SEQ ID NO: 4840 - protein, 237 aa, Escherichia coli; identical to SEQ ID NO: 1814

SEQ ID NO: 4841 - protein, 432 aa, Escherichia coli; identical to SEQ ID NO: 2026

SEQ ID NO: 4842 - protein, 816 aa, Escherichia coli
MLRTTRWVAAIIFLYSFPGYAEETFDTHFMIGGMKGEKVSEYHFDNKQPLPGNYELDFYVNNQWRGKQDITIPESPVKPCLPKVLLTKLGVKTGNLNTEDNCILLDEAVHGGQYQWDISEHRLNLTVPQAYINELERGYVPPESWDRGIDAFYTSYNLSQYRSYDSNNNSHTASYGRFNSGLNLFSWQLHSDASYSKPDDMKGKWQSNTLYLERGWSQILSTVQIGENYTSSLIFDSLRFSGIRLFRDMQMLPDSMQSFTPLVQGVAQSNALITVSQNGYTIYQKEVPPGPFTIADLQLSGSGSDLDVSIKEADGSVRSFLVPYSSVPNMLQPGISNFDFIAGRSQIYGVKNQEDFLEANYIYGLNNLLTLYGGTILSDNYNAITLGNGWNTPLGAISFDATRSSSKLNNDTRHEGTSYQVAYNKYLLQTATHFSVAAWRYASQDYRTFSDHLYENDKINHQSDYDDFYDIGRKNSLSANIMQPLSNNLGNVSLSALWRNYWGRSGNAKDYQFSYSNNWQHISYTFSASQSYDENDKEEERFNLFISIPFYWGDDIAKTRHQINLSNSTSFSKDGYSSNNTGITGIAGEHDQLNYGIYVNQQQQNNDTSLGTNLSWRTPIATIDGSYSHSKNAWQSGGSISSGLVVWPGGINITNQLSDTFAILDAPGLEGAHINGQKYNRTNNKGQVVYDLMIPHRENHLVLDTANSESETELQGNRQIIAPYRGAVSYVQFTTDQRKPWYIQALRPDGSPLTFGYDVLDLQENNIGVVGQGSRLFIRVDEIPTGIKVALNDEQNLFCTITFQHVIDENKTYICQ

SEQ ID NO: 4843 - protein, 826 aa, Escherichia coli; identical to SEQ ID NO: 3256

SEQ ID NO: 4844 - protein, 784 aa, Escherichia coli; identical to SEQ ID NO: 3401

SEQ ID NO: 4845 - protein, 871 aa, Escherichia coli; identical to SEQ ID NO: 3519

SEQ ID NO: 4846 - protein, 430 aa, Escherichia coli
MKQALRVAFGFLILWASVLHAEVRIVIDSGVDSGRPIGVVPFQWAGPGAAPEDIGGIVAADLRNSGKFNPLDRARLPQQPGSAQEVQPAAWSALGIDAVVVGQVTPNPDGSYNVAYQLVDTGGAPGTVLAQNSYKVNKQWLRYAGHTASDEVFEKLTGIKGAFRTRIAYVVQTNGGQFPYELRVSDYDGYNQFVVHRSPQPLMSPAWSPDGSKLAYVTFESGRSALVIQTLANGAVRQVASFPRHNGAPAFSPDGSKLAFALSKTGSLNLYVMDLASGQIRQVTDGRSNNTEPTWFPDSQNLAFTSDQAGRPQVYKVNINGGAPQRITWEGSQNQDADVSSDGKFMVMVSSNGGQQHIAKQDLATGGVQVLSSTFLDETPSLAPNGTMVIYSSSQGMGSVLNLVSTDGRFNARLPATDGQVKFPAWSPYL

SEQ ID NO: 4847 - protein, 860 aa, Escherichia coli; identical to SEQ ID NO: 3544

SEQ ID NO: 4848 - protein, 368 aa, Escherichia coli; identical to SEQ ID NO: 2370

SEQ ID NO: 4849 - protein, 207 aa, Escherichia coli; identical to SEQ ID NO: 2211

SEQ ID NO: 4850 - protein, 794 aa, Escherichia coli
MPGIYPVDIILNGSRIDSRDIFFYTKKNRHGEYYLKPCLTRDILINYGVKIEEYPNLFRQNSEKNRDSSDCADLSVIPQATEDYHFIKQQLILGIPQVAIHPPLTGIAHETMWDDGISAFLLNWQVEGGHWEYRSNTRNSSDNFWASLEPGINLGSWRIRNLTTWNKSSGQSGKWESSYIRVERGLNNIKSRLTFGDDYTPSDIFDSVPFRGGMLGSDENMVPYNQREFAPVVRGIARTQARIEVRQNGYLIQSRIVSPGAFALTDLPVTGNGGDLQVWVLESDGTIQTFNVPFTTPAIALREGYLKYNVTVGEYRPSDDSIEGAYLGQLTAMYGLPWSLTAFGGIQVSEHYQGNALGLGLSLGGFGSISLDTIYSRGQQKGYSNEIGKTWRVRYDKSFELTGTSFAAGYQDSSAGYHSLADVLDTYRNGTAYRSYDNRIRRTTINISQALGEWGSVALNGGRDEYRDKVKQDYIGASYSNSWKGITFAVNWSRNNNIGDYYSNSLRTENNLNLWMSIPMKRWLGGDDKGVTATAQIQRITGQNTLYETGLNGRAFGQKLYWDIREQIVPGSKYDADTSLLNLRWSGGYGELTGMYSYNRNTRQMNVGTSGSMAIHSGGIAFGQKTDDTMALIAAPGIAGASVGGWPGVSTDFRGYTLVGHVSPYQENIITLDPTTFPDNTEVSQTDRRVIPTKGALVQAEFKTRVGNRALVTLTRKDGTLLPFGTVVTLERKTGEAFESAGVVDDKGKVYLSGLSEAGKLKAQWGTNSQCYADYKLPLKKGMSGIFLTRAVCM

SEQ ID NO: 4851 - protein, 760 aa, Escherichia coli
MENNRNFPARQFHSLTFFAGLCIGITPVAQALAAEGQTNADDTLVVEASTPSLYAPQQSADPKFSRPVADTTRTMTVISEQVIKDQGATNLTDALKNVPGVGAFFAGENGNSTTGDAIYMRGADTSNSIYIDGIRDIGSVSRDTFNTEQVEVIKGPSGTDYGRSAPTGSINMISKQPRNDSGIDASASIGSAWFRRGTLDVNQVIGDTTAARLNVMGEKTHDAGRDKVKNERYGIAPSVAFGLGTANRLYLNYLHVTQHNTPDGGIPTIGLPGYSAPSAGTAALNHSGKVDTHNFYGTDSDYDDSTTDTATMRFEHDINDNTTIRNTTRWSRVKQDYLMTAIMGGASNITQPTSDVNSWTWSRTANTKDVSNKILTNQTNLTSTFYTASIGHDVSTGVEFTRETQTNYGVNPVTLPAVNIYHPDSSIHPGGLTRNGANANGQTDTFAIYAFDTLQITRDFELNGGIRLDNYHTEYDSATACGGSGRGAITCPAGVAKGSPVTTVDTAKSGNLVNWKAGALYHLTENGNVYINYAVSQQPPGGNNFALAQSGSGNSANRTDFKPQKANTSEIGTKWQVLDKRLLLTAALFRTDIENEVEQNDDGTYSQYGKKRVEGYEISVAGNITPAWRVIGGYTQQKATIKNGKDVAQDGSSSLPYTPEHAFTLWSQYQATDDISVGAGARYIGSMHKGSDGAVGTPAFTEGYWVADAKLGYRVNRNLDFQLNVYNLFDTDYVASINKSGYRYHPGEPRTFLLTANMHF

SEQ ID NO: 4852 - protein, 402 aa, Escherichia coli
MLIPSVQAAKPQKVTLMVDDVPVAQVLQALAEQEKLNLVVSPDVSGTVSLHLTDVPWKQALQTVVKSAGLITRQEGNILSVHSIAWQNDNIARQEAEQARAQANLPLENRNITLQYADAGELAKAGEKLLSAKGSMTVDKRTNRLLLRDNKTALSALEQWVAQMDLPVGQVELSAHIVTINEKSLRELGVKWTLADAQHAGGVGQVTTLGSDLSVATATTHVGFNIGRINGRLLDLELSALEQKQQLDIIASPRLLASHLQPASIKQGSEIPYQVSSGESGATSVEFKEAVLGMEVTPTVLQKGRIRLKLHISQNVPGQVLQQADGEVLAIDKQEIETQVEVKSGETLALGGIFTRKNKSGQDSVPLLGDIPWFGQLFRHDGKEDERRELVVFITPRLVSSE

SEQ ID NO: 4853 - protein, 446 aa, Escherichia coli; identical to SEQ ID NO: 2176

SEQ ID NO: 4854 - protein, 367 aa, Escherichia coli
MSRKTVSRTFSSFSISVVAVAVASTFSAHAGKFNPKFLEDVQGVGQHVDLTMFEKGQEQQLPGIYRVSVYVNEQRMETRTLEFKEATEAQRKAMGESLVPCLSRTQLAEMGVRVESFPALNLVSAEACVPFDEIIPLASSHFDFSEQKLVLSFPQAAMHQVARGTVPESLWDEGIPALLLDYSFSGSNSEYDSTGSSSSYVDDNGTVHHDDGKDTLKSDSYYLNLRSGLNLGAWRLRNYSTWSHSGGKAQWDNIGTSLSRAIIPFKAQLTMGDTATAGDIFDSVQMRGAMLDSDEEMLPDSQRGFAPIVRGIAKSNAEVSIEQNGYVIYRTYVQPGAFEINDLYPTANSGDLTVIIKEADGSEQRFI

SEQ ID NO: 4855 - protein, 232 aa, Escherichia coli; identical to SEQ ID NO: 2087

SEQ ID NO: 4856 - protein, 878 aa, Escherichia coli
MSYLNLRLYQRNTQCLHIRKHRLAGFFVRLFVACAFAAQAPLSSAELYFNPRFLADDPQAVADLSRFENGQELPPGTYRVDIYLNNGYMATRDVTFNTGDSEQGIVPCLTRAQLASMGLNTASVSGMNLLADDACVPLTSMIHDATAHLDVGQQRLNLTIPQAFMSNRARGYIPPELWDPGINAGLLNYNFSGNSVQNRIGGNSHYAYLNLQSGLNIGAWRLRDNTTWSYNSSDRSSGSKNKWQHINTWLERDIIPLRSRLTLGDGYTQGDIFDGINFRGAQLASDDNMLPDSQRGFAPVIHGIARGTAQVTIKQNGYDIYNSTVPPGPFTINDIYAAGNSGDLQVTIKEADGSTQIFTVPYSSVPLLQREGHTRYSITAGEYRSGNAQQEKPRFFQSTLLHGLPAGWTIYGGTQLADRYRAFNFGIGKNMGALGALSVDMTQANSTLPDDSQHDGQSVRFLYNKSLNESGTNIQLVGYRYSTSGYFNFADTTYSRMNGYNIETQDGVIQVKPKFTDYYNLAYNKRGKLQLTVTQQLGRTSTLYLSGSHQTYWGTSNVDEQFQAGLNTAFEDINWTLSYSLTKNAWQKGRDQMLALNVNIPFSHWLRSDSKSQWRHASASYSMSHDLNGRMTNLAGVYGTLLEDNNLSYSVQTGYAGGGDGNSGSTGYATLNYRGGYGNANIGYSHSDDIKQLYYGVSGGVLAHANGVTLGQPLNDTVVLVKAPGAKDAKVENQTGVRTDWRGYAVLPYATEYRENRVALDTNTLADNVDLDNAVANVVPTRGAIVRAEFKARVGIKLLMTLTHNNKPLPFGAMVTSESSQSSGIVADNGQVYLSGMPLAGKVQVKWGEEENAHCVANYQLPPESQQQLLTQLSAECR

SEQ ID NO: 4857 - protein, 713 aa, Escherichia coli
MAKFTPSFSGIKGRALFSLIFAAPMIHATDTATTKDGETITVTADANTATEATDGYQPLSTSTATLTDMPMLDIPQVVNTVSDQVLENQNATTLDEALYNVSNVVQTNTLGGTQDAFVRRGFGANRDGSIMTNGLRTVLPRSFNAATERVEVLKGPASTLYGILDPGGLINVVTKRPEKTFHGSVSATSSSFGGGTGQLDITGPIEGTQLAYRLTGEVQDEDYWRNFGKERSTFIAPSLTWFGDNATVTMLYSHRDYKTPFDRGTIFDLTTKQPVNVDRKIRFDEPFNITDGQSDLAQLNAEYHLNSQWTARFDYSYSQDKYSDNQARVTAYDATTGTLTRRVDATQGSTQRMHSTRADLQGNVDIAGFYNEILGGVSYEYYDLLRTDMIRCKNAKDFNIYNPVYGNTSKCTTVSASDSDQTIKQDSYSAYAQDALYLTDNWIAVAGIRYQYYTQYAGKGRPFNVNTDSRDEQWTPKLGLVYKLTPSVSLFANYSQTFMPQSSIASYIGDLPPESSNAYEVGAKFELFDGITADIALFDIHKRNVLYTESIGDETIAKTAGRVRSRGVEVDLAGALTENINIIASYGYTDAKVLEDPDYAGKPLPNVPRHTGSLFLTYDIHNMPGNNTLTFGGGGHGVSRRSATNGADYYLPGYFVADAFAAYKMKLQYPVTLQLNVKNLFDKTYYTSSIATNNLGNQIGDPREVQFTVKMEF

SEQ ID NO: 4858 - protein, 365 aa, Escherichia coli; identical to SEQ ID NO: 3878

SEQ ID NO: 4859 - protein, 102 aa, Escherichia coli; identical to SEQ ID NO: 1823

SEQ ID NO: 4860 - protein, 700 aa, Escherichia coli
MKIFSVRQTVLPALLVLSPVVFAADEQTMIVSAAPQVVSELDTPAAVSVVDGEEMRLATPRINLSESLTGVPGLQVQNRQNYAQDLQLSIRGFGSRSTYGIRGIRLYVDGIPATMPDGQGQTSNIDLSSVQNVEVLRGPFSALYGNASGGVMNVTTQTGQQPPTIEANSYYGSFGSWRYGLKATGATGDGTQPGDVDYTVSTTRFTTHGYRDHSGAQKNLANAKLGVRIDEASKLSLIFNSVDIKADDPGGLTKAEWKANPQQAPRAEQYDTRKTIKQTQAGLRYERSLSSRDDMSVMMYAGERETTQYQSIPMAPQLNPSHAGGVITLQRHYQGIDSRWTHRGELGVPVTFTTGLNYENMSENRKGYNNFRLNSGMPEYGQKGELRRDERNLMWNIDPYLQTQWQLSEKLSLDAGVRYSSVWFDSNDHYVTPGNGDDSGDASYHKWLPAGSLKYAMTDAWNIYLAAGRGFETPTINELSYRADGQSGMNFGLKPSTNDTIEIGSKTRIGDGLLSLALFQTDTDDEIVVDSSSGGRTTYKNAGKTRRQGAELAWDQRFAGDFRVNASWTWLDATYRSNVCNEQDCNGNRMPGIARNMGFASIGYVPEDGWYAGTEARYMGDIMADDENTAKAPSYTLVGLFTGYKYNYHNLTVDLFGRVDNLFDKEYVGSVIVNESNGRYYEPAPGRNYGVGMNIAWRFE

SEQ ID NO: 4861 - protein, 161 aa, Escherichia coli; identical to SEQ ID NO: 2582

SEQ ID NO: 4862 - protein, 266 aa, Escherichia coli
MAKSLFRALVALSFLAPLWLNAAPRVITLSPANTELAFAAGITPVGVSSYSDYPPQAQKIEQVSTWQGMNLERIVALKPDLVIAWRGGNAERQVDQLASLGIKVMWVDATSIEQIANALRQLAPWSPQPDKAEQAAQSLLDQYAQLKAQYADKPKKRVFLQFGINPPFTTGKESIQNQVLEVCGGENIFKDSRVPWPQVSREQVLARSPQAIVITGGPDQIPKIKQYWGEQLKIPVIPLTSDWFERASPRIILAAQQLCNALSQVD

SEQ ID NO: 4863 - protein, 203 aa, Escherichia coli; identical to SEQ ID NO: 2009

SEQ ID NO: 4864 - protein, 660 aa, Escherichia coli
MSRPQFTSLRLSLLALAVSATLPTLAFATETMTVTATGNARSSFEAPMMVSVIDTSAPENQTATSATDLLRHVPGITLDGTGRTNGQDVNMRGYDHRGVLVLIDGVRQGTDTGHLNGTFLDPALIKRVEIVRGPSALLYGSGALGGVISYDTVDAKDLLQEGQSSGFRVFGTGGTGDHSLGLGASAFGRTENLDGIVAWSSRDRGDLRQSNGETAPNDESINNMLAKGTWQIDSAQSLSGLVRYYNNDAREPKNPQTVEASESSNPMVDRSTIQRDAQLSYKLAPQGNDWLNADAKIYWSEVRINAQNTGSSGEYREQITKGARLENRSTLFADSFASHLLTYGGEYYRQEQHPGGATTGFPQAKIDFSSGWLQDELTLRDLPITLLGGTRYDSYRGSSDGYKDVDADKWSSRAGMTINPTNWLMLFGSYAQAFRAPTMGEMYNDSKHFSIGRFYTNYWVPNPNLRPETNETQEYGFGLRFDDLMLSNDALEFKASYFDTKAKDYISTTVDFAAATTMSYNVPNAKIWGWDVMTKYTTDLFSLDVAYNRTRGKDTDTGEYISSINPDTVTSTLNIPIAHSGFSVGWVGTFADRSTHISSSYSKQPGYGVNDFYVSYQGQQALKGMTTTLVLGNAFDKEYWSPQGIPQDGRNGKIFVSYQW

SEQ ID NO: 4865 - protein, 359 aa, Escherichia coli; identical to SEQ ID NO: 2329

SEQ ID NO: 4866 - protein, 866 aa, Escherichia coli
MYRTHRQHSLLSSGGVPSFIGGLVVFVSAAFNAQAETWFDPAFFKDDPSMVADLSRFEKGQKITPGVYRVDIVLNQTIVDTRNVNFVEITPEKGIAACLTTESLDAMGVNTDAFPAFKQLDKQACVPLAEIIPDASVTFNVNKLRLEISVPQIAIKSNARGYVPPERWDEGINALLLGYSFSGANSIHSSADSDSGDSYFLNLNSGVNLGPWRLRNNSTWSRSSGQTAEWKNLSSYLQRAVIPLKGELTVGDDYTAGDFFDSVSFRGVQLASDDNMLPDSLKGFAPVVRGIAKSNAQITIKQNGYTIYQTYVSPGAFEISDLYSTSSSGDLLVEIKEADGSVNSYSVPFSSVPLLQRQGRIKYAVTLAKYRTNSNEQQESKFAQATLQWGGPWGTTWYGGGQYAEYYRAAMFGLGFNLGDFGAISFDATQAKSTLADQSEHKGQSYRFLYAKTLNQLGTNFQLMGYRYSTSGFYTLSDTMYKHMDGYEFNDGDDEDTPMWSRYYNLFYTKRGKLQVNISQQLGEYGSFYLSGSQQTYWHTDQQDRLLQFGYNTQIKDLSLGVSWNYSKSRGQPDADQVFALNFSLPLNLLLPRSNDSYTRKKNYAWMTSNTSIDNEGHITQNLGLTETLLDDGNLSYSVQQGYNSEGKTANGSASMDYKGAFADARVGYNYSDNGSQQQLNYALSGSLVAHSQGITLGQSLGETNVLIAAPGAENTRVANSTGLKTDWRGYTVVPYATSYRENRIALDAASLKRNVDLENAVVNVVPTKGALVLAEFNAHAGARVLMKTSKQGIPLRFGAIATLDGIQTNSGIIDDDGSLYMSGLPAQGAITVRWGEAPDQICHISYQLTEQQINSAITRMDAICR

SEQ ID NO: 4867 - protein, 883 aa, Escherichia coli; identical to SEQ ID NO: 4713

SEQ ID NO: 4868 - protein, 758 aa, Escherichia coli
MNIYRLSVLSCLAMVTPPALAAEFNLNVLDKSIRDSVDISLLNQKGVVAPGDYFVSVTVNNNKISNGQQIRWQKSGDKIIPCINESLIELFGLKSDFRKKLPAIKECVDFSVFPEIIFTFDQANQQLNITIPQAWLAWHSENWTPPSTWNNGIPGFLMDYNLFASTYRPQSGSSSNNLNAYGTTGLNAGAWRLRSDYQLSQSDSGDNREQSGAISRTYLFRPLPQIGSRLTLGETDFSSNIFDGFSYTGAALASDDRMLPWELRGYAPQISGIAQTNATVTISHSGRVIYQKKVPPGPFIIDDLNQSVQGTLDVKVSEEDGRVNNFQVSAASTPFLTRQGQVRYKLVAGRPRSSMSHHTEDETFISHEVSWGMLSNTSLYGGMLLAGDDYRSGALGIGQNMLWLGALSFDVTWADSHFDTQQDEQGYSYRFNYSKQVDATNSTISLAAYRFSDRHFHSYANYIDHKYNDADAQDEKQTISLSFGQPITPLNLNLYANILHQSWWNADTSTTANITAGFNVDIGDWKDISVSTSFNTTHYEDKDRDNQIYFSISLPIGESGRLGYDMQNNSNTTTHRMSWNDTLDERNSWGMSAGIQSDRPDNGAQVSGNYQHLSSAGEWDLTGTYAANDYTSASASWSGSFTATQHGAAFHRRSSTNEPRLMVSTDGVGDIPIQGNIDYTNRFGIAVVPFVSSYQPTTVAVNMNDLPDGVTVSENVVKETWTEGAIGFKSLASRAGKDLNVIISDANGHFPPLGADVR

SEQ ID NO: 4869 - protein, 869 aa, Escherichia coli
MKIPTTTDIPQRYTWCLAGICYSSLAILPSFLSYAESYFNPAFLLENGTSVADLSRFERGNHQPAGVYRVDLWRNDEFIGSQDIVFESTTENTGDKSGGLMPCFNQVLLERIGLNSSAFPELAQQQNNKCINLLKAVPDATINFDFAAMRLNITIPQIALLSSAHGYIPPEEWDEGIPALLLNYNFTGNRGNGNDSYFFSELSGINIGPWRLRNNGSWNYFRGNGYHSEQWNNIGTWVQRAIIPLKSELVMGDGNTGSDIFDGVGFRGVRLYSSDNMYPDSQQGFAPTVRGIARTAAQLTIRQNGFIIYQSYVSPGAFEITDLHPTSSNGDLDVTIDERDGNQQNYTIPYSTVPILQREGRFKFDLTAGDFRSGNSQQSSPFFFQGTALGGLPQEFTAYGGTQLSANYTAFLLGLGRNLGNWGAVSLDVTHARSQLADDSRHEGDSIRFLYAKSMNTFGTNFQLMGYRYSTQGFYTLDDVAYRRMEGYEYDYDYDGEHRDEPIIVNYHNLRFSRKDRLQLNISQSLNDFGSLYISGTHQKYWNTSDSDTWYQVGYTSSWVGISYSLSFSWNESVGIPDNERIVGLNVSVPFNVLTKRRYTRENALDRAYASFNANRNSNGQNSWLAGVGGTLLEGHNLSYHVSQGDTSNNGYTGSATANWQAAYGTLGVGYNYDRDQHDVNWQLSGGVVGHENGITLSQPLGDTNVLIKAPGAGGVRIENQTGILTDWRGYAVMPYATVYRYNRIALDTNTMGNSIDVEKNISSVVPTQGALVRANFDTRIGVRALITVTQGRKPVPFGSLVRENSTGITSMVGDDGQVYLSGAPLSGELLVQWGDGANSRCIAHYVLPKQSLQQAVTVISAVCTHPGS

SEQ ID NO: 4870 - protein, 237 aa, Escherichia coli; identical to SEQ ID NO: 3022

SEQ ID NO: 4871 - protein, 614 aa, Escherichia coli
MIKKASLLTACSVTAFSAWAQDTSPDTLVVTANRFEQPRSTVLAPTTVVTRQDIDRWQSTSVNDVLRRLPGVDITQNGGSGQLSSIFIRGTNASHVLVLIDGVRLNLAGVSGSADLSQFPIALVQRVEYIRGPRSAVYGSDAIGGVVNIITTRDEPGTEISAGWGSNSYQNYDVSTQQQLGDKTRVTLLGDYAYTHGYDVVAYGNTGTQAQPDNDGFLSKTLYGALEHNFTDAWSGFVRGYGYDNRTNYDAYYSPGSPLVDTRKLYSQSWDAGLRYNGELIKSQLITSYSHSKDYNYDPHYGRYDSSATLDEMKQYTVQWANNVIVGHGSIGAGVDWQKQTTTPGTGYVEDGYDQRNTGIYLTGLQQVGDFTFEGAARSDDNSQFGRHGTWQTSAGWEFIEGYRFIASYGTSYKAPNLGQLYGFYGNPNLDPEKSKQWEGAFEGLTAGVNWRISGYRNDVSDLIDYDDHTLKYYNEGKARIKGVEATANFDTGPLTHTVSYDYVDARNAITDAPLLRRAKQQVKYQLDWQLYDFDWGITYQYLGTRYDKDYSSYPYQTVKMGGVSLWDLAVAYPVTSHLTVRGKIANLFDKDYETVYGYQTAGREYTLSGSYTF

SEQ ID NO: 4872 - protein, 816 aa, Escherichia coli; identical to SEQ ID NO: 3562

SEQ ID NO: 4873 - protein, 266 aa, Escherichia coli; identical to SEQ ID NO: 1892

SEQ ID NO: 4874 - protein, 678 aa, Escherichia coli
MVPSTFSRLKAARCLPVVLAALIFAGCGTHTPDQSTAYMQGTAQADSAFYLQQMQQSSDDTRINWQLLAIRALVKEGKTGQAVELFNQLPQELNDSQRLEKTLLAVEIKLAQKDFAGAQNLLAKITPADLEQNQQARYWQAKIDASQGRPSIDLLRALIAQEPLLGAKEKQQNIDATWQALSSMTQEQANTLVINADENILQGWLDLQRVWFDNRNDPDMMKAGIADWQKRYPNNPGAKMLPTQLVNVKAFKPASTNKIALLLPLNGQAAVFGRTIQQGFEAAKNIGTQPVAAQVAAAPAADVAEQPQPQTVDGVASPAQASVSDLTGEQPAAQPVPVSAPATSTAAVSAPANPSAELKIYDTSSQPLSQILSQVQQDGASIVVGPLLKNNVEELLKSNTPLNVLALNQPENIENRVNICYFALSPEDEARDAARHIRDQGKQAPLVLIPRSSLGDRVANAFAQEWQKLGGGTVLQQKFGSTSELRAGVNGGSGIALTGTPITPRATTDSGMTTNNPTLQTTPTDDQFTNNGGRVDAVYIVATPGEIAFIKPMIAMRNGSQSGATLYASSRSAQGTAGPDFRLEMEGLQYSEIPMLAGGNLPLMQQALSAVNNDYSLARMYAMGVDAWSLANHFSQMRQVQGFEINGNTGSLTANPDCVINRKLSWLQYQQGQVVPAS

SEQ ID NO: 4875 - protein, 659 aa, Escherichia coli
MFRLNPFVRVGLCLSAISCAWPVLAVDDDGETMVVTASSVEQNLKDAPASISVITQEDLQRKPVQNLKDVLKEVPGVQLTNEGDNRKGVSIRGLDSSYTLILVDGKRVNSRNAVFRHNDFDLNWIPVDSIERIEVVRGPMSSLYGSDALGGVVNIITKKIGQKWSGTVTVDTTIQEHRDRGDTYNGQFFTSGPLIDGVLGMKAYGSLAKREKDDPQNSTTTDTGETPRIEGFSSRDGNVEFAWTPNQNHDFTAGYGFDRQDRDSDSLDKNRLERQNYSVSHNGRWDYGTSELKYYGEKVENKNPGNSSPITSESNTVDGKYTLPLTAINQFLTVGGEWRHDKLSDAVNLTGGTSSKTSASQYALFVEDEWRIFEPLALTTGVRMDDHETYGEHWSPRAYLVYNATDTVTVKGGWATAFKAPSLLQLSPDWTSNSCRGACKIVGSPDLKPETSESWELGLYYMGEEGWLEGVESSVTVFRNDVKDRISISRTSDVNAAPGYQNFFGFTANGVPVFSYYNVNKARIQGVETELKIPFNDEWKLSLNYTYNDGRDVSNGENKPLSDLPFHTANGTLDWKPLALEDWSFYVSGHYTGQKRADSATAKTPGGYTIWNTGAAWQVTKDVKLRAGVLNLGDKDLSRDDYSYNEDGRRYFMAVDYRF

SEQ ID NO: 4876 - protein, 869 aa, Escherichia coli; identical to SEQ ID NO: 3012

SEQ ID NO: 4877 - protein, 375 aa, Escherichia coli
MKVKVLSLLVPALLVAGAANAAEVYNKDGNKLDLYGKVDGLHYFSDDKSVDGDQTYMRLGFKGETQVTDQLTGYGQWEYQIQGNAPESENNSWTRVAFAGLKFQDIGSIDYGRNYGVVYDVTSWTDVLPEFGGDTYGSDNFMQQRGNGFATYRNTDFFGLVDGLNFAVQYQGQNGSVSGENDPDFTGHGITNNGRKALRQNGDGVGGSITYDYEGFGIGGAISSSKRTWDQNNTGLIGTGDRAETYTGGLKYDANNIYLAAQYTQTYNATRVGSLGWANKAQNFEAVAQYQFDFGLRPSLAYLQSKGKNLGVINGRNYDDEDILKYVDVGATYYFNKNMSTYVDYKINLLDDNQFTRDAGINTDNIVALGLVYQF

SEQ ID NO: 4878 - protein, 207 aa, Escherichia coli; identical to SEQ ID NO: 2211

SEQ ID NO: 4879 - protein, 208 aa, Escherichia coli; identical to SEQ ID NO: 1949

SEQ ID NO: 4880 - protein, 857 aa, Escherichia coli
MSRKTVSRTFSSFSISVVAVAVASTFSAHAGKFNPKFLEDVQGVGQHVDLTMFEKGQEQQLPGIYRVSVYVNEQRMETRTLEFKEATEAQRKAMGESLVPCLSRTQLAEMGVRVESFPTLNQVPAEACVPFDEIIPQASSHFDFSEQKLVLSFPQAAMHQVARGTVPESLWDEGILALLLDYSFSGSNSEYDSSGSSSSYVDDNGTVHHDDGDDTLKSDSYYLNLRSGLNLGAWRLRNYSTWSHSGGKAQWDNIGTSLSRAIVPFKAQLTMGDTATAGDIFDSVQMRGAMLASDDEMLPDSQRGFAPIVRGIAKSNAEVSIEQNGYVIYRTYVQPGAFEINDLYPTANSGDLTVIIKEADGSEQRFIQPFSSVPIFQREGHLKYSFAAGEYQAGNYDSGSPRFGQLDLIYGLPWGMTAYGGVLISNNYNAFALGIGKNFGYNGAISIDVTQAKSELNNDRDSQGQSYRFLYSKSFESGTDFRLAGYRYSTSGFYTFQEATDVRSDADSDYNRYHKRSEIQGNLTQQLGAYGSVYLNLTQQDYWNDAGKQNTVSAGYNGRIGKVSYSIAYSWNKSPEWDESDRLWSFNISVPLGRAWSNYRVTTDQDGRTNQQVGVSGTLLEDRNLSYSVQEGYASNGVGNSGNANVGYQGGSGNVNVGYSYGKDYRQLNYSVRGGVIVHSEGVTLSQPLGETMTLISVPGARNARVVNNGGVQVDWMGNAIVPYAMPYRENEISLRSDSLGDYVDVENAFQKVVPTRGAIVRARFDTRVGYRVLMTLLRSAGSPVPFGATATLITDKQNEVSSIVGEEGQLYISGMPEEGRVLIKWGNDASQQCVAPYKLSLELKQGGIIPVSANCQ

SEQ ID NO: 4881 - protein, 729 aa, Escherichia coli; identical to SEQ ID NO: 2948

SEQ ID NO: 4882 - protein, 686 aa, Escherichia coli; identical to SEQ ID NO: 3015

SEQ ID NO: 4883 - protein, 843 aa, Escherichia coli; identical to SEQ ID NO: 3042

SEQ ID NO: 4884 - protein, 869 aa, Escherichia coli; identical to SEQ ID NO: 2903

SEQ ID NO: 4885 - protein, 478 aa, Escherichia coli; identical to SEQ ID NO: 2404

SEQ ID NO: 4886 - protein, 838 aa, Escherichia coli
MPQRHHQGHKRTPKQLALIIKRCLPMVLTGSGMLCTTANAEEYYFDPIMLETTKSGMQTTDLSRFSKKYAQLPGTYQVDIWLNKKKVSQKKITFTANAEQLLQPQFTVEQLRELGIKVDEIPALAEKDDDSVINSLEQIIPGTAAEFDFNHQRLNLSIPQIALYRDARGYVSPSRWDDGIPTLFTNYSFTGSDNRYRQGNRSQRQYLNMQNGANFGPWRLRNYSTWTRNDQASSWNTISSYLQRDIKALKSQLLLGESATSGSIFSSYTFTGVQLASDDNMLPNSQRGFAPTVRGIANSSAIVTIRQNGYVIYQSNVPAGAFEINDLYPSSNSGDLEVTIEESDGTQRRFIQPYSSLPMMQRPGHLKYSATAGRYRADANSDSKEPEFAEATAIYGLNNTFTLYGGLLGSEDYYALGIGIGGTLGALGALSMDINRADTQFDNQHSFHGYQWRTQYIKDIPETNTNIAVSYYRYTNDGYFSFDEANTRNWDYNSRQKSEIQFNISQTIFDGVSLYASGSQQDYWGNNEKNRNISVGVSGQQWGIGYSLNYQYSRYTDQNNDRALSLNLSIPLERWLPRSRVSYQMTSQKDRPTQHEMRLDGSLLDDGRLSYSLEQSLDDDNNHNSSVNASYRSPYGTFSAGYSYGNDSSQYNYGVTGGVVIHPHGVTLSQYLGNAFALIDANGASGVRIQNYPGIATDPFGYAVVPYLTTYQENRLSVDTTQLPDNVDLEQTTQFVVPNRGAMVAARFNANIGYRVLVTVSDRNGKPLPFGALASNDETGQQSIVDEGGILYLSGISSKSQSWTVRWGNQADQQCQFAFSTPDSEPTTSVLQGTAQCH

SEQ ID NO: 4887 - protein, 746 aa, Escherichia coli
MNKKIHSLALLVNLGIYGVAQAQEPTDTPVSHDDTIVVTAAEQNLQAPGVSTITADEIRKNPVARDVSEIIRTMPGVNLTGNSTSGQRGNNRQIDIRGMGPENTLILIDGKPVSSRNSVRQGWRGERDTRGDTSWVPPEMIERIEVLRGPAAARYGNGAAGGVVNIITKKGSGEWHGSWDAYFNAPEHKEEGATKRTNFSLTGPLGDEFSFRLYGNLDKTQADAWDINQGHQSARAGTYATTLPAGREGVINKDINGVVRWDFAPLQSLELEAGYSRQGNLYAGDTQNTNSDAYTRSKYGDETNRLYRQNYSLTWNGGWDNGVTTSNWVQYEHTRNSRIPEGLAGGTEGKFNEKATQDFVDIDLDDVMLHSEVNLPIDFLVNQTLTLSTEWNQQRMKDLSSNTQALTGTNTGGAIDGVSATDRSPYSKAEIFSLFAENNMELTDSTIVTPGLRFDHHSIVGNNWSPALNISQGLGDDFTLKMGIARAYKAPSLYQTNPNYILYSKGQGCYASAGGCYLQGNDDLKAETSINKEIGLEFKRDGWLAGITWFRNDYRNKIEAGYVAVGQNAVGTDLYQWDNVPKAVVEGLEGSLNVPVSETVMWTNNITYMLKSENKTTGDRLSIIPEYTLNSTLSWQAREDLSMQTTFTWYGKQQPKKYNYKGQPAVGPETKEISPYSIVGLSATWDVTKNVSLTGGVDNLFDKRLWRAGNAQTTGDLAGANYIAGAGAYTYNEPGRTWYMSVNTHF

SEQ ID NO: 4888 - protein, 359 aa, Escherichia coli
MVVTGLLAANVAHAAEVYNKDGNKLDLYGKVTALRYFTDDTRDDGDKTYARLGFKGETQINDQMIGFGHWEYDFKGYNDEANGSRGNKTRLAYAGLKISEFGSLDYGRNYGVGYDIGSWTDMLPEFGGDTWSQKDVFMTYRTTGVATYRNYDFFGLIEGLNFAAQYQGKNERTDNSHLYGADYTRANGDGFGISSTYVYDGFGIGAVYTKSDRTNAQERAAANPLNASGKNAELWATGIKYDANNIYFAANYAETLNMTTYGDGYISNKAQSFEVVAQYQFDFGLRPSLAYLKSKGRDLGRYGDQDMIEYIDVGATYFFNKNMSTYVDYKINLIDESDFTRAVDIRTDNIVATGITYQF

SEQ ID NO: 4889 - protein, 840 aa, Escherichia coli
MNKSVVSISAAMLVLLCQPVMGSEISPATPSDEDNYTFDPQLFRGSRFSQSSLAKLTARESVAPGNYKMDIYTNNKLSGSWNVTFKEATDGRVLPCLTPEVADAIGLKTGEDKGEKDPVCTFAKELAPGITSQTQLSQLRLDLSVPQSQLISRPRGYVPPSELDTGASLAFMNYIANYYNVAYSGQNAHSQRSLWASFNGGINLGAWQYRQLSNMTWDNDKGNQWNNIRSYLQRPLPAINSQLMMGQLITSGRFFSGLSYHGVSLATDERMLPDSMRGYAPTIRGVAATNARVSVMQNGHEIYQTTVAPGPFEINDLYPTSYSGDLDVTVTEANGAVSRFSVPFSAVPESMRPGTSRYNVEVGKTQDSGDDSMFGDFTWQHGLTNTLTFNSGSRIADGYQALMLGGVYGSTLGAFGANLTWSHARVPESEAQSGWMSQLTWSKTFQPTSTTVSLAGYRYSTSGYRDLADVLGERQAASNKQSWDSSQWRQQSRFDLTLSQSLANYGNLFVSGSTQNYRGGKSRDTQLQLGYSNSFSHGISMNLSVGRQRMGGYKDNSDDMQTVTSLSFSFPLGGNGPRVPSLSNSWTHSTDGSSQLQSSLTGMLDEAQTTNYSLNVMRDQQYKQTTLSGNMQKRFSQTTVGLNASKGQDYWQASGNVQGAMAVHGGGVTFGPYLGETFALVEAKGAEGAKVYNSSQLEINDSGYALVPAVTPYRYNRISLDPQGMDGDAELVDSEKQVAPVAGAAVKVVFRTRPGKALLIKSHMADGSELPMGADVLDENNTVVGIAGQGGQIYLRTEQTKGHLSVRWGEGANDSCQLPFDISGKDSNSPIIRLNETCQS

SEQ ID NO: 4890 - protein, 162 aa, Escherichia coli; identical to SEQ ID NO: 1965

SEQ ID NO: 4891 - protein, 828 aa, Escherichia coli; identical to SEQ ID NO: 2388

SEQ ID NO: 4892 - protein, 883 aa, Escherichia coli
MTAFRAAFKAYRMHQVLLLPRFVRLTIALGLATAVFPVDAEYYFNPRFLSNDLAESVDLSAFTKGREAPPGTYRVDIYLNDEFMTSRDITFIADDNNADLIPCLSTDLLVSLGIKKSALLDNKEHSAEKHVPDNSACTPLQDRLVDASTEFDVGQQHLSLSVPQIYVGRMARGYVSPELWEEGINAGLLNYSFNGNSINNRSNHNAGKSNYAYLNLQSGINIGSWRLRDNSTWSYNSGSSNSSDSNKWQHINTSAERDIIPLRSRLTVGDSYTDGDIFDSVNFRGLKINSTEAMLPDSQHGFAPVIHGIARGTAQVSVKQNGYDIYQTTVPPGPFTIDDINSAANGGDLQVTIKEADGSIQTLYVPYSSVPVLQRAGYTRYALAMGEYRSGNNLQSSPKFIQGSLMHGLEENWTPYGGMQIAEDYQAFNLGIGKDLGLFGAFSFDITQANTTLADGTRHSGQSVKSVYSKSFYQTGTNIQVAGYRYSTQGFYNLSDSAYSRMSGYTVKPPTGDSNEQTQFIDYFNLFYSKRGQEQISISQQLGNYGTTFFSASRQSYWNTSRSDQQISFGLNVPFGDITTSLNYSYSNNIWQNDRDHLLAFTLNVPLSHWMRTDSQSAFRNSNASYSMSNDLKGGMTNLSGVYGTLLPDNNLNYSVQVGNTHGGNTSSGTSGYSSLNYRGAYGNTNVGYSRSGDSSQIYYGMSGGIIAHADGITFGQPLGDTMVLVKAPGADNVKIENQTGIHTDWRGYAILPFATEYRENRVALNANSLADNVELDETVVTVIPTHGAIARATFNAQIGGKVLMTLKYGNKSVPFGAIVTHGENKNGSIVAENGQVYLTGLPQSGKLQVSWGKDKNSNCIVEYKLPEVSPGTLLNQQTAICR

SEQ ID NO: 4893 - protein, 274 aa, Escherichia coli
MNKTAIALLALFASSVSLAATPWQKITQPVPGSAQSIGSFSNGCIVGADTLPIQSEHYQVMRTDQRRYFGHPDLVMFIQRLSSQVSNLGMGTVLIGDMGMPAGGRFNGGHASHQTGLDVDIFLQLPKTRWTSAQLLRPQALDLVSRDGKHVVSTLWKPEIFSLIKLAAQDKDVTRIFVNPAIKQQLCLDAGTDRDWLRKVRPWFQHRAHMHVRLRCPADSLECEDQPLPPPGDGCGAELQSWFEPPKPGTTKPEKKTPPPLPPSCQALLDEHVI

SEQ ID NO: 4894 - protein, 837 aa, Escherichia coli
MNMIGNNKKNITILLIGVSYNVYAGDYFDPSLLATDVGNYEGIDLSVFSNPGGGLEGERNVSIYINDTFYSRGVLNFKNGPSGALDPEFPIDFFDRILALKYRPVINSEIISAEDFRKSVSYSDVKFDQAISRVDISIPQAYLGQAAQLKSMPEHWDQGVTAFLMDYRLSGSWNKNEFASSENIYASSNLGFNLSGWRLRSFVNYSLYHSDMKSGSTLRDYDLGFYSTYLEKDLGNLRSTFKLGELSTPGRILDSFSYIGGSIYSNDDMLNDKLRNYTPTIRGIANSQAIVTVKQNGRIILQKNVPAGPFEINDFSPFGYAGDLFVHIKESDGQERSFIQPFSTLPEMKREGVFGYNISIGKYDNRGARESYRDIPFIYGFWSRGFSHGITSYGETIQSDNYQLIGLGSTLSLGYLGAVSGDMSVSRVKKDGDTHIGQSYGFKYSKNKIDTGTTLTLATYRYSTEDFYSFSDFASIDNSFYNSWSHKIKNRFTLDLSQSLGDFGYLSLMASQQNYWASDRNNKSVSLSHGFNVNNIYFSTSLSLEKNSGLFYDQGYNKTIGLYVSMPISNLLGAYNRSNSSLSYNMTKTDSIVNNIATLTGPIPETNAQYRVSSGWANGGRDSSHAFSINWNGDMINASAGYTHAGSARTVDYSFSGGAIMYPWGMAFTSGSVNNGAAVVDVQGISGVKVRQGGNTSLLGTSIVSSIQPYTENRIDLDPQDLPDDVTIGELSKSFIPEKGAVIRLKYDVFKGKQVIFNLKKADGSNLPFGTVVSLAGTNNTNTGIVDDDGRVYFAGVPEKGSLRASFGKDKTCDMSFNLKNNIKENQMITEFDGVCR

SEQ ID NO: 4895 - protein, 266 aa, Escherichia coli; identical to SEQ ID NO: 1894

SEQ ID NO: 4896 - protein, 243 aa, Escherichia coli; identical to SEQ ID NO: 4409

SEQ ID NO: 4897 - protein, 236 aa, Escherichia coli; identical to SEQ ID NO: 3482

SEQ ID NO: 4898 - protein, 229 aa, Escherichia coli
MKSVLLLLTVLFVQSVEAGIMPASSRIIYRDGDREKTLMLVNTNDYPVLVQSWVDNGEGSPEAASPPFVVLPPVFRLAARRTQGLRIIYNHDPLPQDRESAFWLNLYEMPPETPHQDPTHLTLAMNTQLKIFYRPKSVTMTPEEAMRKISWHLVNNGSSSYIELNNPTPLNISFTSISIGATKVEQESDMMIKPFSQRRYWLASKNDSGIVTATYLDDNGAQIKQQLAQ

SEQ ID NO: 4899 - protein, 614 aa, Escherichia coli; identical to SEQ ID NO: 1883

SEQ ID NO: 4900 - protein, 203 aa, Escherichia coli; identical to SEQ ID NO: 2009

SEQ ID NO: 4901 - protein, 656 aa, Escherichia coli
MRLKKHYLCTALSLAFTQQAVAAQESDSLTVWSSPVSSTTTTVLDQPTMKALDKQNVAQALSVVPGVVLQKSGSRNEEQVKVRGFDSRQVPVYFDGVPIYVPYDGNLDLARILTNNLGAVEVSKGYSSLLQGPNQMGGAINITTQKPTKPLEASLGYRQGWSRSQDNAYDMHASFAASSELGYLQVSGSQLKQDFLGLPHGVNNDIAGKHGKMINSSADDKRGIVKLGFTPRENDEYTLTYIKQDGEKDNPPYSGNSGQKSRYWQWPEYDKESFYYQGTTQLNDRFTLKSRLYRDTFENTLMMYNSLADLKNKKGSYSHYSDYSDGAGLQLAADVRENDLLTFAVNWKDDVHREKGAPHAAYDRYEDRTWSLASEYQWAAADNVDVVAGISYDWRDSVEAKKHEKDGSITHYDDNNQSAFNWQVMGKYHFVNEDTLALSYYDRKRFPTLKERYTTSKPAYNQIAIVNPQLKPERARGVDLTWNGAFTHDWGFEVSVYYNRVSDAILSHNIDADTIQNQNSGTVDYSGLDAGIKGKISNILDVGLSYALIHADAKRKDIGKITDLPTQTMTAWMTLKPWEPLSVTLSEEARSSSYSNSDGSQKAAGFAVTHIRADYTLGHGFSVNASVNNLFDTQYAYSEGFVEEGRNFWAGVEYTF

SEQ ID NO: 4902 - protein, 669 aa, Escherichia coli; identical to SEQ ID NO: 3677

SEQ ID NO: 4903 - protein, 729 aa, Escherichia coli; identical to SEQ ID NO: 2948

SEQ ID NO: 4904 - protein, 213 aa, Escherichia coli; identical to SEQ ID NO: 2232

SEQ ID NO: 4905 - protein, 193 aa, Escherichia coli; identical to SEQ ID NO: 2250

SEQ ID NO: 4906 - protein, 241 aa, Escherichia coli; identical to SEQ ID NO: 2887

SEQ ID NO: 4907 - protein, 430 aa, Escherichia coli; identical to SEQ ID NO: 2617

SEQ ID NO: 4908 - protein, 760 aa, Escherichia coli
MENNRNFPARQFHSLTFFAGLCIGITPVAQALAAEGQTNADDTLVVEASTPSLYAPQQSADPKFSRPVADTTRTMTVISEQVIKDQGATNLTDALKNVPGVGAFFAGENGNSTTGDAIYMRGADTSNSIYIDGIRDIGSVSRDTFNTEQVEVIKGPSGTDYGRSAPTGSINMISKQPRNDSGIDASASIGSAWFRRGTLDVNQVIGDTTAVRLNVMGEKTHDAGRDKVKNERYGVAPSIAFGLGTANRLYLNYLHVTQHNTPDGGIPTIGLPGYSAPSAGTATLNHSGKVDTHNFYGTDSDYDDSTTDTATMRFEHDINDNTTIRNTTRWSRVKQDYLMTAIMGGASNITQPTSDVNSWTWSRTANTKDVSNKILTNQTNLTSTFYTASIGHDVSTGVEFTRETQTNYGVNPVTLPAVNIYHPDSSIHPGGLTRNGANANGQTDTFAIYAFDTLQITRDFELNGGIRLDNYHTEYDSATACGGSGRGAITCPAGVAKGSPVTTVDTAKSGNLVNWKAGALYHLTENGNVYINYAVSQQPPGGNNFALAQSGSGNSANRTDFKPQKANTSEIGTKWQVLDKRLLLTAALFRTDIENEVEQNDDGTYSQYGKKRVEGYEISVAGNITPAWQVIGGYTQQKATIKNGKDVAQDGSSSLPYTPEHAFTLWSQYQATDDISVGAGARYIGSMHKGSDGAVGTPAFTEGYWVADVKLGYRVNRNLDFQLNVYNLFDTDYVASINKSGYRYHPGEPRTFLLTANMHF

SEQ ID NO: 4909 - protein, 630 aa, Escherichia coli
MQRAVIPLKGELTVGDDYTAGDFFDSVSFRGVQLASDDNMLPDSLKGFAPVVRGIAKSNAQITIKQNGYTIYQTYVSPGAFEISDIYSTSSSGDLLVEIKEADGSVNSYSVPFSSVPLLQRQGRIKYAVTLAKYRTNSNEQQESKFAQATLQWGGPWGTTWYGGGQYAEYYRAAMFGLGFNLGDFGAISFDVTQAKSTLADQSEHKGQSYRFLYAKTLNQLGTNFQLMGYRYSTSGFYTLSDTMYKHMDGYEFNDGDDEDTPMWSRYYNLFYTKRGKLQVNISQQLSEYGSFYLSGSQQTYWHTDQQDRLLQFGYNTQIKDLSLGISWNYSKSRGQPDADQVFALNFSLPLNLLLSRSNDSYTSKKNYAWMTSNTSIDNEGHTTQNLGLTETLLDDGNLSYSVQQGYNSEGKTANGSASMDYKGVFADARVGYNYSDNGSQQQLNYALSGSLVAHSQGITLGQSLGETNVLIAAPGAENTRVANSTGLKTDWRGYTVVPYATSYRENRIALDAASLKRNVDLENAVVNVVPTKGALVLAEFNAHAGARVLMKTSKQGISLRFGAIATLDGVQTNSGIIDDDGSLYMAGLPAKGTITVRWGEAPDQICHISYELTEQQINSAITRMDAICR

SEQ ID NO: 4910 - protein, 108 aa, Escherichia coli; identical to SEQ ID NO: 3602

SEQ ID NO: 4911 - protein, 362 aa, Escherichia coli; identical to SEQ ID NO: 2998

SEQ ID NO: 4912 - protein, 512 aa, Escherichia coli; identical to SEQ ID NO: 2813

SEQ ID NO: 4913 - protein, 233 aa, Escherichia coli; identical to SEQ ID NO: 3548

SEQ ID NO: 4914 - protein, 351 aa, Escherichia coli; identical to SEQ ID NO: 2872

SEQ ID NO: 4915 - protein, 274 aa, Escherichia coli; identical to SEQ ID NO: 2304

SEQ ID NO: 4916 - protein, 366 aa, Escherichia coli; identical to SEQ ID NO: 3520

SEQ ID NO: 4917 - protein, 700 aa, Escherichia coli; identical to SEQ ID NO: 2926

SEQ ID NO: 4918 - protein, 729 aa, Escherichia coli; identical to SEQ ID NO: 3052

SEQ ID NO: 4919 - protein, 432 aa, Escherichia coli; identical to SEQ ID NO: 2026

SEQ ID NO: 4920 - protein, 243 aa, Escherichia coli; identical to SEQ ID NO: 2910

SEQ ID NO: 4921 - protein, 203 aa, Escherichia coli; identical to SEQ ID NO: 2009

SEQ ID NO: 4922 - protein, 208 aa, Escherichia coli; identical to SEQ ID NO: 1949

SEQ ID NO: 4923 - protein, 200 aa, Escherichia coli; identical to SEQ ID NO: 1788

SEQ ID NO: 4924 - protein, 367 aa, Escherichia coli; identical to SEQ ID NO: 2431

SEQ ID NO: 4925 - protein, 162 aa, Escherichia coli; identical to SEQ ID NO: 1969

SEQ ID NO: 4926 - protein, 732 aa, Escherichia coli
MMRKKYMPRALGPLLLVVLSPAVAQQNDDNEIIVSASRSNRTVAEMAQTTWVIENAELEQQIQGGKELKDALAQLIPGLDVSSQSRTNYGMNMRGRPLVVLIDGVRLNSSRSDSRQLDSVDPFNIDHIEVISGATALYGGGSTGGLINIVTKKGQPETMMEFEAGTKSGFNSSKDHDERIAGAVSGGNDHISGRLSVAYQKFGGWFDGNGDATLLDNTQTGLQHSNRLDIMGTGTLNIDESRQLQLITQYYKSQGDDNYGLNLGKGFSAISGSSTPYVSKGLNSDRIPGTERHLISLQYSDSDFLGQELVGQVYYRDESLRYYPFPTVNANKQATAFSSSQQDTDQYGMKLTLNSQLMDGWQITWGLDAEHERFTSNQMFFDLAQASASGGLNNHKIYTTGRYPSYDITNLAAFLQSSYDINDIFTVSGGVRYQYTENRVDDFIDYTQQQKIAAGKAISADAIPGGSVDYDNFLFNAGLLMHITERQQAWFNFSQGVALPDPGKYYGRGIYGAAVNGHLSLTKSVNVSDSKLEGVKVDSYELGWRFTGDNLRTQIAAYYSLSNKSVERNKDLTISVKDDRRRIYGVEGAVDYLIPDTDWSTGVNFNVLKTESKVNGQWQKYDVKESSPSKATAYINWAPEPWSLRVQSTTSFDVSDAEGNDINGYTTVDFISSWQLPVGTLSFSVENLFDRDYTTVWGQRAPLYYSPGYGPASLYDYKGRGRTFGLNYSVLF

SEQ ID NO: 4927 - protein, 102 aa, Escherichia coli; identical to SEQ ID NO: 1824

SEQ ID NO: 4928 - protein, 246 aa, Escherichia coli; identical to SEQ ID NO: 3021

SEQ ID NO: 4929 - protein, 747 aa, Escherichia coli; identical to SEQ ID NO: 2072

SEQ ID NO: 4930 - protein, 518 aa, Escherichia coli; identical to SEQ ID NO: 2351

SEQ ID NO: 4931 - protein, 784 aa, Escherichia coli; identical to SEQ ID NO: 2244

SEQ ID NO: 4932 - protein, 828 aa, Escherichia coli; identical to SEQ ID NO: 2380

SEQ ID NO: 4933 - protein, 230 aa, Escherichia coli
MNKVVKGALAVVLSLTFCSQSMAAFVLNGTRFIYEEGKKNISFTVTNEADKTYGGQVWIDNTDQGDGIHMIPQPPFFKIGAKQKQIIRIINTDSSLPKDRESLFWLNVQEIPPKPEKNDTEGNMLAIAMNTRVKLIYRPLSIKNERKGAENKLILEQRGNETWLKNPTPYYMALTGVKVDGKDVSLSNKTLADIARFSPFSEVSLGKKISGNVSVNAINDWGGVESFTLR

SEQ ID NO: 4934 - protein, 274 aa, Escherichia coli; identical to SEQ ID NO: 2303

SEQ ID NO: 4935 - protein, 193 aa, Escherichia coli; identical to SEQ ID NO: 2246

SEQ ID NO: 4936 - protein, 362 aa, Escherichia coli; identical to SEQ ID NO: 2434

SEQ ID NO: 4937 - protein, 229 aa, Escherichia coli; identical to SEQ ID NO: 3277

SEQ ID NO: 4938 - protein, 360 aa, Escherichia coli; identical to SEQ ID NO: 3032

SEQ ID NO: 4939 - protein, 241 aa, Escherichia coli
MFPLVKKTVSALFVSTLLASAPAFADIIISGTRIIYNADKKDVNVRLENKGNRPLLIQNWLDTGDDNADPSQIKVPFTATPPVSRVEPKRGQTVKVMYTGATALPKDRESVYWFNVLEVPPKPKDAEADKNLLQLAFRTRIKLFYRPSGLQGEPAEAPAKITWKLNNAQLQANNPTPYYVSFNEVKLESGGKTYNVNSSMVAPFSQASFGVTGLPGSVSSGKVVFKAINDFGGNIDGSATF

SEQ ID NO: 4940 - protein, 446 aa, Escherichia coli; identical to SEQ ID NO: 2180

SEQ ID NO: 4941 - protein, 629 aa, Escherichia coli; identical to SEQ ID NO: 3597

SEQ ID NO: 4942 - protein, 331 aa, Escherichia coli; identical to SEQ ID NO: 2700

SEQ ID NO: 4943 - protein, 402 aa, Escherichia coli; identical to SEQ ID NO: 4768

SEQ ID NO: 4944 - protein, 236 aa, Escherichia coli
MNRLLIFIGLFCVFFHKIAISSETFGPYESRLIFDGDKKNITYRIDNSGKLVWLVQGWVEDVKENKTNIFNVVPSLFRVEPKSQYTARVVKNGDLPEDRESIFWIVSNSLPGGNKGDNEGRVKEDSIDAKLNLAFRYKVPMIYRPASLGNIAQKPEKLQWKKNSNGKVKLFNPTNFAVQLQYVSINGIRKDGQGITYIIAPYTGVELNLKANSGTKIKYGVINDYGAVQEYEGAVE

SEQ ID NO: 4945 - protein, 233 aa, Escherichia coli
MKTCITKGIVTVSLTAILLSCSSAWAAGKGGIGLAATRLVYSEGEEQISLGVRNTSPDVPYLIQSWVMTPDNKKSADFIITPPLFVLNPANENLLRIMYIGAPLAKDRETLFFTSVRAVPSTTKREEGNTLKIATQSVIKLFWRPKGLAYPLGEAPAKLRCTSSADMVTVSNPTPYFITLTDLKIDGKVVKNQMISPFDKYQFSLPKGAKNSSVTYRTINDYGAETPQLNCKS

SEQ ID NO: 4946 - protein, 241 aa, Escherichia coli; identical to SEQ ID NO: 2884

SEQ ID NO: 4947 - protein, 229 aa, Escherichia coli; identical to SEQ ID NO: 3589

SEQ ID NO: 4948 - protein, 746 aa, Escherichia coli; identical to SEQ ID NO: 2949

SEQ ID NO: 4949 - protein, 230 aa, Escherichia coli; identical to SEQ ID NO: 2995

SEQ ID NO: 4950 - protein, 432 aa, Escherichia coli; identical to SEQ ID NO: 2026

SEQ ID NO: 4951 - protein, 191 aa, Escherichia coli; identical to SEQ ID NO: 2727

SEQ ID NO: 4952 - protein, 232 aa, Escherichia coli; identical to SEQ ID NO: 2087

SEQ ID NO: 4953 - protein, 231 aa, Escherichia coli; identical to SEQ ID NO: 2868

SEQ ID NO: 4954 - protein, 232 aa, Escherichia coli; identical to SEQ ID NO: 2087

SEQ ID NO: 4955 - protein, 231 aa, Escherichia coli
MSKRTFAVIITLLCSFCIGQALAGGIVLQRTRVIYDASRKEAALPVANKGAETPYLLQSWVDNIDGTSRAPFIITPPLFRLEAGDDSSLRIIKTADNLPENKESLFYINVRAIPAKKKSDDVNANELTLVFKTRIKMFYRPAHLKGRVSDAWKSLEFKRSDHSLNIYNPTEYYVVFAGLAVDKADLTSKIEYIAPGEHKQLPLPASGGKNVKWAAINDYGGSSGTETRPLQ

SEQ ID NO: 4956 - protein, 224 aa, Escherichia coli
MKGLLSLLIFSLVLPAHAGIVIYGTRIIYPAENKEVMVQLMNQGNRSSLLQAWIDDGDTSLPPEKIQVPFMLTPPVAKIGANSGQQVKIKIMPNKLPTNKESIFYLNVLDIPPNSPEQEGKNALKFAMQNRIKLFYRPAGIAPVNKATFKKLLVNRSGNGLVIKNDSANWVTISDVKANNVKVNYETIMIAPLESQSVNVKSNNANNWHLTIIDDHGNYISDKI

SEQ ID NO: 4957 - protein, 250 aa, Escherichia coli; identical to SEQ ID NO: 3048

SEQ ID NO: 4958 - protein, 713 aa, Escherichia coli; identical to SEQ ID NO: 3523

SEQ ID NO: 4959 - protein, 208 aa, Escherichia coli; identical to SEQ ID NO: 1949

SEQ ID NO: 4960 - protein, 249 aa, Escherichia coli
MTNLFSAKTVATTLALLITATSLQAQASVTPDRTRLIFNESDKSISVTLRNNDPKMPYLAQSWMEDEQGNKISSPLTVLPPVQRIDSMMNGQVKVQGMPDINKLPADRESVFYFNVREIPPKSNKPNTLQIALQTRIKLFWRPKALENVSMKNPWQHKVTLTRSGQEFTVNNPTPYYVVISNASAQKNGNPAAGFSPMVISPKTSVPLNVKMDSVPVLTYVNDYGARMPLYFKCGGDTCQVDAEQSRKG

SEQ ID NO: 4961 - protein, 518 aa, Escherichia coli; identical to SEQ ID NO: 2349

SEQ ID NO: 4962 - protein, 203 aa, Escherichia coli; identical to SEQ ID NO: 2201

SEQ ID NO: 4963 - protein, 224 aa, Escherichia coli; identical to SEQ ID NO: 3578

SEQ ID NO: 4964 - protein, 89 aa, Escherichia coli; identical to SEQ ID NO: 2812

SEQ ID NO: 4965 - protein, 478 aa, Escherichia coli; identical to SEQ ID NO: 2404

SEQ ID NO: 4966 - protein, 539 aa, Escherichia coli; identical to SEQ ID NO: 3050

SEQ ID NO: 4967 - protein, 209 aa, Escherichia coli; identical to SEQ ID NO: 3547

SEQ ID NO: 4968 - protein, 162 aa, Escherichia coli; identical to SEQ ID NO: 1965

SEQ ID NO: 4969 - protein, 746 aa, Escherichia coli; identical to SEQ ID NO: 3031

SEQ ID NO: 4970 - protein, 351 aa, Escherichia coli; identical to SEQ ID NO: 3010

SEQ ID NO: 4971 - protein, 241 aa, Escherichia coli; identical to SEQ ID NO: 3582

SEQ ID NO: 4972 - protein, 627 aa, Escherichia coli
MVVTASSVEQNLKDAPASISVITQEDLQRKPVQNLKDVLKEVPGVQLTNEGDNRKGVSIRGLDSSYTLILVDGKRVNSRNAVFRHNDFDLNWIPVDSIERIEVVRGPMSSLYGSDALGGVVNIITKKIGQKWSGTVTVDTTIQEHRDRGDTYNGQFFTSGPLIDGVLGMKAYGSLAKREKDDPQNSTTTDTGETPRIEGFSSRDGNVEFAWTPNQNHDFTAGYGFDRQDRDSDSLDKNRLERQNYSVSHNGRWDYGTSELKYYGEKVENKNPGNSSPITSESNTVDGKYTLPLTAINQFLTVGGEWRHDKLSDAVNLTGGTSSKTSASQYALFVEDEWRIFEPLALTTGVRMDDHETYGEHWSPRAYLVYNATDTVTVKGGWATAFKAPSLLQLSPDWTSNSCRGACKIVGSPDLKPETSESWELGLYYMGEEGWLEGVESSVTVFRNDVKDRISISRTSDVNAAPGYQNFVGFTANGVPVFSYYNVNKARIQGVETELKIPFNDEWKLSLNYTYNDGRDVSNGENKPLSDLPFHTANGTLDWKPLAREDWSFYVSGHYTGQKRADSATAKTPGGYTIWNTGAAWQVTKDVKLRAGVLNLGDKDLSRDDYSYNEDGRRYFMAVDYRF

SEQ ID NO: 4973 - protein, 386 aa, Escherichia coli; identical to SEQ ID NO: 3600

SEQ ID NO: 4974 - protein, 89 aa, Escherichia coli; identical to SEQ ID NO: 2810

SEQ ID NO: 4975 - protein, 213 aa, Escherichia coli; identical to SEQ ID NO: 2232

SEQ ID NO: 4976 - protein, 430 aa, Escherichia coli; identical to SEQ ID NO: 2617

SEQ ID NO: 4977 - protein, 209 aa, Escherichia coli
MLYKPNSSGETLAVINEHNYPILVQANVLSEDQKNIAPFIITPPLFRLDALQSSRLRIVKTEGAFPIDRESLQWICVKAIPPKYEDKWAKEEVSGKKSDEATMNIQVSVSSCIKLFVRPADVKGQPDDVAGKIKWQKVGNKLKGVNPTPFYMDIAELRVGEKEITETHYIAPFSSYEYPMPVNGGGDVRWKVVTDYGGISKTFETGLNI

SEQ ID NO: 4978 - protein, 230 aa, Escherichia coli; identical to SEQ ID NO: 3019

SEQ ID NO: 4979 - protein, 700 aa, Escherichia coli; identical to SEQ ID NO: 3047

SEQ ID NO: 4980 - protein, 650 aa, Escherichia coli; identical to SEQ ID NO: 3057

SEQ ID NO: 4981 - protein, 998 aa, Escherichia coli; identical to SEQ ID NO: 2918

SEQ ID NO: 4982 - protein, 678 aa, Escherichia coli; identical to SEQ ID NO: 2902

SEQ ID NO: 4983 - protein, 686 aa, Escherichia coli; identical to SEQ ID NO: 3015

SEQ ID NO: 4984 - protein, 231 aa, Escherichia coli; identical to SEQ ID NO: 3055

SEQ ID NO: 4985 - protein, 236 aa, Escherichia coli; identical to SEQ ID NO: 3286

SEQ ID NO: 4986 - protein, 446 aa, Escherichia coli; identical to SEQ ID NO: 2179

SEQ ID NO: 4987 - protein, 478 aa, Escherichia coli; identical to SEQ ID NO: 2404

SEQ ID NO: 4988 - protein, 227 aa, Escherichia coli; identical to SEQ ID NO: 4009

SEQ ID NO: 4989 - protein, 228 aa, Escherichia coli
MKSKFVALALSLFLSQSVLAGGVGLSSTRVIYDGSKKEASLTVQNKSKTEEFLIQSWVDDAAGSKKTPFIITPPLFKLDPEKNNILRIVNITPGLPQDRESVYWVNVKAIPSKSDDSENKNVLQIAVRTRIKLFYRPAGLKGDVKTAPNELRFTRNGNQLRVDNPTVFNITFNQFFANDKEIEKAGMVPAKGALNITLPAGVGSVSKIKYNAINDFGSSAEMITKNVD

SEQ ID NO: 4990 - protein, 331 aa, Escherichia coli; identical to SEQ ID NO: 2705

SEQ ID NO: 4991 - protein, 828 aa, Escherichia coli; identical to SEQ ID NO: 2381

SEQ ID NO: 4992 - protein, 224 aa, Escherichia coli; identical to SEQ ID NO: 3035

SEQ ID NO: 4993 - protein, 359 aa, Escherichia coli; identical to SEQ ID NO: 2332

SEQ ID NO: 4994 - protein, 191 aa, Escherichia coli; identical to SEQ ID NO: 2727

SEQ ID NO: 4995 - protein, 203 aa, Escherichia coli; identical to SEQ ID NO: 2201

SEQ ID NO: 4996 - protein, 359 aa, Escherichia coli; identical to SEQ ID NO: 2328

SEQ ID NO: 4997 - protein, 233 aa, Escherichia coli
MNIFAYLLVLVFSMSMSSSAFASVVMTGTRIIFPGDAKEKTIQLRNTSDQPYIINIHVEDERGSDKNVPFMPTPQTFRMEAAAGQALRLLYTGNNLPQDRESVFWFSFSQLPYLNKNDKSQNQLILALTNRVKIFYRPSSIVGKSSDAPKNLTYQVKQNRIEVTNPTGYYVTIRAAELLNNGKKIPLANSVMIAPQSTTEWTLRSGISVARGALIHLVTVNDYGVNVTSEHAL

SEQ ID NO: 4998 - protein, 367 aa, Escherichia coli; identical to SEQ ID NO: 3016

SEQ ID NO: 4999 - protein, 224 aa, Escherichia coli; identical to SEQ ID NO: 3604

SEQ ID NO: 5000 - protein, 119 aa, Escherichia coli
MNLSLSKGGRPASVKNRAWHYCQMAWRGVCNQKALSRLAAFSPLLLLGMGQMAHATDLLAGGKDDVKATFGADSFVIMCIYIAEIVIGVATYIRTKNLLILLGLVVVIVFTTVGLTFVS

SEQ ID NO: 5001 - protein, 663 aa, Escherichia coli; identical to SEQ ID NO: 1910

SEQ ID NO: 5002 - protein, 249 aa, Escherichia coli; identical to SEQ ID NO: 3028

SEQ ID NO: 5003 - protein, 774 aa, Escherichia coli; identical to SEQ ID NO: 3018

SEQ ID NO: 5004 - protein, 170 aa, Escherichia coli
MIFAVLSLLVAGELQAGVVVGGTRFIFPADRESISILLTNTSQESWLINRKINRPTRWAGGEASTVPAPLLAAPPLILLKPGTTGTLRLLRTESDILPVDRETLFELSIASVPSGKVENQSVKVAMRSVFKLFWRPEGCRATRWKLINNYAGHGSRRVYNSLTQRLITLT

SEQ ID NO: 5005 - protein, 118 aa, Escherichia coli [sequence omitted]

SEQ ID NO: 5006 - protein, 673 aa, Escherichia coli; identical to SEQ ID NO: 3295

SEQ ID NO: 5007 - protein, 228 aa, Escherichia coli; identical to SEQ ID NO: 3034

SEQ ID NO: 5008 - protein, 228 aa, Escherichia coli
MPMYLLRLFFAVTLITQMSMAMAGIVVGGTRVIFYGDKPDTTISIFNKETNLPYLLQTWVDPFNKEDKSKPPFSVIPPVSRIEPQQEKILRILKTAGELPKDRESVFWLNVKNIPPSIDKKNTNVLEIAIKTRIKLFWRPAAVKIIPEQAIKNVKWSRQGNNLIVENPNPIHINVMSVTVDDKDVSLNMIRPFEILTLPIPAGVAGKSLVWRFINDYGAISQPLKKNL

SEQ ID NO: 5009 - protein, 229 aa, Escherichia coli
MALLIFAVLSLLVAGELQAGVVVGGTRFIFPADRESISILLTNTSQESWLINSKINRPTRWAGGEASTVPAPLLAAPPLILLKPGTTGTLRLLRTESDILPVDRETLFELSIASVPSGKVENQSVKVAMRSVFKLFWRPEGLPGDPLEAYQQLRSTRNSQGVQLTNPTPYYINLIQVSVNGKALSNVGVVPPKSQRQTSWCQAIAPCHVAWRAINDYGGLSAKKEQNLP

SEQ ID NO: 5010 - protein, 122 aa, Escherichia coli; identical to SEQ ID NO: 2915

SEQ ID NO: 5011 - protein, 565 aa, Escherichia coli; identical to SEQ ID NO: 2669

SEQ ID NO: 5012 - protein, 715 aa, Escherichia coli
MLYNIPCRIYILSTLSLCISGIVSTATATSSETKISNEETLVVTTNRSASNLWESPATIQVIDQQTLQNSTNASIADNLQDIPGVEITDNSLAGRKQIRIRGEASSRVLILIDGQEVTYQRAGDNYGVGLLIDESALERVEVVKGPYSVLYGSQAIGGIVNFITKKGGDKLASGVVKAVYNSATAGWEESIAVQGSIGGFDYRINGSYSDQGNRDTPDGRLPNTNYRNNSQGVWLGYNSGNHRFGLSLDRYRLATQTYYEDPDGSYEAFSVKIPKLEREKVGVFYDTDVDGDYLKKIHFDAYEQTIQRQFANEVKTTQPVPSPMIQALTVHNKTDTHDKQYTQAVTLQSHFSLPANNELVTGAQYKQDRVSQRSGGMTSSKSLTGFINKETRTRSYYESEQSTVSLFAQNDWQFADHWTWTIGVRQYWLSSKLTRGDGVSYTAGIISDTSLARESASDHEMVTSTSLRYSGFDNLELRAAFAQGYVFPTLSQLFMQTSAGGSVTYGNPDLKAEHSNNFELGARYNGNQWLIDSAVYYSEAKDYIASLICDGSIVCNGNTNSSRSSYYYYDNIDRAKTWGLEISAEYNGWVFSPYISGNLIRRQYETSTLKTTNTGEPAINGRIGLKHTLVMGQANIISDVFIRAASSAKDDSNGTETNVPGWATLNFAVNTEFGNEDQYRINLALNNLTDKRYRTAHETIPAAGFNAAIGFVWNF

SEQ ID NO: 5013 - protein, 203 aa, Escherichia coli; identical to SEQ ID NO: 2201

SEQ ID NO: 5014 - protein, 230 aa, Escherichia coli
MMTKIKLLMLIILYLIISASAHAAGGIALGATRIIYPADAKQTAVWIRNSHTNERFLVNSWIENSSGVKEKSFIITPPLFVSEPKSENTLRIIYTGPPLAADRESLFWMNVKTIPSVDKNALNGRNVLQLAILSRMKLFLRPVQLQELPAEAPDTLKFSRSGNYINVHNPSPFYVTLVNLQVGSQKLGNAMAAPRVNSQIPLPSGVQGKLKFQTVNDYGSVTPVREVNLN

SEQ ID NO: 5015 - protein, 227 aa, Escherichia coli; identical to SEQ ID NO: 3570

SEQ ID NO: 5016 - protein, 111 aa, Escherichia coli; identical to SEQ ID NO: 2911

SEQ ID NO: 5017 - protein, 696 aa, Escherichia coli; identical to SEQ ID NO: 3314

SEQ ID NO: 5018 - protein, 760 aa, Escherichia coli; identical to SEQ ID NO: 3026

SEQ ID NO: 5019 - protein, 200 aa, Escherichia coli; identical to SEQ ID NO: 1784

SEQ ID NO: 5020 - protein, 678 aa, Escherichia coli; identical to SEQ ID NO: 3014

SEQ ID NO: 5021 - protein, 233 aa, Escherichia coli; identical to SEQ ID NO: 3276

SEQ ID NO: 5022 - protein, 1443 aa, Escherichia coli
MSRFSHDDYTRAMLNLLPSGIAWSRLPDSVQHRLIRGLAQAYRQSDADACALITGAFPETADALTDEWYASLGLNDECGTQASTTDPAQARKFILAKLLSTGGQSVAYFTELAATMGYSITIREYRTPLCGFSWSGHLLSDDNRFNWTVVVAPPGDEVTTSRAYLECLFRRYAPAHTLVTFEWQSSYSAALSIAWDNITHVLSGALTADEGVVVSGGTVNVVIKSASGQRYVATVTTDSEGHWSYEMEDDDFANGWYSAYAEAAVDMPDDVTVPVRSEVINLRKIVSVRGVNLSVTELELDNDEHVAVAVNVWPENAEDRSWTVTVSDESVVSVVVNSDSSLTVCGVSEGDAVVTVTTNDGGHTATLQVSCYVPAVFDSVCASSSKALVSVADVVNCRVSFGDGYVAADQLETTTSGGWANILLPDSLADGELRTIRVRTAGSVRFRVYGYSSTAYNDLVRLRQLPAGQKSCSYLASNTPSLVSIDSGAFRFCKNATAFDSAFYRCKGLTAIPPGLFAECASATTFYQAFYECTGLTAVGDSAFAGCTGVTTFRQAFYGCTGLRAVGESVFAGCTGATTFEDTFYGCTGLSAVGDHVFAGCTSATTFYRVFYNCRELSTVGNSVFAGCASATTFLQAFYGCQALTSLGQGIFADCTGVTTFLQAFYNCRGLTALPEGMFDSCTAVTTFSNAFYGCTALTAIPEGLFDSCTGVTTFNRTFYGCAALTAIPAKLFANCTEVATFEGGFSGCSGLVTIPAGLFEKLTSVTTFDSAFYGCRALTTVGDRVFAGCTGTTTFASLFEGCTGLVTIPADVFAGCSGVRSFYRSFLGCTGLAMVPPELFADCTGATTFYTTFYRCTRLSEVPAELFSGCTGAKSFYKTFGECTGLSEVPARLFADCTGATTFEGVFSGCRGLTTIPAGLFADSASVTTFFEAFYECTGLTAIPSGLFADCVSVTTFRRTFYGCSGLRTLGDNVFAGCVSATTFEDTFYGCAGLTTVGDGVFAGCTSVTTFYRAFYGCTGLTSIGEGVFAGCTAVTTFSSAFYNCRGLTALPEGMFDSCTAVTTFSSAFYGCTALTAIPAGLFDNCVSVTTFSYAFGDCVRLKALPAGLFENCSRVTTFFRTFYGCTELVTVGERAFAGCSSASTFEGTFYDCTKLTTLGDSVFDGCTGVTSFYQTFSGCTKLTAIPAGLFDSSHGVTTFYRTFYRCAALTTVPEAVFDRCVSAGSFQDTFFGCTGLTMLPAGLFDNCNRVTSFYRTFRGCTGLKTLPEGLFDNNTAVTTFSQTFYGCTGLAVLPAGLFENCTGVTSFYQTFDGCTGLMTIPDGLFAGLASVTTFRETFNGCTGLTTVGDGLFAGCVSATTFEGTFYGCTGLESDVNDILPAEEYPQITSVYRCFYNCRSLQGSGCALIEKLPGVTSYADAFYNCVSLSDFSILSERYPVWV

SEQ ID NO: 5023 - protein, 236 aa, Escherichia coli; identical to SEQ ID NO: 3970

SEQ ID NO: 5024 - protein, 243 aa, Escherichia coli; identical to SEQ ID NO: 3561

SEQ ID NO: 5025 - protein, 252 aa, Escherichia coli; identical to SEQ ID NO: 3543

SEQ ID NO: 5026 - protein, 614 aa, Escherichia coli; identical to SEQ ID NO: 3301

SEQ ID NO: 5027 - protein, 539 aa, Escherichia coli; identical to SEQ ID NO: 3050

SEQ ID NO: 5028 - protein, 747 aa, Escherichia coli; identical to SEQ ID NO: 2954

SEQ ID NO: 5029 - protein, 266 aa, Escherichia coli; identical to SEQ ID NO: 1894

SEQ ID NO: 5030 - protein, 794 aa, Escherichia coli; identical to SEQ ID NO: 4850

SEQ ID NO: 5031 - protein, 883 aa, Escherichia coli; identical to SEQ ID NO: 4713

SEQ ID NO: 5032 - protein, 207 aa, Escherichia coli; identical to SEQ ID NO: 2211

SEQ ID NO: 5033 - protein, 866 aa, Escherichia coli; identical to SEQ ID NO: 4866

SEQ ID NO: 5034 - protein, 826 aa, Escherichia coli; identical to SEQ ID NO: 3256

SEQ ID NO: 5035 - protein, 838 aa, Escherichia coli; identical to SEQ ID NO: 3041

SEQ ID NO: 5036 - protein, 866 aa, Escherichia coli; identical to SEQ ID NO: 3025

SEQ ID NO: 5037 - protein, 837 aa, Escherichia coli; identical to SEQ ID NO: 4687

SEQ ID NO: 5038 - protein, 880 aa, Escherichia coli; identical to SEQ ID NO: 3008

SEQ ID NO: 5039 - protein, 843 aa, Escherichia coli; identical to SEQ ID NO: 3042

SEQ ID NO: 5040 - protein, 237 aa, Escherichia coli; identical to SEQ ID NO: 3022

SEQ ID NO: 5041 - protein, 161 aa, Escherichia coli; identical to SEQ ID NO: 2582

SEQ ID NO: 5042 - protein, 869 aa, Escherichia coli; identical to SEQ ID NO: 3012

SEQ ID NO: 5043 - protein, 729 aa, Escherichia coli; identical to SEQ ID NO: 3052

SEQ ID NO: 5044 - protein, 696 aa, Escherichia coli; identical to SEQ ID NO: 3314

SEQ ID NO: 5045 - protein, 678 aa, Escherichia coli; identical to SEQ ID NO: 3014

SEQ ID NO: 5046 - protein, 774 aa, Escherichia coli; identical to SEQ ID NO: 3018

SEQ ID NO: 5047 - protein, 446 aa, Escherichia coli; identical to SEQ ID NO: 2179

SEQ ID NO: 5048 - protein, 663 aa, Escherichia coli; identical to SEQ ID NO: 1910

SEQ ID NO: 5049 - protein, 828 aa, Escherichia coli; identical to SEQ ID NO: 2380

SEQ ID NO: 5050 - protein, 162 aa, Escherichia coli; identical to SEQ ID NO: 1965

SEQ ID NO: 5051 - protein, 230 aa, Escherichia coli; identical to SEQ ID NO: 3019

SEQ ID NO: 5052 - protein, 360 aa, Escherichia coli; identical to SEQ ID NO: 3032

SEQ ID NO: 5053 - protein, 430 aa, Escherichia coli; identical to SEQ ID NO: 2617

SEQ ID NO: 5054 - protein, 89 aa, Escherichia coli; identical to SEQ ID NO: 2810

SEQ ID NO: 5055 - protein, 331 aa, Escherichia coli; identical to SEQ ID NO: 2700

SEQ ID NO: 5056 - protein, 760 aa, Escherichia coli; identical to SEQ ID NO: 3026

SEQ ID NO: 5057 - protein, 686 aa, Escherichia coli; identical to SEQ ID NO: 3015

SEQ ID NO: 5058 - protein, 118 aa, Escherichia coli [sequence omitted]

SEQ ID NO: 5059 - protein, 614 aa, Escherichia coli; identical to SEQ ID NO: 3301

SEQ ID NO: 5060 - protein, 208 aa, Escherichia coli; identical to SEQ ID NO: 1949

SEQ ID NO: 5061 - protein, 402 aa, Escherichia coli; identical to SEQ ID NO: 4768

SEQ ID NO: 5062 - protein, 432 aa, Escherichia coli; identical to SEQ ID NO: 2026

SEQ ID NO: 5063 - protein, 673 aa, Escherichia coli; identical to SEQ ID NO: 3295

SEQ ID NO: 5064 - protein, 236 aa, Escherichia coli; identical to SEQ ID NO: 3286

SEQ ID NO: 5065 - protein, 228 aa, Escherichia coli; identical to SEQ ID NO: 3034

SEQ ID NO: 5066 - protein, 362 aa, Escherichia coli; identical to SEQ ID NO: 2434

SEQ ID NO: 5067 - protein, 203 aa, Escherichia coli; identical to SEQ ID NO: 2201

SEQ ID NO: 5068 - protein, 250 aa, Escherichia coli; identical to SEQ ID NO: 3048

SEQ ID NO: 5069 - protein, 747 aa, Escherichia coli; identical to SEQ ID NO: 2072

SEQ ID NO: 5070 - protein, 367 aa, Escherichia coli; identical to SEQ ID NO: 3016

SEQ ID NO: 5071 - protein, 229 aa, Escherichia coli; identical to SEQ ID NO: 3277

SEQ ID NO: 5072 - protein, 191 aa, Escherichia coli; identical to SEQ ID NO: 2727

SEQ ID NO: 5073 - protein, 700 aa, Escherichia coli; identical to SEQ ID NO: 3047

SEQ ID NO: 5074 - protein, 784 aa, Escherichia coli; identical to SEQ ID NO: 2244

SEQ ID NO: 5075 - protein, 233 aa, Escherichia coli; identical to SEQ ID NO: 3276

SEQ ID NO: 5076 - protein, 732 aa, Escherichia coli; identical to SEQ ID NO: 4926

SEQ ID NO: 5077 - protein, 359 aa, Escherichia coli; identical to SEQ ID NO: 2328

SEQ ID NO: 5078 - protein, 246 aa, Escherichia coli; identical to SEQ ID NO: 3021

SEQ ID NO: 5079 - protein, 231 aa, Escherichia coli; identical to SEQ ID NO: 3055

SEQ ID NO: 5080 - protein, 224 aa, Escherichia coli; identical to SEQ ID NO: 3035

SEQ ID NO: 5081 - protein, 200 aa, Escherichia coli; identical to SEQ ID NO: 1784

SEQ ID NO: 5082 - protein, 203 aa, Escherichia coli; identical to SEQ ID NO: 2009

SEQ ID NO: 5083 - protein, 198 aa, Escherichia coli
MAVINEHNYPILVQANVLSEDQKNIAPFIITPPLFRLDALQSSRLRIVKTEGAFPIDRESLQWICVKAIPPKYEDKWAKEEVSGKKSDEATMNIQVSVSSCIKLFVRPADVKGQPDDVAGKIKWQKVGNKLKGVNPTPFYMDIAELRVGEKEITETHYIAPFSSYEYPMPVNGGGDVRWKVVTDYGGISKTFETGLNI

SEQ ID NO: 5084 - protein, 565 aa, Escherichia coli; identical to SEQ ID NO: 2669

SEQ ID NO: 5085 - protein, 746 aa, Escherichia coli; identical to SEQ ID NO: 3031

SEQ ID NO: 5086 - protein, 518 aa, Escherichia coli; identical to SEQ ID NO: 2349

SEQ ID NO: 5087 - protein, 193 aa, Escherichia coli; identical to SEQ ID NO: 2246

SEQ ID NO: 5088 - protein, 351 aa, Escherichia coli; identical to SEQ ID NO: 3010

SEQ ID NO: 5089 - protein, 243 aa, Escherichia coli; identical to SEQ ID NO: 2910

SEQ ID NO: 5090 - protein, 213 aa, Escherichia coli; identical to SEQ ID NO: 2232

SEQ ID NO: 5091 - protein, 274 aa, Escherichia coli; identical to SEQ ID NO: 2303

SEQ ID NO: 5092 - protein, 539 aa, Escherichia coli; identical to SEQ ID NO: 3050

SEQ ID NO: 5093 - protein, 232 aa, Escherichia coli; identical to SEQ ID NO: 2087

SEQ ID NO: 5094 - protein, 102 aa, Escherichia coli; identical to SEQ ID NO: 1824

SEQ ID NO: 5095 - protein, 249 aa, Escherichia coli; identical to SEQ ID NO: 3028

SEQ ID NO: 5096 - protein, 478 aa, Escherichia coli; identical to SEQ ID NO: 2404

SEQ ID NO: 5097 - protein, 111 aa, Escherichia coli
MKKQIEGMTMKKVLALVVAAAMGLSSAAFAAETATTPAPTATTTKAAPAKTTHHKKQHKAAPAQKAQAAKKHHKNAKAEQKAPEQKAQAAKKHARKHSHQQPAKPAAQPAA

SEQ ID NO: 5098 - protein, 826 aa, Escherichia coli
MLRMTPLASAIVALLIGIEAYAAEETFDTHFMIGGMKDQQVANIRLDDNQPLPGQYDIDIYVNKQWRGKYEIIVKDNPQETCLSREMIKRLGINTDNFASGKQCLTFKQLIQGGSYTWDIGVFRLDFSVPQAWVEELESGYVPPENWERGINAFYTSYYMSQYYSDYKASGNSKSTYVRFNSGLNLLGWQLHSDASFSKTNNNPGVWKSNTLYLERGFAQLLGMLRVGDMYTSSDIFDSVRFSGVRLFRDMQMLPNSKQNFTPRVQGIAQSNALVTIEQNGFVVYQKEVPPGPFAITDLQLAGGGADLDVSVKEADGSVTTYLVPYAAVPNMLQPGVSKYDFAAGRSHIEGASKQSDFVQAGYQYGFNNLLTLYGGSMVANNYYAFTLGTGWNTRIGAISVDATKSHSKQDNGDVFDGQSYQIAYNKFVSQTSTRFGLAAWCYSSRDYRTFNDHVWANNKDNYRRDENDIYDIADYYQNDFGRKNSFSANMSQSLPEGWGSVSLSTLWRDYWGRSGSSKGYQLSYSNNLRRISYTLAASHAYDENHHEEKRFNIFISIPFDWGDDVTTPRRQIYMSNSTTFDDQGVASNNTGLSGTVGSRDQFNYGVNLSYQHQGNETTAGANLTWNAPVATVNGSYSQSSTYRQAGASVSGGIVAWSGGVNLANRLSETFAVMNAPGIKDAYVNGQKYRTTNRNGVVVYDGMTPYRENHLMLDVSQSDSEAELRGNRKIAAPYRGAVLLVNFDTDQRKPCFIKALRADGQPLTFGYEVNDLHGHNIGVVGQGSQLFIRTNEVPPSVNVAIDKQQGLSCTITFGKEIDESRNYICQ

SEQ ID NO: 5099 - protein, 200 aa, Escherichia coli; identical to SEQ ID NO: 1785

SEQ ID NO: 5100 - protein, 274 aa, Escherichia coli; identical to SEQ ID NO: 2301

SEQ ID NO: 5101 - protein, 193 aa, Escherichia coli; identical to SEQ ID NO: 2246

SEQ ID NO: 5102 - protein, 368 aa, Escherichia coli
MNKTITALTIIMASFAANASVLPETPVPFKSGTGAIDNDTVYIGLGSAGTAWYKLDTQAKDKRWTALAAFPGGPRDQATSAFIDGNLYVFGGIGKNSEGLTQVFNDVHKYNPKTNSWVKLMSHAPMGMAGHVTFVHNGKAYVTGGVNQNIFNGYFEDLNEAGKDSTTIDKINAHYFDKKAEDYFFNKFLLSFDPSTQQWSYAGESPWYGTAGAAVVNKGDKTWLINGEAKPGLRTDAVFELDFTGNNLKWNKLAPVASPDGVAGGFAGMSNDSLIFAGGAGFKGSRENYQNGKNYAHEGLKKSYSADIHLWHNGKWDKSGELSQGRAYGVSLPWNNSLLIIGGETAGGKAVTDSVLISVKDNKVTVQN

SEQ ID NO: 5103 - protein, 241 aa, Escherichia coli; identical to SEQ ID NO: 2890

SEQ ID NO: 5104 - protein, 760 aa, Escherichia coli
MENNRNFPAGQFHSLTFFAGLCIGITPVAQALAAEGQANADDTLVVEASTPSLYAPQKSADPKFSRPVADTTRTMTVISEQVIKDQGATNLTDALKNVPGVGAFFAGENGNSTTGDAIYMRGADTSNSIYIDGIRDIGSVSRDTFNTEQVEVIKGPSGTDYGRSAPTGSINMISKQPRNDSGIDASASIGSAWFRRGTLDVNQVIGDTTAVRLNVMGEKTHDAGRNKVKNERYGVAPSVAFGLGTANRLYLNYLHVTQHNTPDGGIPTIGLPGYSAPSAGTAALNHSGKVDTHNFYGTDSDYDDSTTDTATMRFEHDINDNTTIRNTTRWSRVKQDYLMTAIMGGASNITQPTSDVNSWTWSRTANTKDVSNKILTNQTNLTSTFYTGAIGHDVSTGVEFTRETQTNYGVNPVTLPAVNIYHPDSSIHPGGLTRNGANANGQTDTFAIYAFDTLQITRDFELNGGIRLDNYHTEYDSATACGGSGRGAITCPAGVAKGSPVTTVDTAKSGNLVNWKAGALYHLTENGNVYINYAVSQQPPGGNNFALAQSGSGNSANRTDFKPQKANTSEIGTKWQVLDKRLLLTAALFRTDIENEVEQNDDGTYSQYGKKRVEGYEISVAGNITPAWQMIGGYTQQKATIKNGKDVAQDGSSSLPYTPEHAFTLWSQYQATDDISVGAGARYIGSMHKGSDGAVGTPAFTEGYWVADAKLGYRVNRNLDFQLNVYNLFDTDYVASINKSGYRYHPGEPRTFLLTANMHF

SEQ ID NO: 5105 - protein, 191 aa, Escherichia coli; identical to SEQ ID NO: 2727

SEQ ID NO: 5106 - protein, 232 aa, Escherichia coli; identical to SEQ ID NO: 2087

SEQ ID NO: 5107 - protein, 203 aa, Escherichia coli; identical to SEQ ID NO: 2007

SEQ ID NO: 5108 - protein, 656 aa, Escherichia coli
MRLKKRYLCTALSLAFTQQAVAAQESDTLTVWSSPVSSTTTTVLDQPTMKALDKQNVAQALSVVPGVVLQKSGSRNEEQVKVRGFDSRQVPVYFDGVPIYVPYDGNLDLARILTNNLGAVEVSKGYSSLLQGPNQMGGAINITTQKPTKPLEASLGYRQGWSRSQDNAYDMHASFAVSSDLGYLQVSGSQLKQDFLGLPHGVNNDIAGKHGKMINSSADDKRGIVKLGFTPRENDEYTLTYIKQDGEKDNPPYSRNSGQKSRYWQWPEYDKESFYYQGTTQLNDRFTLKSRLYRDTFENTLMMYNSLADLKNKKGSYSHYSDYSDGAGLQLAADVRENDLLSFAVNWKDDVHREKGAPHAAYDRYEDRTWSLASEYQWAAADNVDVVAGISYDWRDSVEAKKHEKDGSITHYDDNNQSAFNWQVMGKYHFANEDTLALSYYDRTRFPTLKERYTTSKPAYNQIAIVNPQLKPERARGVDLTWNGAFTHDWGFEVSVYYNRVSDAILSHNIDADTIQNQNSGTVDYSGLDAGIKGKISNILDVGLSYALIHADAKRKDIGKINDLPTQTMTAWMTLKPWEPLSVTLSEEARSSSYSNSDGSQKAAGFAVTHIRADYTLGHGFSVNASVNNLFDTKYAYSEGFIEEGRNFWAGIEYTF

SEQ ID NO: 5109 - protein, 539 aa, Escherichia coli
MAAVCGTSGIASLFSQAAFAADSDIADGQTQRFDLSILQSMAHDLAQTAWRGAPRPLPDTLATMTPQAYNSIQYDAEKSLWHNVENRQLDAQFFHMGMGFRRRVRMFSVDPATHLAREIHFRPELFKYNDAGVDTKQLEGQSDLGFAGFRVFKAPELARRDVVSFLGASYFRAVDDTYQYGLSARGLAIDTYTDSKEEFPDFTAFWFDTVKPGATTFTVYALLDSASITGAYKFTIHCEKNQVIMDVENHLYARKDIKQLGIAPMTSMFSCGTNERRMCDTIHPQIHDSDRLSMWRGNGEWICRPLNNPQKLQFNAYTDNNPKGFGLLQLDRDFSHYQDIMGWYNKRPSLWVEPRNKWGKGTIGLMEIPTTGETLDNIVCFWQPEKAVKAGDEFAFQYRLYWSAQPPVHCPLARVMATRTGMGGFPEGWAPGEHYPEKWARRFAVDFVGGDLKAAAPKGIEPVITLSSGEAKQIEILYIEPIDGYRIQFDWYPTSDSTDPVDMRMYLRCQGDAISETWLYQYFPPAPDKRQYVDDRVMS

SEQ ID NO: 5110 - protein, 700 aa, Escherichia coli
MKIFSVRQTVLPALLVLSPVVFAADEQTMIVSAAPQVVSELDTPAAVSVVDGEEMRLATPRINLSESLTGVPGLQVQNRQNYAQDLQLSIRGFGSRSTYGIRGIRLYVDGIPATMPDGQGQTSNIDLSSVQNVEVLRGPFSALYGNASGGVMNVTTQTGQQPPTIEASSYYGSFGSWRYGLKATGATGDGTQPGDFDYTVSTTRFTTHGYRDHSGAQKNLANAKLGVRIDDASKLSLIFNSVDIKADDPGGLTEAEWKANPQQAPRAEQYDTRKTIKQTQAGLRYERSLSAQDDMSVMMYAGERETTQYQSIPMAPQLNPSHAGGVITLQRHYQGIDSRWTHRGELGVPVTLSTGLNYENMSENRKGYNNFRLNRGVPEYGQKGELRRDERNLMWNVDPYLQTQWQLTDKLSLDAGVRYSSVWFDSNDHYVTPGNGDDSGDASYHKWLPAGSLKYAMTDAWNVYLAAGRGFETPTINELSYRADGQSGMNFGLKPSTNDTIEIGSKTRIGDGLLSLALFQTDTDDEIVVDSSSGGRTIYKNAGKTRRQGAELAWDQRFAGDFRVKASWTWLDATYRSNVCNEQDCNGNRMPGIARNMAFASIGYIPEDGWYAGTEARYMGDIMADDENTAKAPSYTLVGLFTGYKYNYHNLTVDLFGRVDNLFDKEYVGSVIVNESNGRYYEPAPGRNYGVGINIAWRFE

SEQ ID NO: 5111 - protein, 170 aa, Escherichia coli; identical to SEQ ID NO: 2564

SEQ ID NO: 5112 - protein, 359 aa, Escherichia coli; identical to SEQ ID NO: 2329

SEQ ID NO: 5113 - protein, 859 aa, Escherichia coli
MSWMVVSRTYTSFFPFSLSVLALTVAGSFSATAGKFNPRFLEDTAGINQHVDLSMYETDHGAQLPGTYRVSLIVNEQKMETRTLEFKAATESQRKEMGEFLIPCLSRTQLADMGVRVDSFSALNLIPAEACVAFNEIIPQATSHFDFSEQKLVMSFPQAAMQQVARGTVPESRWDDGVPALLLDYSFSGSNSSHDTKSYNRYIDENGNHHQDKNETSQTNDSYYLSMRSGLNLGAWRLRNYSNWSYSNGEKQWDNIGTYVTRAIVPLKAQLTLGDTATPSDIFDSVQMRGALLASDEEMLPDSQRGFAPVVRGIAKSNAEVSIEQNGYVIYRAFVQPGAFEINDLYPTANSGDLTVIVKEADGSEQRFIQPFSSVAVFQREGHLKYSLSAGEYRAGNYDSANPRFGQFNAMYGLPFGMTTYGGALISKDYNAFALGLGKNFGSIGAISVDITQAKSTLNNNATDQGQSYRFLYSKSFASGTDFRLLGYKYSTSGFYTFQEATDVRSGADSDYGRYHKRSEIQGNLTQQLGTYGSVYFNMTQQDYWNDDGKRLSLATGYNGRIGRVNYSIAYSWNKSPEWDENDQLWSFNISIPFGRAWSNYRVTTDQDGRTIQQLGVNGTLLEDRNLSYNVQEGYSSNGVGNSGNASLAYQGGAGNISVGYSYGKDYQQTNYSLRGGIVAHSEGISLSQPLGETIAIVSAPGARGAKVLNNSGVSVDWQGNAVVPYLSIYRENDVSIRSETLNDSVDMNSAFQTIVPTRGAVVRAHFDTRVGYRVLMTLIRQNGVSVPFGATATLVSDTTEQISGIVGEDGQLYISGMPKTGNVKIVWGKDTSQQCVAKYELPVEEKNSGIISVTANCQ

SEQ ID NO: 5114 - protein, 790 aa, Escherichia coli
MSQSIAFTVIEGKKNAQACITQKNLLQFHISSPDKNSGKAILLKRDDDLGDCLNLAEMISQSSIRYDVNDQRLDIDVPQAWIMKNYQNYVDPSLWENGINAAMLSYNLNGYHSESPGRTNDSIYAAFNGGINLGAWRLRASGNYNWMTNVHSDYDFQNRYLQRDLASLRSQLVIGESYTTGETFDSVSIRGIRLYSDSRMLPPVLASFAPIIHGVANTNAKVTVMQNGYKIYETTVPPGAFAIDDLSPSGYGSDLIVTIEEADGTKRTFSQPFSSVVQMLRPGVGRWDISAGQVLKDSIQDEPNLFQASYYYGLNNYLTGYTGIQLTDNNYTAGLLGLGMNTPVGAFSVDVTHSNVSIPDDKTYQGQSYRISWNKLFENTSTSLNIAAYRYSTQHYLGLNDALTLIDEVEHPEQDLEPKSMRNYSRMKNQVTVSINQPLKFEKKDYGSFYLSGSWSDYWASGQNSTNYSIGYSNSASWGSYSISAQRSLNEDGQTDDSIYLSFTIPIENLLDTDHRSSGFQSIDTQLNSDFKGNNQLNISSSGYSDTNRISYSVNTGYMMNKSSDDLSYIGGHASYESPWGTLSGSASASSDNSRQFSLNTDGGFVLHSGGLTFSNDSFSDSDTLAVIQAPGAKGARINYGNSTVDRWSYGVTSALSPYHENRIALDINDLENDVELKSTSTVAIPRQGAVVFADFETVQGQSAIMNIVRSDGKNIPFAEDIYDEQNNIIGNVGQGGQAFVHGIEQEENIRITWIEEGKPVSCFAHYQQNTASEKIAQSIILNGLRCQIQ

SEQ ID NO: 5115 - protein, 355 aa, Escherichia coli
MKRNILAVVVPALLVAGTANAAEIYNKDGNKLDLYGKAVGLHYFSKGNGENSYGGNGDKTYARLGFKGETQINSDLTGYGQWEYNFQGNNSEGDDAQNGNKTRLAFAGLKFADAGSFDYGRNYGVVYDALGYTDMLPEFGGDTAYSDDFFVGRVGGVATYRNSNFFGLVDGLNFAVQYLGKNERDTARRSNGDGVGGSVSYEFEGFGIVGAYGAADRTNLQEDSTLGKGKKAEQWATGLKYDANNIYLAANYGETRNATPITGGFANKTQDILLVAQYQFDFGLRPSIAYTKSKAKDVEGIGDVDLVNYIEVGATYYFNKNMSTYVDYAINQIDSDNKLGVGSDDTVAVGIVYQF

SEQ ID NO: 5116 - protein, 613 aa, Escherichia coli
MMVSVIDTSAPENQTATSATDLLRHVPGITLDGTGRTNGQDVNMRGYDHRGVLVLVDGVRQGTDTGHLNGTFLDPALIKRVEIVRGPSALLYGSGALGGVISYDTVDAKDLLQEGQSSGFSVFGTGGTGDHSLGLGASAFGRTENLDGIVAWSSRDRGDLRQSNGETAPNDESINNMLAKGTWQIDSAQSLSGLVRYYNNDAREPKNPQTVEASDSSNPMVDRSTIQRDAQLSYKLAPQGNDWLNADAKIYWSEVRINAQNTGSSGEYREQITKGARLENRSTLFADSFASHLLTYGGEYYRQEQHPGGATTGFPQAKIDFSSGWLQDEITLRDLPITLLGGTRYDSYRGSSDGYKDVDADKWSSRAGMTINPTNWLMLFGSYAQAFRAPTMGEMYNDSKHFSIGRFYTNYWVPNPNLRPETNETQEYGFGLRFDDLMLSNDALEFKASYFDTKAKDYISTTVDFAAATTMSYNVPNAKIWGWDVMTKYTTDLFSLDVAYNRTRGKDTDTGEYISSINPDTVTSTLNIPIAHSGFSVGWVGTFADRSTHISSSYSKQPGYGVNDFYVSYQGQQALKGMTTTLVLGNAFDKEYWSPQGIPQDGRNGKIFVSYQW

SEQ ID NO: 5117 - protein, 118 aa, Escherichia coli [sequence omitted]

SEQ ID NO: 5118 - protein, 565 aa, Escherichia coli
MKSPAPSRPQKMALIPACIFLCFAALSVQAEETSVTPQPPDILLGPLFNDVQNAKLFPDPKTFADAVPNSYPLMILADYRMQQNQSGFDLRHFVNVNFTLPKEGEKYVPPEGQSLREHIDGLWPVLTRSTENTEKWDSLLPLPKPYVVPGGRFREVYYWDSYFTMLGLAESGHWDKVADMVANFAHEIDTYGHIPNGNRSYYLSRSQPPFFALMVELLAQHEGDAALKQYLPQMQKEYAYWMDGVENLQAGQQEKRVVKLQDGTLLNRYWDDRDTPRPESWVEDIATAKSNPNRPATEIYRDLRSAAASGWDFSSRWMDNPQQLNTLRTTSIVPVDLNSLMFKMEKILSRASKAAGDNAMANQYETLANARQKGIEKYLWNDQQGWYADYDLKSHKVRNQLTAAALFPLYVNAAAKDRASKMATATKTHLLQPGGLNTTSVKSGQQWDAPNGWAPLQWVATEGLQNYGQKEVAMDISWHFLTNVQHTYDREKKLMEKYDVSTTGTGGSGGEYPLQDGFGWTNGVTLKMLDLICPKEQPCDNVPATRPLSESTTQPLKQKEAEPTP

SEQ ID NO: 5119 - protein, 650 aa, Escherichia coli
MSAISCAWPVLAVDDDGETMVVTASSVEQNLKDAPASISVITQEDLQRKPVQNLKDVLKEVPGVQLTNEGDNRKGVSIRGLDSSYTLILVDGKRVNSRNAVFRHNDFDLNWIPVDSIERIEVVRGPMSSLYGSDALGGVVNIITKKIGQKWSGTVTVDTTVQEHRDRGDTYNGQFFTSGPLIDGVLGMKAYGSLAKREKDDPQNSTTTDTGETPRIEGFSSRDGNVEFAWTPNQNHDFTAGYGFDRQDRDSDSLDKNRLERQNYSVSHNGRWDYGTSELKYYGEKIENKNPGNSSPITSESNTVDGKYTLPLTAINQFLTVGGEWRHDKLSDAVNLTGGTSSKTSASQYALFVEDEWRIFEPLALTTGVRMDDHETYGEHWSPRAYLVYNATDTVTVKGGWATAFKAPSLLQLSPDWTSNSCRGACKIVGSPDLKPETSESWELGLYYMGEEGWLEGVESSVTVFRNDVKDRISISRTSDVNAAPGYQNFVGFETGANGRRIPVFSYYNVNKARIQGVETELKIPFNDEWKLSINYTYNDGRDVSNGENKPLSDLPFHTANGTLDWKPLALEDWSFYVSGHYTGQKRADSATAKTPGGYTIWNTGAAWQVTKDVKLRAGVLNLGDKDLSRDDYSYNEDGRRYFMAVDYRF

SEQ ID NO: 5120 - protein, 249 aa, Escherichia coli
MTKYLSAKTLTTVLSLLAATVSFSTQASVTPDRTRLIFNESDKSISVTLRNNDPKLPYLAQSWIEDEKGVKISSPLAVLPPVQRIEAMMNGQVKIQGLPDIHKLPADRESMFYFNVREIPPKSNKSNTLQIALQTRIKLFWRPKALEKNTTQNPWQHKVTLTRNGQEFTVNNPTPYYVIFSNASAQKNGNPAAGFSPIVMSPKTSAPLNVKMESVPVLTYVNDYGARMPLFFTCNGNSCQVDEEQSRKG

SEQ ID NO: 5121 - protein, 200 aa, Escherichia coli
MENKGNNPLLVQSWLDTGDDNAEPGSITVPFTATPPVSRIDAKRGQTIKLMYTASSALPKDRESVFWFNVLEVPPKPDAAKASNQSLLQLAFRTRIKLFYRPEGLSGMPSDAPLALKWSWATSEGKAALRVDNPTPYYVSFSSGDLEANGKRYPLDMTMIAPFSNDVIKVNGMSGRTSSAKVHFFAINDFGGSIEGNANL

SEQ ID NO: 5122 - protein, 208 aa, Escherichia coli; identical to SEQ ID NO: 1948

SEQ ID NO: 5123 - protein, 213 aa, Escherichia coli; identical to SEQ ID NO: 2232

SEQ ID NO: 5124 - protein, 207 aa, Escherichia coli; identical to SEQ ID NO: 2212

SEQ ID NO: 5125 - protein, 856 aa, Escherichia coli
MAGFFVRLFVACAFAAQAPLSSAELYFNPRFLADDPQAVADLSRFENGQELPPGTYRVDIYLNNGYMATRDVSFNTGDSEQGIVPCLTRAQLASMGLNTASVSGMNLLADDACVPLTSMIHDATAHLDVGQQRLNLTIPQAFMSNRARGYIPPELWDPGINAGLLNYNFSGNSVQNRIGGNSHYAYLNLQSGLNIGAWRLCDNTTWSYNSSDSSSGSKNKWQHINTWLERDIIPLRSRLTLGDGYTQGDIFDGINFRGAQLASDDNMLPDSQRGFAPVIHGIAHGTAQVTIKQNGYDIYNSTVPPGPFTINDIYAAGNSGDLQVTIKEADGSTQIFTVPYSSVPLLQREGHTRYSITAGEYRSGNAQQEKPRFFQSTLLHGLPAGWTIYGGTQLADRYRAFNFGIGKNMGALGALSVDMTQANSTLPDDSQHDGQSVRFLYNKSLNESGTNIQLVGYRYSTSGYFNFADTTYSRMNGYNIETQDGVIQVKPKFTDYYNLAYNKRGKLQLTVTQQLGRTSTLYLSGSHQTYWGTSNVDEQFQAGLNTAFEDINWTLSYSLTKNAWQKGRDQMLALNVNIPFSHWLRSDSKSQWRHASASYSMSHDLNGRMTNLAGIYGTLLEDNDLSYSVQTGYAGGGDGNSGSTGYATLNYRGGYGNANIGYSHSDDIKRLYYGVSGGVLAHANGVTLGQPLNDTVVLVKAPGAKDAKVENQTGVRTDWRGYAVLPYATEYRENRVALDTNTLADNVDLDNAVANVVPTRGAIVRAEFKARVGIKLLMTLTHNNKPLPFGAMVTSESSQSSGIVADNGQVYLSGMPLAGKVQVKWGEEENAHCVANYQLPPESQQQLLTQLSVECR

SEQ ID NO: 5126 - protein, 371 aa, Escherichia coli
MKVKVLSLLVPALLVAGAANAAEIYNKDGNKLDLYGKVDGLHYFSDNDSKDGDKTYMRLGFKGETQVTDQLTGYGQWEYQIQGNEPESDNSSWTRVAFAGLKFQDVGSFDYGRNYGVVYDVTSWTDVLPEFGGDTYDSDNFMQQRGNGFATYRNTDFFGLVDGLNFAVQYQGKNGSPSGEGMTGVTNNGRDVLEQNGDGVGGSITYDIGEGFSFGGAISSSKRTAEQNNYGIGNGDRAETYTGGLKYDANNVYLAAQYTQTYNATLAGDLGWANKAQNFEVVAQYQFDFGLRPSVAYLQSKGKNLNANIAGRTYDDEDLLKYVDVGATYYFNKNMSTYVDYKINLLDDNQFTRAAGINTDDIVALGLVYQF

SEQ ID NO: 5127 - protein, 351 aa, Escherichia coli; identical to SEQ ID NO: 4688

SEQ ID NO: 5128 - protein, 331 aa, Escherichia coli
MKKPVVIGLAVVVLAAVVAGGYWWYQSRQDNGLTLYGNVDIRTVNLSFRVGGRVESLAVDEGDAIKAGQVLGELDHKPYEIALMQAKAGVSVAQAQYDLMLAGYRDEEIAQAAAAVKQAQAAYDYAQNFYNRQQGLWKSRTISANDLENTRSSRDQAQATLKSAQDKLRQYRSGNREQDIAQAKASLEQAQAQLAQAELNLQDSTLIAPSDGTLLTRAVEPGTVLNEGGTVFTVSLTRPVWVRAYVDERNLDQAQPGRKVLLYTDGRPDKPYHGQIGFVSPTAEFTPKTVETPDLRTDLVYRLRIVVTDADDALRQGMPVTVQFGDEAGHE

SEQ ID NO: 5129 - protein, 203 aa, Escherichia coli; identical to SEQ ID NO: 2201

SEQ ID NO: 5130 - protein, 165 aa, Escherichia coli
MKGLLALLISSMVLPAHAGIVIYGTRIIYPAEHKEVMVQLMNQGNRSSLMQAWIDDGDTSLPPEKIQVPFMLTPPVAKIGANSGQQVKIKIMPNKLPTNKESIFYLNVLDIPPNSPEQEGKNALKFAMQNRIKLFYRPAGIAPVNKATFKKLLVNRSGNGLVIKK

SEQ ID NO: 5131 - protein, 729 aa, Escherichia coli
MLSTQFNRDNQHQTTSKPSLLAACIALALLPSAAFAAPATEETVIVEGSATTPVDDENDYSVTSTSAGTKMQMTQRDIPQSVTIVSQQRMEDQQLQTLGEVMENTLGISKSQADSDRALYYSRGFQIDNYMVDGIPTYFESRWNLGDALSDMALFERVEVVRGATGLMTGTGNPSAAINMVRKHATSREFKGDVSAEYGSWNKERYVADLQSPLTEDGKIRARIVGGYQNNDSWLDRYNSEKTFFSGIVDADLGDLTTLSAGYEYQRIDVNSPTWGGLPRWNTDGSGNSYDRARSTAPDWAYNDKEINKVFMTLKQRFADTWQATLNATHSEVEFDSKMMYVDAYVNKADGMLVGPYSNYGPGFDYVGGTGWNSGKRKVDALDLFADGSYELFGRQHNLMFGGSYSKQNNRYFSSWANIFPDEIGSFYNFNGNFPQTDWSPQSLAQDDTTHMKSLYAATRVTLADPLHLILGARYTNWRVDTLTYSMEKNHTTPYAGLVFDINDNWSTYASYTSIFQPQKDRDSSGKYLAPITGNNYELGLKSDWMNSRLTTTLAIFRIEQDNVAQSTGTPIPGSNGETAYKAVDGTVSKGVEFELNGAITDNWQLTFGATRYIAEDNEGNAVNPNLPRTTIKMFTSYRLPVMPELTVGGGVNWQNRVYTDTVTPYGTFRAEQGSYALVDLFTRYQVTKNFSLQGNVNNLFDKTYDTNVEGSIVYGAPRNFSITGTYQF

SEQ ID NO: 5132 - protein, 746 aa, Escherichia coli
MNKKIHSLALLVNLGIYGVAQAQEPTDTPVSHDDTIVVTAAEQNLQAPGVSTITADEIRKNPVARDVSEIIRTMPGVNLTGNSTSGQRGNNRQIDIRGMGPENTLILIDGKPVSSRNSVRQGWRGERDTRGDTSWVPPEMIERIEVLRGPAAARYGNGAAGGVVNIITKKGSGEWHGSWDAYFNAPEHKEEGATKRTNFSLTGPLGDEFSFRLYGNLDKTQADAWDINQGHQSARAGTYATTLPAGREGVINKDINGVVRWDFAPLQSLELEAGYSRQGNLYAGDTQNTNSDAYTRSKYGDETNRLYRQNYSLTWNGGWDNGVTTSNWVQYEHTRNSRIPEGLAGGTEGKFNEKAAQDFVDIDLDDVMLHSEVNLPIDFLVNQTLTLGTEWNQQRMKDLSSNTQALTGTNTGGAIDGVSATDRSPYSKAEIFSLFAENNMELTDSTIVTPGLRFDHHSIVGNNWSPALNISQGLGYDFTLKMGIARAYKAPSLYQTNPNYILYSKGQGCYASAGGCYLQGNDDLKAETSINKEIGLEFKRDGWLAGVTWFRNDYRNKIEAGYVAVGQNAVGTDLYQWDNVPKAVVEGLEGSLNVPVSETVMWTNNITYMLKSENKTTGDRLSIIPEYTLNSTLSWQAREDLSMQTTFTWYGKQQPKKYNYKGQPAVGPETKEISPYSIVGLSATWDVTKNVSLTGGVDNLFDKRLWRAGNAQTTGDLAGANYIAGAGAYTYNEPGRTWYMSINTHF

SEQ ID NO: 5133 - protein, 518 aa, Escherichia coli; identical to SEQ ID NO: 2350

SEQ ID NO: 5134 - protein, 774 aa, Escherichia coli; identical to SEQ ID NO: 3426

SEQ ID NO: 5135 - protein, 446 aa, Escherichia coli; identical to SEQ ID NO: 2177

SEQ ID NO: 5136 - protein, 199 aa, Escherichia coli
MIYDGNKKEASLTVQNKNKSEEFLIQSWVDDATGSKKTPFIITPPLFKLEPGKNNILRIVNVNPSLPQDRESVYWVNVKAIPSQNEENEGKNVLQIAVRTRIKLFYRPAGLKGDIKSSPGELRFTRNGKQIKVDNPTVFNITFSDVFINGHEIEKSGMVPAKGALNIYLPAGVNSASQIKYNTINDFGSSGEYLTREIN

SEQ ID NO: 5137 - protein, 432 aa, Escherichia coli; identical to SEQ ID NO: 2026

SEQ ID NO: 5138 - protein, 879 aa, Escherichia coli
MPEHSFLRLRGLSWWIALAISGSPFNALADDTIQFDGRFLDLKGNTKIDLGRFSQKGYVEPGKYNLRVHVNNQPLPDDYDIYWYATENDPNKSYACLSPELVAQFGLKEDIAKNLQWIRDGQCLNTALLAGTEISGDLGQSALLVSVPQAYLEYTDSEWDPPSRWDDGIPGLIADYSINAQTRHENGGDDTNDISGNGTVGVNVGPWRLRADWQSDYQHTRSNDDGDTDDSGTQKNWEWSRYYAWRALPSLKAKLSLGEDYLNSDIFDGFSYIGGSISTDDQMLPPNLRGYAPDISGVAHTTAKVTVTQMGRVIYETQVPAGPFRIQDIGDSVSGTLHVRIEEQNGQVQEYDVSTASMPFLTRPGQVRYKVTMGRPQNWDHQVAGSFFSGGEASWGIANGWSLYGGALADENYQSAALGLGRDLALLGALAFDVTHSRVQLDDNSVYGNKTLDGNSYRVSYAKDFDELNSRVTFAGYRFSEKNYMTMSEYLDANDDDRARTGNDKEMYTVTYNQNFTDARVSVYLNYSHHTYWDRQDQTNYNMMLSHYFNLGSLRNLSVSLTGYRYEYDKSADKGVYLSLSLPWGDNSTISYNGNYGSGADSNQVSLYHRIDDASHYTLSAGTSENHSSVDGYYSHDGTLAKVDLSANYHEGQYTSAGISLQGGATLTAHGGALHRTQNMGGTRLLIDADGVANVPVEGNGSAVYTNMFGKAVVADVNDYYRNQAYIDLNKLPENAEATKSVVQATLTEGAIGYRKFAVISGEKAMAVLRLQDGSHPPFGAEVKNDNQQQVGLVDDEGNVYLAGVKPGEHMTVFWEGESHCDISLPDPLPNDLFNGLLLPCQQKGGSSPVIPHDIQPVIQEQTQQVTPMEPPMSVSSNQ

SEQ ID NO: 5139 - protein, 239 aa, Escherichia coli
MHQMQTTRTPYSISFMATVLLLLLFACHSTVANAAVALGATRVIYPANQKQVLLPVTNNDPASVYLIQSWIENAGDQKDTQFVITPPLFSMQGKKENTLRIINATNHQLPGDRESLFWVNVKAIPAMEKDQKNENTLQLAIISRIKMFYRPTNLAMAPEEAPAMLRFRRSGSKLTLINPTPYFITVTNMKAGNSNLPNTMVPPKGEVSVDIPHAATGDISFQTINDYGALTPRIKATMQ

SEQ ID NO: 5140 - protein, 161 aa, Escherichia coli; identical to SEQ ID NO: 2582

SEQ ID NO: 5141 - protein, 266 aa, Escherichia coli
MAKSLFRALVALSFLAPLWLYAAPRVITLSPANTELAFAAGITPVGVSSYSDYPPQAQKIEQVSTWQGMNLERIVALKPDLVIAWRGGNAERQVDQLASLGIKVMWVDATSIEQIANALRQLAPWSPQPDKAEKAAQSLLDQYAQLKAQYADKSKKRVFLQFGINPPFTSGKESIQNQVLEVCGGENIFKDSRVPWPQVSREQVLARSPQAIVITGGPDQIPKIKQYWGEQLKIPVIPLTSDWFERASPRIILAAQQLCNALSQVD

SEQ ID NO: 5142 - protein, 616 aa, Escherichia coli
MGPGVQGKVSIRTMTPLNERQYYQLFLNLLEAQGYAVVPMENDVLKVVKSSAAKVEPLPLVGEGSDNYAGDEMVTKVVPVRNVSVRELAPILRQMIDSAGSGNVVNYDPSNVIMLTGRASVVERLTEVIQRVDHAGNRTEEVIPLDNASASEIARVLESLTKNSGENQPATLKSQIVADERTNSVIVSGDPATRDKMRRLIRRLDSEMERSGNSQVFYLKYSKAEDLVDVLKQVSGTLTAAKEEAEGTVGSGREVVSIAASKHSNALIVTAPQDIMQSLQSVIEQLDIRRAQVHVEALIVEVAEGSNINFGVQWGSKDAGLMQFANGTQIPIGTLGAAISAAKPQKGSTVISENGATTINPDTNGDLSTLAQLLSGFSGTAVGVVKGDWMALVQAVKNDSSSNVLSTPSITTLDNQEAFFMVGQDVPVLTGSTVGSNNSNPFNTVERKKVGIMLKVTPQINEGNAVQMVIEQEVSKVEGQTSLDVVFGERKLKTTVLANDGELIVLGGLMDDQAGESVAKVPLLGDIPLIGNLFKSTADKKEKRNLMVFIRPTILRDGMAADGVSQRKYNYMRAEQIYRDEQGLSLMPHTAQPILPAQNQALPPEVRAFLNAGRTR

SEQ ID NO: 5143 - protein, 386 aa, Escherichia coli
MVDDVSVAQVLQALAEQEKLNLVVSPDVSGTVSLHLTDVPWKQALQTVVKSAGLITRQEGNILSVHSVAWQNDNIARQEAEQTRAQANLPLENRNITLQYADAGELAKAGEKLLSAKGSMTVDKRTNRLLLRDNKTALSTLEQWVSQMDLPVGQVELSAHIVTINEKSLRELGVKWTLADAQQAGGVGQVTTLGSDLSVATATTHIGFNIGRINGRLLDLELSALEQKQQLDIIASPRLLASHLQPASIKQGSEIPYQVSSGESGATSVEFKEAVLGMEVTPTVLQKGRIRLKLHISQNVPGQVLQQADGEVLAIDKQEIETQVEVKSGETLALGGIFTRKNKSGQDSVPLLGDIPWFGQLFRHDGKEDERRELVVFITPRLVSSE

SEQ ID NO: 5144 - protein, 711 aa, Escherichia coli
MFTPSFSGLKGRALFSLLFAAPMIHATDSVTTKDGETITVTADANTATEATDGYQPLSTSTATLTDMPMLDIPQVVNTVSDQVLENQNATTLDEALYNVSNVVQTNTLGGTQDAFVRRGFGANRDGSIMTNGLRTVLPRSFNAATERVEVLKGPASTLYGILDPGGLINVVTKRPEKTFHGSVSATSSSFGGGTGQLDITGPIEGTQLAYRLTGEVQDEDYWRNFGKERSTFIAPSLTWFGDNATVTMLYSHRDYKTPFDRGTIFDLTTKQPVNVDRKIRFDEPFNITDGQSDLAQLNAEYHLNSQWTARFDYSYSQDKYSDNQARVTAYDATTGTLTRRVDATQGSTQRMHATRADLQGNVDIAGFYNEILGGVSYEYYDLLRTDMIRCKKAKDFNIYNPVYGNTSKCTTVSASDSDQTIKQESYSAYAQDALYLTDNWIAVAGIRYQYYTQYAGKGRPFNVNTDSRDEQWTPKLGLVYKLTPSVSLFANYSQTFMPQSSIASYIGDLPPESSNAYEVGAKFELFDGITADIALFDIHKRNVLYTESVGDETIAKTAGRVRSRGVEVDLAGALTENINIIASYGYTDAKVLEDPDYAGKPLPNVPRHTGSLFLTYDIHNMPGNNTLTFGGGGHGVSRRSATNGADYYLPGYFVADAFAAYKMKLQYPVTLQLNVKNLFDKTYYTSSIATNNLGNQIGDPREVQFTVKMEF

SEQ ID NO: 5145 - protein, 162 aa, Escherichia coli; identical to SEQ ID NO: 1965

SEQ ID NO: 5146 - protein, 705 aa, Escherichia coli
MSVYAQAAVEPKEDTITVTAAPAPQESAWGPAATIAAKHSATATKTDTPIEKTPQSISVVTREEMDIKQPATVKEALDYTPSVFSTRGSSTTYDVVSIRGFTTASTVNTNQYLDGLKLQGDNYSEASIDPYFLERVELLRGPVSVLYGKSHPGGVVSMVSKRPSTDPIKEIQFKMGTDNLWQTGFDFSDAIDDDGVWSYRLTGLGRSQDAQQKYAKTTRYAVAPSFSWRPDDKTDFTFLSNFQSDPDAGYYGWLPRQGTVVPYQDANGSWHKLPTDFNEGEKDNKMSRRQQLIGYSFAHEFNDTFTVRQNLRYTRIHTLYDAVYGNGYIAPAQISRAYVRSDEDLNSFTVDTQLQSNFAIGAVAHTLLTGVDYLRMRNDIDANYGTANPISMTDPQYGNANININFPYAVINRQEQTGLYIQDQSEWNKWVLTLGGRYDFAKTSTYTRSTSSLDEINDQQFTWRGGINYLFDNGISPYFSYSESFEPVSGATKEGKPFDPSRGKQYEAGVKYVPKDTPVTVTASVFQLTKDKNLTADPSNTLFSVQGGEIRSRGFEIEAKAAVNANINVTAAYSYTDAEYTKDTLYKGKRPAEVPRNMASLWADYTFHETALSGLSLGAGARYFGDTSSFYTTGDKTNQTFNVGGYTLVDAMIKYDIARFGMPGSSVGVNVNNLFDREYVSSCYRDYACYWGAERQVVATATFRF

SEQ ID NO: 5147 - protein, 512 aa, Escherichia coli; identical to SEQ ID NO: 2973

SEQ ID NO: 5148 - protein, 863 aa, Escherichia coli
MHIRKHRLAGFFVRLFVACAFAAQAPLSSAELYFNPRFLADDPQAVADLSRFENGQELPPGTYRVDIYLNNGYMATRDVTFNTGDSEQGIVPCLTRAQLASMGLNTASVAGMNLLADDACVPLTTMVQDATAHLDVGQQRLNLTIPQAFMSNRARGYIPPELWDPGINAGLLNYNFSGNSVQNRIGGNSHYAYLNLQSGLNIGAWRLRDNTSWSYNSSDRSSGSKNKWQHINTWLERDLIPLRSRLTLGDGYTQGDIFDGINFRGAQLASDDNMLPDSQRGFAPVIHGIARGTAQVTIKQNGYDIYNSTVPPGPFTINDIYAAGNSGDLQVTIKEADGSTQIFTVPYSSVPLLQREGHTRYSITAGEYRSGNAQQEKPRFFQSTLLHGLPAGWTIYGGTQLADRYRAFNFGIGKNMGALGALSVDMTQANSTLPDDSQHDGQSVRFLYNKSLNESGTNIQLVGYRYSTSGYFNFADTTYSRMNGYNIETQDGVIQVKPKFTDYYNLAYNKRGKLQLTVTQQLGRTSTLYLSGSHQTYWGTSNVDEQFQAGLNTAFEDINWTLSYSLTKNAWQKGRDQMLALNVNIPFSHWLRSDSKSQWRHASASYSMSHDLNGRMTNLAGVYGTLLEDNNLSYSVQTGYAGGGDGNSGSTGYATLNYRGGYGNANIGYSHSDDIKQLYYGVSGGVLAHANGVTLGQPLNDTVVLVKAPGAKDAKVENQTGVRTDWRGYAVLPYATEYRENRVALDTNTLADNVDLDNAVANVVPTRGAIVRAEFKARVGIKLLMTLTHNNKPLPFGAMVTSESSQSSGIVADNGQVYLSGMPLAGKVQVKWGEEENAHCVANYQLPPESQQQLLTQLSAECR

SEQ ID NO: 5149 - protein, 869 aa, Escherichia coli
MKIPTTTDIPQRYTWCLAGICYSSLAILPSFLSYAESYFNPAFLLENGTSVADLSRFERGNHQPAGVYRVDLWRNDEFIGSQDIVFESTTENTGDKSGGLMPCFNQVLLERIGLISSAFPELAQQQNNKCIDLLKAVPDATINFDFAAMRLNITIPQIALLSSAHGYIPPEEWDEGIPALLLNYNFTGNRGNGNDSYFFSELSGINIGPWRLRNNGSWNYFRGNGYHSEQWNNIGTWVQRAIIPLKSELVMGDGNTGSDIFDGVGFRGVRLYSSDNMYPDSQQGFAPTVRGIARTAAQLTIRQNGFIIYQSYVSPGAFEITDLHPTSSNGDLDVTIDERDGNQQNYTIPYSTVPILQREGRFKFDLTAGDFRSGNSQQSSPFFFQGTALGGLPQEFTAYGGTQLSANYTAFLLGLGRNLGNWGAVSLDVTHARSQLADDSRHEGDSIRFLYAKSMNTFGTNFQLMGYRYSTQGFYTLDDVAYRRMEGYEYDYDYDGEHRDEPIIVNYHNLRFSRKDRLQLNISQSLNDFGSLYISGTHQKYWNTSDSDTWYQVGYTSSWVGISYSLSFSWNESVGIPDNERIVGLNVSVPFNVLTKRRYTRENALDRAYASFNANRNSNGQNSWLAGVGGTLLEGHNLSYHVSQGDTSNNGYTGSATANWQAAYGTLGVGYNYDRDQHDVNWQLSGGVVGHENGITLSQPLGDTNVLIKAPGAGGVRIENQTGILTDWRGYAVMPYATVYRYNRIALDTNTMGNSIDVEKNISSVVPTQGALVRANFDTRIGVRALITVTQGGKPVPFGSLVRENSTGITSMVGDDGQVYLSGAPLSGELLVQWGDGANSRCIAHYVLPKQSLQQAVTVISAVCTHPGS

SEQ ID NO: 5150 - protein, 843 aa, Escherichia coli; identical to SEQ ID NO: 3042

SEQ ID NO: 5151 - protein, 883 aa, Escherichia coli; identical to SEQ ID NO: 4713

SEQ ID NO: 5152 - protein, 866 aa, Escherichia coli; identical to SEQ ID NO: 3025

SEQ ID NO: 5153 - protein, 161 aa, Escherichia coli; identical to SEQ ID NO: 2582

SEQ ID NO: 5154 - protein, 866 aa, Escherichia coli
MYRTHRQHSLLSSGGVPSFIGGLVVFVSAAFNAQAETWFDPAFFKDDPSMVADLSRFEKGQKITPGVYRVDIVLNQTIVDTRNVNFVELTPEKGIAACLTTESLDAMGVNTDAFPAFKQLDKQACAPLAEIIPDASVTFNVNKLRLEISVPQIAIKSNARGYVPPERWDEGINALLLGYSFSGANSIHSSADSDSGDSYFLNLNSGVNLGPWRLRNNSTWSRSSGQTAEWKNLSSYLQRAVIPLKGELTVGDDYTAGDFFDSVSFRGVQLASDDNMLPDSLKGFAPVVRGIAKSNAQITIKQNGYTIYQTYVSPGAFEISDLYSTSSSGDLLVEIKEADGSVNSYSVPFSSVPLLQRQGRIKYAVTLAKYRTNSNEQQESKFAQATLQWGGPWGTTWYGGGQYAEYYRAAMFGLGFNLGDFGAISFDVTQAKSTLADQSEHKGQSYRFLYAKTLNQLGTNFQLMGYRYSTSGFYTLSDTMYKHMDGYEFNDGDDEDTPMWSRYYNLFYTKRGKLQVNISQQLGEYGSFYLSGSQQTYWHTDQQDRLLQFGYNTQIKDLSLGVSWNYSKSRGQPDADQVFALNFSLPINLLLPRSNDSYTSKKNYAWMTSNTSIDNEGHTTQNLGLTETLLDDGNLSYSVQQGYNSEGKTANGSASMDYKGAFADARVGYNYSDNGSQQQLNYALSGSLVAHSQGITLGQSLGETNVLIAAPGAENTRVANSTGLKTDWRGYTVVPYATSYRENRIALDAASLKRNVDLENAVVNVVPTKGALVLAEFNAHAGARVLMKTSTQGIPLRFGAIATLDGVQTNSGIIDDDGSLYMAGLPAKGTITVRWGEASDQICHISYQLTEQQINSAITRMDAICR

SEQ ID NO: 5155 - protein, 819 aa, Escherichia coli
MDAVNIYRLSVLSCLAMVTPPALTAEFNLNVLDKSIRDSVDISLLNQKGVVAPGDYFVSVTVNNNKISNGQQIRWQKSGDKIIPCINESLIELFGLKSDFRKKLPAIKECVDFSVFPEIIFTFDQANQQLNITIPQAWLAWHSENWTPPSTWNNGIPGFLMDYNLFASTYRPQSGSSSNNLNAYGTTGLNAGAWRLRSDYQLSQSDSGDNREQSGAISRTYLFRPLPQIGSRLTLGETDFSSNIFDGFSYTGAALASDDRMLPWELRGYAPQISGIAQTNATVTISHSGRVIYQKKVPPGPFIIDDLNQSVQGTLDVKVSEEDGRVNNFQVSAASTPFLTRQGQVRYKLAAGRPRSSMSHHTEDETFISHEVSWGMLSNTSLYGGMLLAGDDYRSGALGIGQNMLWLGALSFDVTWADSHFDTQQDEQGYSYRFNYSKQVDATNSTISLAAYRFSDRHFHSYANYIDHKYNDADAQDEKQTISLSFGQPITPLNLNLYANILHQSWWNADTSTTANITVGFNVDIGDWKDISVSTSFNTTHYEDKDRDNQIYFSISLPIGESGRLGYDMQNNSNTTTHRMSWNDTLDERNSWGMSAGIQSDRPDNGAQVSGNYQHLSSAGEWDLTGTYAANDYTSASASWSGSFTATQHGAAFHRRSSTNEPRLMVSTDGVGDIPIQGNIDYTNRFGIAVVPFVSSYQPTTVAVNMNDLPDGVTVSENVVKETWTEGAIGFKSLASRAGKDLNVIISDANGHFPPLGADVRQAEGGVSVGMVGENGHAWLSGVDENQQFTVHWGDQKTCAIHLPEHLEDVTKRLILPCH

SEQ ID NO: 5156 - protein, 207 aa, Escherichia coli; identical to SEQ ID NO: 2211

SEQ ID NO: 5157 - protein, 794 aa, Escherichia coli; identical to SEQ ID NO: 4850

SEQ ID NO: 5158 - protein, 869 aa, Escherichia coli; identical to SEQ ID NO: 3012

SEQ ID NO: 5159 - protein, 161 aa, Escherichia coli; identical to SEQ ID NO: 2582

SEQ ID NO: 5160 - protein, 368 aa, Escherichia coli
MNKTITALAIMMASFAANASILPETPVPFKSGTGAIDNDTVYIGLGSAGTAWYKLDTQAKDKKWTALAAFPGGTRDQATSAFIDGNLYVFGGIGKNSKGLTQVFNDVHKYNPKTNSWVKLMSHAPMGMAGHVTFVHNGKAYVTGGVNQNIFNGYFEDLNEAGKDSTAIDKINAHYFDKKAEDYFFNKFLLSFDPSTQQWSYAGESPWYGTAGAAVVNKGDKTWLINGEAKPGLRTDAVFELDFTGNNLKWNKLAPVSSPDGVAGGFAGISNDSLIFAGGAGFKGSRENYQNGKNYAHEGLKKSYSTDIHLWHNGKWDKSGELSQGRAYGVSLPWNNSLLIIGGETAGGKAVTDSVLISVKDNKVTVQN

SEQ ID NO: 5161 - protein, 826 aa, Escherichia coli; identical to SEQ ID NO: 3256

SEQ ID NO: 5162 - protein, 207 aa, Escherichia coli; identical to SEQ ID NO: 2211

SEQ ID NO: 5163 - protein, 266 aa, Escherichia coli
MAKSLFRALVALSFLAPLWLNAAPRVITLSPANTELAFAAGITPVGVSSYSDYPPQAQKIEQVSTWQGMNLERIVALKPDLVIAWRGGNAERQVDQLASLGIKVMWVDATSIEQIANALRQLAPWSPQPDKAEQAAQSLLDQYAQLKAQYADKPKKRVFLQFGINPPFTSGKESIQNQVLEVCGGENIFKDSRVPWPQVSREQVLARSPQAIVITGGPDQIPKIEQYWGEQLKIPVIPLTSDWFERASPRIILAAQQLCNALSQVD

SEQ ID NO: 5164 - protein, 838 aa, Escherichia coli
MPQRHHQGHKRTPKQLALIIKRCLPMVLTGSGMLCTTANAEEYYFDPIMLETTKSGMQTTDLSRFSKKYAQLPGTYQVDIWLNKKKVSQKKITFTANAEQLLQPQFTVEQLRELGIKVDEIPALAEKDDDSVINSLEQIIPGTAAEFDFNHQRLNLSIPQIALYRDARGYVSPSRWDDGIPTLFTNYSFTGSDNRYRQGNRSQRQYLNMQNGANFGPWRLRNYSTWTRNDQASSWNTISSYLQRDIKALKSQLLLGESATSGSIFSSYTFTGVQLASDDNMLPNSQRGFAPTVRGIANSSAIVTIRQNGYVIYQSNVPAGAFEINDLYPSSNSGDLEVTIEESDGTQRRFIQPYSSLPMMQRPGHLKYSATAGRYRADANSDSKEPEFAEATAIYGLNNTFTLYGGLLGSEDYYALGIGIGGTLGALGALSMDINRADTQFDNQHSFHGYQWRTQYIKDIPETNTNIAVSYYRYTNDGYFSFDEANTRNWDYNSRQKSEIQFNISQTIFDGVSLYASGSQQDYWGNNEKNRNISVGVSGQQWGIGYSLNYQYSRYTDQNNDRALSLNLSIPLERWLPRSRVSYQMTSQKDRPTQHEMRLDGSLLDDGRLSYSLEQSLDDDNNHNSSLNASYRSPYGTFSAGYSYGNDSSQYNYGVTGGVVIHPHGVTLSQYLGNAFALIDANGASGVRIQNYPGIATDPFGYAVVPYLTTYQENRLSVDTTQLPDNVDLEQTTQFVVPNRGAMVAARFNANIGYRVLVTVSDRNGKPLPFGALASNDDTGQQSIVDEGGILYLSGISSKSQSWTVRWGNQADQQCQFAFSTPDSEPTTSVLQGTAQCH

SEQ ID NO: 5165 - protein, 237 aa, Escherichia coli; identical to SEQ ID NO: 3022

SEQ ID NO: 5166 - protein, 866 aa, Escherichia coli; identical to SEQ ID NO: 4866

SEQ ID NO: 5167 - protein, 860 aa, Escherichia coli
MSGSYVNAWAEDEIQFDSRFLELKGDTKIDLKRFSSQGYVEPGKYNLQVQLNKQPLTEEYDIYWYASENDASKTYACLPPELVAQFGLKEDVAKNLQWIHDGKCLKPGQLEGIDIKADLSQSALVISLPQAYLEYTDINWDPPSRWDDGISGLIADYSITAQTRHEENGGDDSNEISGNGTVGVNLGAWRLRADWQTDYLHSKSNDDDVINGDDTQKNWEWSRYYAWRALPSLKAKLGLGEDYLNSDIFDGFNYVGGSISTDDQMLPPNLRGYAPDISGVAHTTAKVTVSQMGRVIYETQVPAGPFRIQDLGDSVSGTLHIRIEEQNGQVQEYDINTASMPFLTRPGQVRYKLMMGRPQEWGHHVEGGFFSGGEASWGIANGWSLYGGALADEHYQSAALGVGRDLSVFGAVAFDVTHSHTRLDKETAYGKGSLDGNSFRVSYSKDFDELNSRVTFAGYRFSEENFMTMSEYLDASDSEMVRTGNDKEMYTATYNQNFRDAGVSVYLNYTRHTYWDRDEQTNYNIMLSHYFNLGSIRNMSISMTGYRYEYDNQSDKGVYISLSMPWGDSSTISYNGNYGSGSDSSQVGYFSRVDDATHYQLNVGTSDNHSSVDGYYSHDGSLAQVDLSANYHEGQYTSAGISLQGGATLTAQGGALHRTQNMGGTRLLIDADGVAGVPVEGNGAAVYTNMFGKAVVADVNNYYRNQAYIDLNNLPENAEATQSVVQATLTEGAIGYRKFSVISGQKAMAVLRLQDGSYPPFGAEVKNDSAQNVGLVDDDGNVYLAGVKPGEHMIVSWGGVAHCDIHLPDPLPADLFNGLLLPCQQTGAISPSMPHEIKPMIQEQTQQVMPTEAPVSVSAN

SEQ ID NO: 5168 - protein, 838 aa, Escherichia coli; identical to SEQ ID NO: 3041

SEQ ID NO: 5169 - protein, 822 aa, Escherichia coli
MLSVPLWAAEDAEFDPSFLSRTPGSSVIDVRRFTHGNPVPSGNYYSDIYLNGEWKGNAELSFRDMSSSQEESVLCVTPELLSILDVSPEAVAREPDTGNGRCMPFSAVVPDAKIRFDLSLLRLNVEIPQAMLVSRPRGYISPSQWQTGVPAAFVSYDVNHWRYRTPDMENNQSYLGLRAGFNAGGWAFRHRGTESWSDGHAEGYRSIETNLQHDIAMLRAQLTLGDFTTTGELMDSNSLRGIRLASDDRMLPGSLRGYAPVVRGMAGSNARVTVRQNGNIIYETTVPAGPFSISDLYPSGYGGDLTVTVTESDGQTRSFIVPFASVAQLVRPGFSRWQVAAGRYRYGNRTFSDTVFQGTLQYGLTNDITLNTGMSTAPHYLSGLGGVAFNTPLGAVATDITLARTTFPGSDTTHRGYSLHAGYSARIPETSTNVTLAAYRYSSRDFWSLRDAILTRNRDVINDSSVRSATGYRPRNQLQLTVNQSLGEGWGNLYLTGATYHYWGHTGTFNEYQAGYNNVWKKMSYQIGFSQTRRSGDYHHDNRFFFSFSLPLSDTGRTLLSTTVNVSDKNSNSIQSSISGVSGDDNQLSYGVSLNTQENGPTGYAVNGSYRSPVVTLQATAGNDSRHNRQISAGISGAIVAHPFGVTASNDLGDTFTVIHADGAGGAVINNAPGNRLDPWGNGIVPYVTPYEKNYISIDPTALAADVELSATEREIIPRANSTTMVTFTTKTGKAMLFDVKMPDGTPPPMAAEALTADGKSAGYIAQGGRLFVRDLDAEKGILRIVWGNGQNDSCVIHYSASGENARGNTAPVIHPATCMRE

SEQ ID NO: 5170 - protein, 816 aa, Escherichia coli
MLRTTRWVAAIIFLYSFPGYAEETFDTHFMIGGMKGEKVSEYHFDNKQPLPGNYELDFYVNNQWRGKQDITIPESPVKPCLPKVLLTKLGVKTGNLNTEDNCILLDEAVHGGQYQWDISEHRLNLTVPQAYINELERGYVPPESWDRGIDAFYTSYNLSQYRSYDSNNNSHTASYGRFNSGLNLFSWQLHSDASYSKPDDMKGKWQSNTLYLERGWSQILSTVQIGENYTSSLIFDSLRFSGIRLFRDMQMLPDSMQSFTPLVQGVAQSNALITVSQNGYTIYQKEVPPGPFTIADLQLSGSGSDLDVSIKEADGSVRSFLVPYSSVPNMLQPGVSNFDFIAGRSQIYGVKNQEDFLEANYIYGLNNLLTLYGGTILSDNYNAITLGNGWNTPLGAISFDATRSSSKLNNDTRHEGTSYQVAYNKYLLQTATHFSVAAWRYASQDYRTFSDHLYENDKINHQSDYDDFYDIGRKNSLSANIMQPLSNNLGNVSLSALWRNYWGRSGNAKDYQFSYSNNWQHISYTFSASQSYDENDKEEERFNLFISIPFYWGDDIAKTRHQINLSNSTSFSKDGYSSNNTGITGIAGEHDQLNYGIYVNQQQQNNDTSLGTNLSWRTPIATIDGSYSHSKNAWQSGGSISSGLVVWPGGINITNQLSDTFAILDAPGLEGAHINGQKYNRTNSKGQVVYDLMIPHRENHLVLDIANSESETELHGNRQIIAPYRGAVSYVQFTTDQRKPWYIQALRPDGSPLTFGYDVLDLQENNIGVVGQGSRLFIRVDEIPTGIKVALNDEQNLFCTITFQHVIDENKTYICQ

SEQ ID NO: 5171 - protein, 880 aa, Escherichia coli; identical to SEQ ID NO: 3008

SEQ ID NO: 5172 - protein, 826 aa, Escherichia coli
MLRMTPLASAIVALLLGIEAYAAEETFDTHFMIGGMKDQQVANIRLDDNQPLPGQYDIDIYVNKQWRGKYEIIVKDNSQETCLSREVIKRLGINTDNFASGKQCLTFEQLVQGGSYTWDIGVFRLDFSVPQAWVEELESGYVPPENWERGINAFYTSYYVSQYYSDYKASGNSKSTYVRFNSGLNLLGWQLHSDASFSKTNNNPGVWKSNTLYLERGFAQLLGTLRVGDMYTSSDIFDSVRFRGVRLFRDMQMLPNSKQNFTPRVQGIAQSNALVTIEQNGFVVYQKEVPPGPFAITDLQLAGGGADLDVSVKEADGSVTTYLVPYAAVPNMLQPGVSKYDFAAGRSHIEGASKQSDFVQAGYQYGFNNLLTLYGGSMVANNYYAFTLGTGWNTRIGAISVDATKSHSKQDNGDVFDGQSYQIAYNKFVSQTSTRFGLAAWRYSSRDYRTFNDHVWANNKDNYRRDENDVYDIADYYQNDFGRKNSFSANMSQSLPEGWGSVSLSTLWRDYWGRSGSSKDYQLSYSNNLRRISYTLAASQAYDENHHEEKRFNIFISIPFDWGDDVSTPRRQIYMSNSTTFDDQGFASNNTGLSGTVGSRDQFNYGVNLSHQHQGNETTAGANLTWNAPVATVNGSYSQSSTYRQAGASVSGGIVAWSGGVNLANRLSETFAVMNAPGIKDAYVNGQKYRTTNRNGVVVYDGMTPYRENHLMLDVSQSDSEAELRGNRKIAAPYRGAVVLVNFDTDQRKPWFIKALRADGQPLTFGYEVNDIHGHNIGVVGQGSQLFIRTNEVPPSVNVAINKQQGLSCTITFGKEIDESRNYICQ

SEQ ID NO: 5173 - protein, 266 aa, Escherichia coli; identical to SEQ ID NO: 1894

SEQ ID NO: 5174 - protein, 857 aa, Escherichia coli
MSRKTVSRTFSSFSISVVAVAVASTFSAHAGKFNPKFLEDVQGVGQHVDLTMFEKGQEQQLPGIYRVSVYVNEQRMETRTLEFKEATEAQRKAMGESLVPCLSRTQLAEMGVRVESFPALNLVPAEACVPFDEIIPQASSHFDFSEQKLVLSFPQAAMHQVARGTVPESLWDEGIPALLLDYSFSGSNSEYDSTGSSSSYVDDNGTVHHDDGKDTLKSDSYYLNLRSGLNLGAWRLRNYSTWSHSGGKAQWDNIGTSLSRAIIPFKAQLTMGDTATAGDIFDSVQMRGAMLASDEEMLPDSQRGFAPIVRGIAKSNAEVSVEQNGYVIYRTYVQPGAFEINDLYPTANSGDLTVIIKEADGSEQRFIQPFSSVPIFQREGHLKYSFAAGEYQAGNYDSGSPRFGQLDLIYGLPWGMTAYGGALISNNYNAFALGIGKNFGYIGAISIDVTQAKSELNNDRDSQGQSYRFLYSKSFESGTDFRLAGYRYSTSGFYTFQEATDVRSDADSDYNRYHKRSEIQGNLTQQLGAYGSVYLNLAQQDYWNDAGKQNTVSAGYNGRIGKVSYSIAYSWNKSPEWDDSDRLWSFNISVPLGRAWSNYRVTTDQDGRTNQQVGVSGTLLEDRNLSYSVQEGYASNGVGNSGNANVGYQGGSGNVNVGYSYGKDYRQLNYSVRGGVIVHSEGVTLSQPLGETMTLISVPGARNARVVNNGGVQVDWMGNAIVPYAMPYRENEISLRSDSLGDDVDVENAFQKVVPMRGAIVRARFDTRVGYRVLMTLLRSAGSPVPFGATATLITDKQNEVSSIVGEEGQLYISGMPEEGRVLIKWGNDASQQCVAPYKLSLELKQGGIIPVSANCQ

SEQ ID NO: 5175 - protein, 837 aa, Escherichia coli; identical to SEQ ID NO: 4687

SEQ ID NO: 5176 - protein, 361 aa, Escherichia coli; identical to SEQ ID NO: 3601

SEQ ID NO: 5177 - protein, 840 aa, Escherichia coli
MNKSVVSISAAILVLLCQPVMGKEISPATPSDEDNYTFDPQLFRGSRFSQSSLAKLTTRESVAPGNYKMDIYTNNKLSGSWNVTFKEAADGRVLPCLTPEVADAIGLKTGEDKGEKDPVCTFAQELAPGITSQTQLSQLRLDLSVPQSQMISRPRGYVPPSELDTGASLAFMNYIANYYNVAYSGQNAHSQRSLWASFNGGINLGAWQYRQLSNMTWDNDKGNQWNNIRSYLQRPLPAINSQLMMGQLITSGRFFSGLSYHGVSLATDERMLPDSMRGYAPTIRGVAATNARVSVMQNGHEIYQTTVAPGPFEINDLYPTSYSGDLDVTVTEANGTVSRFSVPFSAVPESMRPGTSRYNVEVGKTQDSGDDSMFGDLTWQHGMTNTLTFNSGSRIADGYQALMLGGVYGSTLGAFGANLTWSHARVPESEAQSGWMSQLTWSKTFQPTSTTVSLAGYRYSTSGYRDLADVLGERHAASNKQSWDSSQWRQQSRFDLTLSQSLANYGNLFVSGSTQNYRGGKSRDTQLQLGYSNSFSHGISMNLSVGRQRMGGYKDNSNDMQTVTSLSFSFPLGGNGPRVPSLSNSWTHSTDGSSQLQSSLTGMLDEAQTTNYSLNVMRDQQYKQTTLSGNMQKRFSQTTVGLNASKGQDYWQASGNVQGAMAVHGGGVTFGPYLGETFALVEAKGAEGAKVYNSSQLEINDSGYALVPAVTPYRYNRISLDPQGMDSDAELVDSEKQVAPVAGAAVKVVFRTRPGKALLIKSRMADGSELPMGADVLDENNTVVGIAGQGGQIYLRTEQTKGHLSVRWGEGANDSCQLPFDISGKDSNSPIIRLNETCQS

SEQ ID NO: 5178 - protein, 240 aa, Escherichia coli
MDMEKIRMNIFAYLLVLVFSMSMSSSAFASVVMTGTRIIFPGDAKEKTIQLRNTSDQPYIINIHVEDERGSDKNVPFMPTPQTFRMEAAAGQALRLLYTGDNLPQDRESVFWFSFSQLPYLNKNDKSQNQLILALTNRVKIFYRPSSIVGKSSDAPKNLTYQVKHNRIEVTNPTGYYVVIRAAELLNNGKKVPLANSVMIAPQSTTEWTLRSGISVAPGAQIHLVTVNDYGVNVTSEHAL

SEQ ID NO: 5179 - protein, 656 aa, Escherichia coli
MRLKKHYLCTALSLAFTQQAVAAQESDSLTVWSSPVSSTTTTVLDQPTMKALDKQNVAQALSVVPGVVLQKSGSRNEEQVKVRGFDSRQVPVYFDGVPIYVPYDGNLDLARILTNNLGAVEVSKGYSSLLQGPNQMGGAINITTQKPTKPLEASLGYRQGWSRSQDNAYDMHASFAASSDLGYLQVSGSQLKQDFLGLPHGVNNDIAGKHGKMINSSADDKRGIVKLGFTPRENDEYTLTYIKQDGEKDNPPYSGNSGQKSRYWQWPEYDKESFYYQGTTQLNDRFTLKSRLYRDTFENTLMMYNSLADLKNKKGSYSHYSDYSDGAGLQLAADVRENDLLSFAVNWKDDVHREKGAPHAAYDRYEDRTWSLASEYQWAAADNVDVVAGISYDWRDSVEAKKHEKDDSITHYDDNNQSAFNWQVMGKYHFANEDTLALSYYDRTRFPTLKERYTTSKPAYNQIAIVNPQLKPERARGVDLTWNGAFTRDWGFEVSVYYNRVSDAILSHNIDADTIQNQNSGTVDYSGLDAGIKGKISNILDVGLSYALIHADAKRKDIGKITDLPTQTMTAWMTLKPWEPLSVTLSEEARSSSYSNSDGSQKAAGFAVTHIRADYTLGHGFSVNASVNNLFDTQYAYSEGFIEEGRNFWAGVEYTF

SEQ ID NO: 5180 - protein, 199 aa, Escherichia coli
MIYDASRKEAALPVANKGAETPYLLQSWVDNIDGTSRAPFIITPPLFRLEAGDDSSLRIIKTADNLPENKESLFYINVRAIPAKKKSDDVNANELTLVFKTRIKMFYRPAHLKGLVNDAWKSLEFKRSDHSLNIYNPTEYYVVFAGLAVDKADLTSKIEYIAPGEHKQLPLPASGGKNVKWAAINDYGGSSGTETRPLQ

SEQ ID NO: 5181 - protein, 660 aa, Escherichia coli
MSRPQFTSLRLSLLALAVSATLPTFAFATETMTVTATGNARSSFEAPMMVSVIDTSAPENQTATSATDLLRHVPGITLDGTGRTNGQDVNMRGYDHRGVLVLIDGVRQGTDTGHLNGTFLDPALIKRVEIVRGPSALLYGSGALGGVISYDTVDAKDLLQEGQSSGFRVFGTGGTGDHSLGLGASAFGRTENLDGIVAWSSRDRGDLRQSNGETAPNDESINNMLAKGTWQIDSAQSLSGLVRYYNNDAREPKNPQTVEASESSNPMVDRSTIQRDAQLSYKLAPQGNDWLNADAKIYWSEVRINAQNTGSSGEYREQITKGARLENRSTLFADSFASHLLTYGGEYYRQEQHPGGATTGFPQAKIDFSSGWLQDEITLRDLPITLLGGTRYDSYRGSSDGYKDVDADKWSSRAGMTINPTNWLMLFGSYAQAFRAPTMGEMYNDSKHFSIGRFYTNYWVPNPNLRPETNETQEYGFGLRFDDLMLSNDALEFKASYFDTKAKDYISTTVDFAAATTMSYNVPNAKIWGWDVMTKYTTDLFSLDVAYNRTRGKDTDTGEYISSINPDTVTSTLNIPIAHSGFSVGWVGTFADRSTHISSSYSKQPGYGVNDFYVSYQGQQALKGMTTTLVLGNAFDKEYWSPQGIPQDGRNGKIFVSYQW

SEQ ID NO: 5182 - protein, 229 aa, Escherichia coli
MMKSKFVALALSLFLSQSVLAGGVGLSSTRVIYDGSKKEASLTVQNKSKTEEFLIQSWVDDAAGSKKTPFIITPPLFKLDPEKNNILRIVNITPGLPQDRESVYWVNVKAIPSKSDDSENKNVLQIAVRTRIKLFYRPAGLKGDVKTAPNELRFTRNGNQLRVDNPTVFNITFNQFFANDKEIEKAGMVPAKGALNITLPAGVGSVSKIKYNAINDFGSSAEMITKNVD

SEQ ID NO: 5183 - protein, 118 aa, Escherichia coli [sequence omitted]

SEQ ID NO: 5184 - protein, 219 aa, Escherichia coli
MYLLRLFFAVTLITQMSMAMAGIVVGGTRVIFYGDKPDTTISIFNKETNLPYLLQTWVDPFNKEDKSKPPFSVIPPVSRIEPQQEKILRILKTAGELPKDRESVFWLNVKNIPPSIDKKNTNVLEIAIKTRIKLFWRPAAVKIIPEQAIKNVKWSRQGNNLIVENPNPIHINVMSVTVDDKDVSLNMIRPFETLTLPIPAGVAGKSLVWRFINDYGAIS

SEQ ID NO: 5185 - protein, 208 aa, Escherichia coli; identical to SEQ ID NO: 1949

SEQ ID NO: 5186 - protein, 631 aa, Escherichia coli
MVVTASSVEQNLKDAPASISVITQEDLQRKPVQNLKDVLKEVPGVQLTNEGDNRKGVSIRGLDSSYTLILVDGKRVNSHNAVFRHNDFDLNWIPVDSIERIEVVRGPMSSLYGSDALGGVVNIITKKIGQKWSGTVTVDTTIQEHRDRGDTYNGQFFTSGPLIDGVLGMKAYGSLAKREKDDPQNSTTTDTGETPRIEGFSSRDGNVEFAWTPNQNHDFTAGYGFDRQDRDSDSLDKNRLERQNYSVSHNGRWDYGTSELKYYGEKVENKNPGNSSPITSESNTVDGKYTLPLTAINQFLTVGGEWRHDKLSDAVNLTGGTSSKTSASQYALFVEDEWRIFEPLALTTGVRMDDHETYGEHWSPRAYLVYNATDTVTVKGGWATAFKAPSLLQLSPDWTSNSCRGACKIVGSPDLKPETSESWELGLYYMGEEGWLEGVESSVTVFRNDVKDRISISRTSDVNAAPGYQNFVGFETGANGRRIPVFSYYNVNKARIQGVETELKIPFNDEWKLSLNYTYNDGRDVSNGENKPLSDLPFHTANGTLDWKPLALEDWSFYVSGHYTGQKRADSATAKTPGGYTIWNTGAAWQVTKDVKLRAGVLNLGDKDLSRDDYSYNEDGRRYFMAVDYRF

SEQ ID NO: 5187 - protein, 237 aa, Escherichia coli; identical to SEQ ID NO: 1814

SEQ ID NO: 5188 - protein, 828 aa, Escherichia coli; identical to SEQ ID NO: 2388

SEQ ID NO: 5189 - protein, 373 aa, Escherichia coli
MKVKVLSLLVPALLVAGAANAAEVYNKDGNKLDLYGKVDGLHYFSDNKDVDGDQTYMRLGFKGETQVTDQLTGYGQWEYQIQGNSAENENNSWTRVAFAGLKFQDVGSFDYGRNYGVVYDVTSWTDVLPEFGGDTYGSDNFMQQRGNGYATYRNTDFFGLVDGLNFAVQYQGKNGSVSGEGMTNNGRGALRQNGDGVGGSITYDYEGFGIGAAVSSSKRTDDQNFGLNGYGERYLGNGDRAETYTGGLKYDANNIYLAAQYTQTYNATRVGSLGWANKAQNFEAVAQYQFDFGLRPSLAYLQSKGKNLGVINGRNYDDEDILKYVDVGATYYFNKNMSTYVDYKINLLDDNQFTRDAGINTDNIVALGLVYQF

SEQ ID NO: 5190 - protein, 274 aa, Escherichia coli
MNKTAIALLALLASSVSLAATPWQKITQPVPGSAQSIGSFSNGCIVGADTLPIQSEHYQVMRTDQRRYFGHPDLVMFIQRLSSQVSNLGMGTVLIGDMGMPAGGRFNGGHASHQTGLDVDIFLQLPKTRWTSAQLLRPQALDLVSRDGKHVVSTLWKPEIFSLIKLAAQDKDVTRIFVNPAIKQQLCLDAGTDRDWLRKVRPWFQHRAHMHVRLRCPADSLECEDQPLPPSGDGCGAELQSWFEPPKPGTTKPEKKTPPPLPPSCQALLDEHVI

SEQ ID NO: 5191 - protein, 229 aa, Escherichia coli
MTKIKLLMLIIFYLIISASAHAAGGIALGATRIIYPADAKQTAVWIRNSHTNERFLVNSWIENSSGVKEKSFIITPPLFVSEPKSENTLRIIYTGPPLAADRESLFWMNVKTIPSVDKNALNGRNVLQLAILSRMKLFLRPVQLQELPAEAPDTLKFSRSGNYINVHNPSPFYVTLVNLQVGSQKLGNAMAAPRVNSQIPLPSGVQGKLKFQTVNDYGSVTPVREVNLN

SEQ ID NO: 5192 - protein, 227 aa, Escherichia coli; identical to SEQ ID NO: 4009

SEQ ID NO: 5193 - protein, 784 aa, Escherichia coli; identical to SEQ ID NO: 2244

SEQ ID NO: 5194 - protein, 170 aa, Escherichia coli
MSGILTRWRQFGKRYFWPHLLLGMVAASLGLPALSNAAEPNAPAKATTRNHEPSAKVNFGQLALLEANTRRPNSNYSVDYWHQHAIRTVIRHLSFAMAPQTLPIAEESLPLQAQHLALLDTLSALLTQEGTPSEKGYRIDYAHFTPQAKFSTPVWISQAQGIRAGPQRLS

SEQ ID NO: 5195 - protein, 243 aa, Escherichia coli; identical to SEQ ID NO: 4409

SEQ ID NO: 5196 - protein, 747 aa, Escherichia coli
MARSKTAQPKHSLRKIAVVVATAVSGMSVYAQAAVEPKEDTITVTAAPAPQESAWGPAATIAARQSATGTKTDTPIQKVPQSISVVTAEEMALHQPKSVKEALSYTPGVSVGTRGASNTYDHLIIRGFAAEGQSQNNYLNGLKLQGNFYNDAVIDPYMLERAEIMRGPVSVLYGKSSPGGLLNMVSKRPTTEPLKEVQLKAGTDSLFQTGFDFSDALDDDGVYSYRLTGLARSANAQQKGSEEQRYAIAPAFTWRPDDKTNFTFLSYFQNEPETGYYGWLPKEGTVEPLPNGKRLPTDFNEGAKNNTYSRNEKMVGYSFDHEFNDTFTVRQNLRFAENKTSQNSVYGYGVCSDPANAYSKQCAALAPADKGHYLARKYVVDDEKLQNFSVDTQLQSKFATGDIDHTLLTGVDFMRMRNDINAWFGYDDSVPLLNLYNPVNTDFDFNAKDPANSGPYRILNKQKQTGVYVQDQAQWDKVLVTLGGRYDWADQESLNRVAGTTDKRDDKQFTWRGGVNYLFDNGVTPYFSYSESFEPSSQVGKDGNIFAPSKGKQYEVGVKYVPEDRPIVVTGAVYNLTKTNNLMADPEGSFFSVEGGEIRARGVEIEAKAALSASVNLVGSYTYTDAEYTTDTTYKGNTPAQVPKHMASLWADYTFFDGPLSGLTLGTGGRYTGSSYGDPANSFKVGSYTVVDALVRYDLARVGMAGSNVALHVNNLFDREYVASCFNTYGCFWGAERQVVATATFRF

SEQ ID NO: 5197 - protein, 430 aa, Escherichia coli; identical to SEQ ID NO: 2617

SEQ ID NO: 5198 - protein, 760 aa, Escherichia coli
MENNRNFPARQFHSLTFFAGFCIGITPVAQALAAEGQTNADDTLVVEASTPSLYAPQQSADPKFSRPVADTTRTMTVISEQVIKDQGATNLTDALKNVPGVGAFFAGENGNSTTGDAIYMRGADTSNSIYIDGIRDIGSVSRDTFNTEQVEVIKGPSGTDYGRSAPTGSINMISKQPRNDSGIDASASIGSAWFRRGTLDVNQVIGDTTAVRLNVMGEKTHDAGRDKVKNERYGIAPSVAFGLGTANRLYLNYLHVTQHNTPDGGIPTIGLPGYSAPSAGTATLNHSGKVDTHNFYGTDSDYDDSTTDTATMRFEHDINDNTTIRNTTRWSRVKQDYLMTAIMGGASNITQPTSDVNSWTWSRTANTKDVSNKILTNQTNLTSTFYTGSIGHDVSTGVEFTRETQTNYGVNPVTLPAVNIYHPDSSIHPGGLTSNGANANGQTDTFAIYAFDTLQITRDFELNGGIRLDNYHTEYDSATACGGSGRGAITCPAGVAKGSPVTTVDTAKSGNLVNWKAGALYHLTENGNVYINYAVSQQPPGGNNFALAQSGSGNSANRTDFKPQKANTSEIGTKWQVLDKRLLLTAALFRTDIENEVEQNDDGTYSQYGKKRVEGYEISVAGNITPAWQVIGGYTQQKATIKNGKDVAQDGSSSLPYTPEHAFTLWSQYQATDDISVGAGARYIGSMHKGSDGAVGTPAFTEGYWVADAKLGYRVNRNLDFQLNVYNLFDTDYVASINKSGYRYHPGEPRTFLLTANMHF

SEQ ID NO: 5199 - protein, 432 aa, Escherichia coli; identical to SEQ ID NO: 2026

SEQ ID NO: 5200 - protein, 191 aa, Escherichia coli; identical to SEQ ID NO: 2727

SEQ ID NO: 5201 - protein, 102 aa, Escherichia coli; identical to SEQ ID NO: 1824

SEQ ID NO: 5202 - protein, 203 aa, Escherichia coli; identical to SEQ ID NO: 2009

SEQ ID NO: 5203 - protein, 208 aa, Escherichia coli; identical to SEQ ID NO: 1949

SEQ ID NO: 5204 - protein, 700 aa, Escherichia coli; identical to SEQ ID NO: 3047

SEQ ID NO: 5205 - protein, 236 aa, Escherichia coli; identical to SEQ ID NO: 3286

SEQ ID NO: 5206 - protein, 274 aa, Escherichia coli; identical to SEQ ID NO: 2303

SEQ ID NO: 5207 - protein, 663 aa, Escherichia coli; identical to SEQ ID NO: 1910

SEQ ID NO: 5208 - protein, 774 aa, Escherichia coli; identical to SEQ ID NO: 3018

SEQ ID NO: 5209 - protein, 162 aa, Escherichia coli; identical to SEQ ID NO: 1965

SEQ ID NO: 5210 - protein, 784 aa, Escherichia coli; identical to SEQ ID NO: 2244

SEQ ID NO: 5211 - protein, 249 aa, Escherichia coli; identical to SEQ ID NO: 3028

SEQ ID NO: 5212 - protein, 193 aa, Escherichia coli; identical to SEQ ID NO: 2246

SEQ ID NO: 5213 - protein, 430 aa, Escherichia coli; identical to SEQ ID NO: 2617

SEQ ID NO: 5214 - protein, 233 aa, Escherichia coli; identical to SEQ ID NO: 3276

SEQ ID NO: 5215 - protein, 230 aa, Escherichia coli; identical to SEQ ID NO: 3019

SEQ ID NO: 5216 - protein, 229 aa, Escherichia coli
MALLIFAVLSLLVAGELQAGVVVGGTRFIFPADRESISILLTNTSQESWLINSKINRPTRWAGGEASTVPAPLLAAPPLILLKPGTTGTLRLLRTESDILPVDRETLFELSIASVPSGKVENQCVKVAMRSVFKLFWRPEGLPGDPLEAYQQLRWTRNSQGVQLTNPTPYYINLIQVSVNGKALSNVGVVPPKSLRQTSWCQAIAPCHVAWRAINDYGGLSAKKEQNLP

SEQ ID NO: 5217 - protein, 686 aa, Escherichia coli
MFWRDITLSVWRKKTTCLKTKKRLLPLVLAAALCSSPVWAEEATFTANFKDTDLKSFIETVGANLNKTIIMGPGVQGKVSIRTMTPLNERQYYQLFLNLLEAQGYAVVPMENDVLKVVKSSAAKVEPLPLVGEGSDNYAGDEMVTKVVPVRNVSVRELAPILRQMIDSAGSGNVVNYDPSNVIMLTGRASVVERLTEVIQRVDHAGNRTEEVIPLDNASASEIARVLESLTKNSGENQPATLKSQIVADERTNSVIVSGDPATRDKMRRLIRRLDSEMERSGNSQVFYLKYSKAEDLVDVLKQVSGTLTAAKEEAEGTVGSGREVVSIAASKHSNALIVTAPQDIMQSLQSVIEQLDIRRAQVHVEALIVEVAEGSNINFGVQWASKDAGLMQFANGTQIPIGTLGAAISQAKPQKGSTVISENGATTINPDTNGDLSTLAQLLSGFSGTAVGVVKGDWMALVQAVKNDSSSNVLSTPSITTLDNQEAFFMVGQDVPVLTGSTVGSNNSNPFNTVERKKVGIMLKVTPQINEGNAVQMVIEQEVSKVEGQTSLDVVFGERKLKTTVLANDGELIVLGGLMDDQAGESVAKVPLLGDIPLIGNLFKSTADKKEKRNLMVFIRPTILRDGMAADGVSQRKYNYMRAEQIYRDEQGLSLMPHTAQPVLPAQNQALPPEVRAFLNAGRTR

SEQ ID NO: 5218 - protein, 238 aa, Escherichia coli
MVKKTVSALFVSTLLASAPAFADIIISGTRIIYNADKKDVNVRLENKGNRPLLIQNWLDTGDDNADPSQIKVPFTATPPVSRVEPKRGQTVKVMYTGATALPKDRESVYWFNVLEVPPKPKDAEADKNLLQLAFRTRIKLFYRPSGLQGEPAEAPAKITWKLNNAQLQANNPTPYYVSFNEVKLESGGKTYNVNSSMVAPFSQASFGVTGLPGSVSSGKVVFKAINDFGGNIDGSATF

SEQ ID NO: 5219 - protein, 686 aa, Escherichia coli; identical to SEQ ID NO: 3015

SEQ ID NO: 5220 - protein, 360 aa, Escherichia coli; identical to SEQ ID NO: 3032

SEQ ID NO: 5221 - protein, 351 aa, Escherichia coli
MKKSTLALVVMGIVASASVQAAEIYNKDGNKLDVYGKVKAMHYMSDNDSKDGDQSYIRFGFKGETQINDQLTGYGRWEAEFAGNKAESDTAQQKTRLAFAGLKYKDLGSFDYGRNLGALYDVEAWTDMFPEFGGDSSAQTDNFMTKRASGLATYRNTDFFGVIDGLNLTLQYQGKNENRDVKKQNGDGFGTSLTYDFGGSDFAISGAYTNSDRTNEQNMQSRGTGKRAEAWATGLKYDANNIYLATFYSETRKMTPITGGFANKTQNFEAVAQYQFDFGLRPSLGYVLSKGKDIEGIGDEDLVNYIDVGATYYFNKNMSAFVDYKINQLDSDNKLNINNDDIVAVGMTYQF

SEQ ID NO: 5222 - protein, 232 aa, Escherichia coli; identical to SEQ ID NO: 2087

SEQ ID NO: 5223 - protein, 209 aa, Escherichia coli; identical to SEQ ID NO: 4977

SEQ ID NO: 5224 - protein, 678 aa, Escherichia coli
MVPSTFSRLKAARCLPVVLAALIFVGCGTHTPDQSTAYMQGTAQADSAFYLQQMQQSSDDTRINWQLLAIRALVKEGKTGQAVELFNQLPQELNDSQRREKTLLAVEIKLAQKDFAGAQNLLAKITPADLEQNQQARYWQAKIDASQGRPSIDLLRALIAQEPLLGAKEKQQNIDAIWQALSSMTQEQANTLVINADENILQGWLDLQRVWFDNRNDPDMMKAGIADWQKRYPNNPGAKMLPTQLVNVKAFKPASTNKIALLLPLNGQAAVFGRTIQQGFEAAKNIGTQPVAAQVAAAPAADVAEQPQPQTVDGVASPAQASVSDLTGEQPAAQPVPVSAPATSTAAVSAPANPSAELKIYDTSSQPLSQILSQVQQDGASIVVGPLLKNNVEELLKSNTPLNVLALNQPENIENRVNICYFALSPEDEARDAARHIRDQGKQAPLVLIPRSSLGDRVANAFAQEWQKLGGGTVLQQKFGSTSELRAGVNGGSGIALTGTPITLRATTDSGMTTNNPTLQTTPTDDQFTNNGGRVDAVYIVATPGEIAFIKPMIAMRNGSQSGATLYASSRSAQGTAGPDFRLEMEGLQYSEIPMLAGGNLPLMQQALSAVNNDYSLARMYAMGVDAWSLANHFSQMRQVQGFEINGNTGSLTANPDCVINRKLSWLQYQQGQVVPAS

SEQ ID NO: 5225 - protein, 539 aa, Escherichia coli; identical to SEQ ID NO: 3050

SEQ ID NO: 5226 - protein, 367 aa, Escherichia coli; identical to SEQ ID NO: 3016

SEQ ID NO: 5227 - protein, 246 aa, Escherichia coli; identical to SEQ ID NO: 3021

SEQ ID NO: 5228 - protein, 565 aa, Escherichia coli
MKSPAPSRPQKMALIPACIFLCFAALSVQAEETPVTPQPPDILLGPLFNDVQNAKLFPDQKTFADAVPNSDPLMILADYRMQQNQSGFDLRHFVNVNFTLPTEGEKYVPPEGQSLREHIDGLWPVLTRSTENTEKWDSLLPLPEPYVVPGGRFREVYYWDSYFTMLGLAESGHWDKVADMVANFAHEIDTYGHIPNGNRSYYLSRSQPPFFALMVELLAQHEGDAALKQYLPQMQKEYAYWMDGVENLQAGQQEKRVVKLQDGTLLNRYWDDRDTPRPESWVEDIATAKSNPNRPATEIYRDLRSAAASGWDFSSRWMDNPQQLNTIRTTSIVPVDLNSLMFKMEKILARASKAAGDNAMANQYETLANARQKGIEKYLWNDQQGWYADYDLKSHKVRNQLTAAALFPLYVNAAAKDRANKMATATKTHLLQPGGLNTTSVKSGQQWDAPNGWAPLQWVATEGLQNYGQKEVAMDISWHFLTNVQHTYDREKKLVEKYDVSTTGTGGGGGEYPLQDGFGWTNGVTLKMLDLICPKEQPCDNVPATRPLSESTTQPVKQKEAEPTP

SEQ ID NO: 5229 - protein, 478 aa, Escherichia coli; identical to SEQ ID NO: 2404

SEQ ID NO: 5230 - protein, 517 aa, Escherichia coli; identical to SEQ ID NO: 2462

SEQ ID NO: 5231 - protein, 646 aa, Escherichia coli
MRLATPRINLSESLTGVPGLQVQNRQNYAQDLQLSIRGFGSRSTYGIRGIRLYVDGIPATMPDGQGQTSNIDLSSVQNVEVLRGPFSALYGNASGGVMNVTTQTGQQPPTIEASSYYGSFGSWRYGLKATGATGDGTQPGDVDYTVSTTRFTTHGYRDHSGAQKNLANAKLGVRIDEASKLSLIFNSVDIKADDPGGLTKAEWKANPQQAPRAEQYDTRKTIKQTQAGLRYERSLSSRDDMSVMMYAGERETTQYQSIPMAPQLNPSHAGGVITLQRHYQGIDSRWTHRGELGVPVTFTTGLNYENMSENRKGYNNFRLNSGMPEYGQKGELRRDERNLMWNIDPYLQTQWQLSEKLSLDAGVRYSSVWFDSNDHYVTPGNGDDSGDASYHKWLPAGSLKYAMTDAWNIYLAAGRGFETPTINELSYRAEGQSGMNFGLKPSTNDTIEIGSKTRIGDGLLSLALFQTDTDDEIVVDSSSGGRTTYKNAGKTRRQGAELAWDQRFAGDFRVNASWTWLDATYRSNVCNEQDCNGNRMPGIARNMGFASIGYVPEDGWYAGTEARYMGDIMADDENTAKAPSYTLVGLFTGYKYNYHNLTVDLFGRVDNLFDKEYVGSVIVNESNGRYYEPAPGRNYGVGVNIAWRFE

SEQ ID NO: 5232 - protein, 240 aa, Escherichia coli
MKHILLFIFTVLLSLPSYGSVVIMGTRVIYPAEQKSINVRLNNGDSTPSLIQAWLDTGDPSSPPDSVMVPFIITPPVFRMEPLSGQTMRIMYTGEKLPADRESLFWLNVLDIPAKPSFAGKSEKAQGYNYLQFAVRSRIKFFFRPDGLPFSPDDAYKKVTWQLTGGDTLQASNPTPYFITFSTVSVGQGAQKVSSTQGGMAAPFSSVTFRLKQKVSPSGKVEWTVVNDNGGYQKGESVVK

SEQ ID NO: 5233 - protein, 263 aa, Escherichia coli
MFKIRFKSRVLLINIFKLFLVSAFVLSNIAYSNDLFRADTRAPNQLRRVNGLLPRGQDDAYERGTPININLFDHVMGMPTGNTRYDDGYVSTTTTLNEAHNIGQNMFGGSNEYYIYVISPAPNMFDVNGVLGRYSPHPYENEVAALGGIPFSQIIGWYRVNFGVIETPMVRNRAYRSDLFHGLNIAPNEDGYRLAGFPDGHQAWREEPWRRYAPLQCSTDLRVISIITCHSIINGLSNKKLSDLKKKLLSVMALPVLLLIDDF

SEQ ID NO: 5234 - protein, 213 aa, Escherichia coli; identical to SEQ ID NO: 2232

SEQ ID NO: 5235 - protein, 111 aa, Escherichia coli
MKKQIEGMTMKKVLALVVAAAMGLSSAAFAAETATTPAPTATTTKAAPAKTTHHKKQHKAAPAQKAQAAKKHHKNAKAEQKAPEQKAQAAKKHAKKHSHQQPVKPAAQPAA

SEQ ID NO: 5236 - protein, 446 aa, Escherichia coli
MMITLRKLPLAVAVAAGVMSAQAMAVDFHGYARSGIGWTGSGGEQQCFQTTGAQSKYRLGNECETYAELKLGQEVWKEGDKSFYFDTNVAYSVAQQNDWEATDPAFREANVQGKNLIEWLPGSTIWAGKRFYQRHDVHMIDFYYWDISGPGAGLENIDVGFGKLSLAATRSSEAGGSSSFASNNIYDYTNETANDVFDVRLAQMEVNPGGTLELGVDYGRANLRDNYRLVDGASKDGWLFTAEHTQSVLKGFNKFVVQYATDSMTSQGKGLSQGSGVAFDNEKFAYNINNNGHMLRILDHGAISMGDNWDMMYVGMYQDINWDNDNGTKWWTVGIRPMYKWTPIMSTVMEIGYDNVESQRTGDKNNQYKITLAQQWQAGDSIWSRPAIRVFATYAKWDEKWGYDYTGNANTNTNFGKAVPADFNGGSFGRGDSDEWTFGAQMEIWW

SEQ ID NO: 5237 - protein, 746 aa, Escherichia coli
MNKKIHSLALLVNLGIYGVAQAQEPTDTPVSHDDTIVVTAAEQNLQAPGVSTITADEIRKNPVARDVSEIIRTMPGVNLTGNSTSGQRGNNRQIDIRGMGPENTLILIDGKPVSSRNSVRQGWRGERDTRGDTSWVPPEMIERIEVLRGPAAARYGNGAAGGVVNIITKKGSGEWHGSWDAYFNAPEHKEEGATKRTNFSLTGPLGDEFSFRLYGNLDKTQADAWDINQGHQSARAGTYATTLPAGREGVINKDINGVVRWDFAPLQSLELEAGYSRQGNLYAGDTQNTNSDSYTRSKYGDETNRLYRQNYSLTWNGGWDNGVTTSNWVQYEHTRNSRIPEGLAGGTEGKFNEKATQDFVDIDLDDVMLHSEVNLPIDFLVNQTLTLGTEWNQQRMKDLSSNTQALTGTNTGGAIDGVSATDRSPYSKAEIFSLFAENNMELTDSTIVTPGLRFDHHSIVGNNWSPALNISQGLGDDFTLKMGIARAYKAPSLYQTNPNYILYSKGQGCYASAGGCYLQGNDDLKAETSINKEIGLEFKRDGWLAGITWFRNDYRNKIEAGYVAVGQNAVGTDLYQWDNVPKAVVEGLEGSLNVPVSETVMWTNNITYMLKSENKTTGDRLSIIPEYTLNSTLSWQAREDLSMQTTFTWYGKQQPKKYNYKGQPAVGPETKEISPYSIVGLSATWDVTKNVSLTGGVDNLFDKRLWRAGNAQTTGDLAGANYIAGAGAYTYNEPGRTWYMSVNTHF

SEQ ID NO: 5238 - protein, 386 aa, Escherichia coli
MVDDVPVAQVLQALAEQEKLNLVVSPDVSGTVSLHLTDVPWKQALQTIVKSAGLITRQEGNILSVHSVAWQNDNIARQEAEQARAQANLPLENRNITLQYADAGELAKAGEKLLSAKGSMTVDKRTNRLLLRDNKTALSALEQWVAQMDLPVGQVELSAHIVTINEKSLRELGVKWTLADAQHAGGVGQVTTLGSDLSVATATTHVGFNIGRINGRLLDLELSALEQKQQLDIIASPRLLASHLQPASIKQGSEIPYQVSSGESGATSVEFKEAVLGMEVTPTVLQKGRIRLKLHISQNVPGQVLQQADGEVLAIDKQEIETQVEVKSGETLALGGIFTRKNKSGQDSVPLLGDIPWFGQLFRHDGKEDERRELVVFITPRLVSSE

SEQ ID NO: 5239 - protein, 518 aa, Escherichia coli; identical to SEQ ID NO: 2349

SEQ ID NO: 5240 - protein, 729 aa, Escherichia coli; identical to SEQ ID NO: 3052

SEQ ID NO: 5241 - protein, 250 aa, Escherichia coli; identical to SEQ ID NO: 3048

SEQ ID NO: 5242 - protein, 233 aa, Escherichia coli
MKTCITKGIVTVSLTAILLSCSSTWAAGKGGVGLAATRLVYSEGEEQISLGVRNTSPDVPYLIQSWVMTPDNKKSADFIITPPLFVLNPANENLLRIMYIGAPLAKDRETLFFTSVRAVPSTTKREEGNTLKIATQSVIKLFWRPKGLAYPLGEAPAKLRCTSSADMVTVSNPTPYFITLTDLKIGGKVVKNQMISPFDKYQFSLPKGAKNSSVTYRTINDYGAETPQLNCKS

SEQ ID NO: 5243 - protein, 162 aa, Escherichia coli; identical to SEQ ID NO: 1965

SEQ ID NO: 5244 - protein, 229 aa, Escherichia coli; identical to SEQ ID NO: 3277

SEQ ID NO: 5245 - protein, 539 aa, Escherichia coli; identical to SEQ ID NO: 3050

SEQ ID NO: 5246 - protein, 231 aa, Escherichia coli; identical to SEQ ID NO: 3055

SEQ ID NO: 5247 - protein, 243 aa, Escherichia coli; identical to SEQ ID NO: 2910

SEQ ID NO: 5248 - protein, 614 aa, Escherichia coli; identical to SEQ ID NO: 3301

SEQ ID NO: 5249 - protein, 232 aa, Escherichia coli; identical to SEQ ID NO: 2087

SEQ ID NO: 5250 - protein, 331 aa, Escherichia coli; identical to SEQ ID NO: 2705

SEQ ID NO: 5251 - protein, 360 aa, Escherichia coli
MMKKYLALALIAPLLISCSTTKKGDTYNEAWVKDTNGFDILMGQFAHNIENIWGFKEVVIAGPKDYVKYTDQYQTRSHINFDDGTITIETIAGTEPAAHLRRAIIKTLLMGDDPSSVDLYSDVDNITISKEPFLYGQVVDNTGQPIRWEGRASNFADYLLKNRLKSRSNGLRIIYSVTINMVPNHLDKRAHKYLGMVRQASRKYGVDESLILAIMQTESSFNPYAVSRSDALGLMQVVQHTAGKDVFRSQGKSGTPSRSFLFDPASNIDTGTAYLAMLNNVYLGGIDNPTSRRYAVITAYNGGAGSVLRVFSNDKIQAANIINTMTPGDVYQTLTTRHPSAESRRYLYKVNTAQKSYRRR

SEQ ID NO: 5252 - protein, 359 aa, Escherichia coli; identical to SEQ ID NO: 2328

SEQ ID NO: 5253 - protein, 191 aa, Escherichia coli; identical to SEQ ID NO: 2727

SEQ ID NO: 5254 - protein, 224 aa, Escherichia coli
MKGLSSLLIFSMVLPAHAGIVIYGTRIIYPAENKEVMVQLMNQGNRSSLLQAWIDDGDTSLPPEKIQVPFMLTPPVAKIGANSGQQVKIKIMPNKLPTNKESIFYLNVLDIPPNSPEQEGKNALKFAMQNRIKLFYRPVGIAPVNKATFKKLLVNRSGNGLVIKNDSANWVTISDVKANNVKVNYETIMIAPLESQSVNVKSNNANNWYLTIIDDHGNYISDKI

SEQ ID NO: 5255 - protein, 200 aa, Escherichia coli; identical to SEQ ID NO: 1801

SEQ ID NO: 5256 - protein, 250 aa, Escherichia coli
MTNLFCSAKKSTMLLALLLTTASLSAQASVTPDRTRLIFNESDKSISVTLRNNDPKMPYLAQSWMEDEQGNRISSPLTVLPPVQRIDSMMNGQVKVQGMPDINKLPADRESVFYFNVREIPPKSNKPNTLQIALQTRIKLFWRPKALENVSMKNPWQHKVTLTRSGQEFTVNNPTPYYVVISNASAQKNGNPAAGFSPMVISPKTSVPLKVKMDSVPVLSYVNDYGARMPLYFKCGGDTCQVDVEQSRKG

SEQ ID NO: 5257 - protein, 331 aa, Escherichia coli; identical to SEQ ID NO: 2700

SEQ ID NO: 5258 - protein, 240 aa, Escherichia coli
MILLFTLWSFGSYAVQFVYRIDSRPPDVVFRDGFRSHGNNRNLQQHIRGDSCAAGSRDSAFIATTSDISETYNIARQYFSNSLFHGQLYRYRIRTNNVFYSLAPSVQLLRERGVTFSRFEEIMMREQSEIVADGRIPTENIAEAVQLNYERTTGIVSDGHGTTNSRFLNIPTDSNPGIIPNIPVPQVSVRQRINAFGSLITACFSLRGSRDEENGENVDVVTFYDARPVLKTLLVSTSIR

SEQ ID NO: 5259 - protein, 118 aa, Escherichia coli [sequence omitted]

SEQ ID NO: 5260 - protein, 446 aa, Escherichia coli; identical to SEQ ID NO: 2179

SEQ ID NO: 5261 - protein, 732 aa, Escherichia coli; identical to SEQ ID NO: 4926

SEQ ID NO: 5262 - protein, 213 aa, Escherichia coli; identical to SEQ ID NO: 2232

SEQ ID NO: 5263 - protein, 236 aa, Escherichia coli
MQTTRTPYSISFMATVLLLLLFACHSTVANAAVALGATRVIYPANQKQVLLPVTNNDPASVYLIQSWIENAGDQKDTQFVITPPLFSMQGKKENTLRIINATNHQLPGDRESLFWVNVKAIPAMEKDQKNENTLQLAIISRIKMFYRPTNLAMAPEEAPAMLRFRRSGSKLTLINPTPYFITVTNMKAGNSNLPNTMVPPKDEVSVDIPHAATGDISFQTINDYGALTPRIKATMQ

SEQ ID NO: 5264 - protein, 567 aa, Escherichia coli
MKIKLRITIILISVLCIFNGLLTPGAYAAAANGYVANKENLRSFFETVSSYAGKPTIVSKLAMKKQISGNFDLTEPYALIERLSAQMGLIWYDDGKAIYIYDSSEMRNALINLRKVSTNEFNNFLKKSGLYNSRYEIKGGGNGTFYVSGPPVYVDLVVNAAKLMEQNSDGIEIGRNKVGIIHLVNTFVNDRTYELRGEKIIIPGMAKVLSTLLNNNIKQSTGVNVLSEISSRQQLKNVSRMPPFPGAEEDDDLQVEKIISTAGAPETDDIQIIAYPDTNSLLVKGTVSQVDFIEKLVATLDIPKRHIELSLWIIDIDKTDLEQLGADWSGTIKIGSSLSASFNNSGSISTLDGTQFIATIQALAQKRRAAVVARPVVLTQENIPAIFDNNRTFYTKLVGERTAELDEVTYGTMISVLPRFAARNQIELLLNIEDGNEINSDKTNVDDLPQVGRTLISTIARVPQGKSLLIGGYTRDTNTYESRKIPILGSIPFIGKLFGYEGTNANNIVRVFLIEPREIDERMMNNANEAAVDARAITQQMAKNKEINDELLQKWIKTYLNREVVGG

SEQ ID NO: 5265 - protein, 241 aa, Escherichia coli; identical to SEQ ID NO: 2922

SEQ ID NO: 5266 - protein, 432 aa, Escherichia coli; identical to SEQ ID NO: 2026

SEQ ID NO: 5267 - protein, 366 aa, Escherichia coli
MKLKIVAVVVTGLLAANVAHAAEVYNKDGNKLDLYGKVTALRYFTDDKRDDGDKTYARLGFKGETQINDQMIGFGHWEYDFKGYNDEANGSRGNKTRLAYAGLKISEFGSLDYGRNYGVGYDIGSWTDMLPEFGGDTWSQKDVFMTYRTTGVATYRNYDFFGLIEGLNFAAQYQGKNERTDNSHLYGADYTRANGDGFGISSTYVYDGFGIGAVYTKSDRTNAQERAAANPLNASGKNAELWATGIKYDANNIYFAANYAETLNMTTYGDGYISNKAQSFEVVAQYQFDFGLRPSLAYLKSKGKDLGRYGDQDMIEYIDVGATYFFNKNMSTYVDYKINLIDESDFTRAVDIRTDNIVATGITYQF

SEQ ID NO: 5268 - protein, 229 aa, Escherichia coli
MKSVLLLLTVLFVQSVEAGIMPASSRMIYRDGDREKTLMLVNTNDYPVLVQSWVDNGEGSPEAASPPFVVLPPVFRLAARRTQGLRIIYNHDPLPQDRESAFWLNLYEMPPETPHQDPTHLTLAMNTQLKIFYRPKSVTMTPEEAMRKISWHLGNDGSSSYIELNNPTPLNISFTSISIGATKVQQESDMMIKPFSQRRYWLASNNVSGIVTATYLDDNGAQIKQQLAQ

SEQ ID NO: 5269 - protein, 89 aa, Escherichia coli; identical to SEQ ID NO: 2837

SEQ ID NO: 5270 - protein, 236 aa, Escherichia coli
MFTRCYLNHNLMKSLPLLFVTLFSLHSEASIVITGTRVIYPAGEHSVSVKLNNNGKLPVLIQSWVDNGDPDKKPDDSQAPFIITPPINRVDPGKGQTLRVTFTDLPLPTDRESVFWLNVLEIPTRYEPKSNDNYLQVAFRTRIKLFYRPENLPGKSLEAPNTLIWKISSGQLMASNNSAWNVSLSSISVCGKKVEGKMVSPRGSEIFPLKVSPGMRVSFEAVNDYGAIMKKTATVQ

SEQ ID NO: 5271 - protein, 402 aa, Escherichia coli; identical to SEQ ID NO: 4768

SEQ ID NO: 5272 - protein, 747 aa, Escherichia coli; identical to SEQ ID NO: 2072

SEQ ID NO: 5273 - protein, 200 aa, Escherichia coli; identical to SEQ ID NO: 1784

SEQ ID NO: 5274 - protein, 89 aa, Escherichia coli; identical to SEQ ID NO: 2810

SEQ ID NO: 5275 - protein, 228 aa, Escherichia coli; identical to SEQ ID NO: 3034

SEQ ID NO: 5276 - protein, 678 aa, Escherichia coli; identical to SEQ ID NO: 3014

SEQ ID NO: 5277 - protein, 729 aa, Escherichia coli
MLSTQFNRDNQYQAITKPSLLAGCIALALLPSAAFAAPATEETVIVEGSATAPDDGENDYSVTSTSAGTKMQMTQRDIPQSVTIVSQQRMEDQQLQTLGEVMENTLGISKSQADSDRALYYSRGFQIDNYMVDGIPTYFESRWNLGDALSDMALFERVEVVRGATGLMTGTGNPSAAINMVRKHATSREFKGDVSAEYGSWNKERYVADLQSPLTEDGKIRARIVGGYQNNDSWLDRYNSEKTFFSGIVDADLGDLTTLSAGYEYQRIDVNSPTWGGLPRWNTDGSSNSYDRARSTAPDWAYNDKEINKVFMTLKQRFADTWQATLNATHSEVEFDSKMMYVDAYVNKADGMLVGPYSNYGPGFDYVGGTGWNSGKRKVDALDLFADGSYELFGRQHNLMFGGSYSKQNNRYFSSWANIFPDEIGSFYNFNGNFPQTDWSPQSLAQDDTTHMKSLYAATRVTLADPLHLILGARYTNWQVDTLTYSMEKNHTTPYAGLVFDINDNWSTYASYTSIFQPQNDRDSSGKYLAPITGNNYELGLKSDWMNSRLTTTLAIFRIEQDNVAQSTGTPIPGSNGETAYKAVDGTVSKGVEFELNGAITDNWQLTFGATRYIAEDNEGNAVNPNLPRTTVKMFTSYRLPVMPELTVGGGVNWQNRVYTDTVTPYGTFRAEQSSYALVDLFTRYQVTKNFSLQGNVNNLFDKTYDTNVEGSIVYGAPRNFSITGTYQF

SEQ ID NO: 5278 - protein, 203 aa, Escherichia coli; identical to SEQ ID NO: 2201

SEQ ID NO: 5279 - protein, 696 aa, Escherichia coli; identical to SEQ ID NO: 3314

SEQ ID NO: 5280 - protein, 760 aa, Escherichia coli; identical to SEQ ID NO: 3026

SEQ ID NO: 5281 - protein, 230 aa, Escherichia coli
MDAVLSVQGASAPVKKKSFFSKFTRLNMLRLARAVIPAAVLMMFFPQLAMAAGSSGQDLMASGNTTVKATFGKDSSVVKWVVLAEVLVGAVMYMMTKNVQVLGRFCHHLCIYCCGYGRRWPLTGNKTMSGDENKLKKYRFPETLTNQSRWFGLPLDELIPAAICIGWGITTSKYLFGIGAAVLVYFGIKKLKKGRGSSWLRDLIYWYMPTDLLRGIFHNVPDSCFRQWIK

SEQ ID NO: 5282 - protein, 193 aa, Escherichia coli; identical to SEQ ID NO: 2246

SEQ ID NO: 5283 - protein, 673 aa, Escherichia coli; identical to SEQ ID NO: 3295

SEQ ID NO: 5284 - protein, 224 aa, Escherichia coli; identical to SEQ ID NO: 3035

SEQ ID NO: 5285 - protein, 351 aa, Escherichia coli; identical to SEQ ID NO: 3010

SEQ ID NO: 5286 - protein, 746 aa, Escherichia coli; identical to SEQ ID NO: 3031

SEQ ID NO: 5287 - protein, 518 aa, Escherichia coli
MKKLKINYLFIGILALLLAVALWPSIPWFGKADNRIAAIQARGELRVSTIHTPLTYNEINGKPFGLDYELAKQFADYLGVKLKVTVRQNISQLFDDLDNGNADLLAAGLVYNSERVKNYQPGPTYYSVSQQLVYKVSQYRPRTLGNLTAEQLTVAPGHVVVNDLQTLKETKFPELSWKVDDKKGSAELMEDVIEGKLDYTIADSVAISLFQRVHPELAVALDITDEQPVTWFSPLDGDNTLSAALLDFFNEMNEDGTLARIEEKYLGHGDDFDYVDTRTFLRAVDAVLPQLKPLFEKYAEEIDWRLLAAIAYQESHWDAQATSPTGVRGMMMLTKNTAQSLGITDRTDAEQSISGGVRYLQDMMSKVPESVPENERIWFALAAYNMGYAHMLDARALTAKTKGNPDSWADVKQRLPLLSQKPYYSKLTYGYARGHEAYAYVENIRKYQISLVGYLQEKEKQATEAAMQLAQDYPAVSPTELGKEKFPFLSFLSQSSSNYLTHSPSLLFSRKGSEEKQN

SEQ ID NO: 5288 - protein, 565 aa, Escherichia coli; identical to SEQ ID NO: 2669

SEQ ID NO: 5289 - protein, 362 aa, Escherichia coli; identical to SEQ ID NO: 2434

SEQ ID NO: 5290 - protein, 203 aa, Escherichia coli; identical to SEQ ID NO: 2201

SEQ ID NO: 5291 - protein, 828 aa, Escherichia coli; identical to SEQ ID NO: 2380

SEQ ID NO: 5292 - protein, 813 aa, Escherichia coli
MVLTGSGMLCTTANAEEYYFDPIMLETTKSGMQTTDLSRFSKKYAQLPGTYQVDIWLNKKKVSQKKITFTANAEQLLQPQFTVEQLRELGIKVDEIPALAEKDDDSVINSLEQIIPGTAAEFDFNHQQLNLSIPQIALYRDARGYVSPSRWDDGIPTLFTNYSFTGSDNRYRQGNRSQRQYLNMQNGANFGPWRLRNYSTWTRNDQTSSWNTISSYLQRDIKALKSQLLLGESATSGSIFSSYTFTGVQLASDDNMLPNSQRGFAPTVRGIANSSAIVTIRQNGYVIYQSNVSAGAFEINDLYPSSNSGDLEVTIEESDGTQRRFIQPYSSLPMMQRPGHLKYSATAGRYRADANSDSKEPEFAEATAIYGLNNTFTLYGGLLGSEDYYALGIGIGGTLGALGALSMDINRADTQFDNQHSFHGYQWRTQYIKDIPETNTNIAVSYYRYTNDGYFSFNEANTRNWDYNSRQKSEIQFNISQTIFDGVSLYASGSQQDYWGNNDKNRNISVGVSGQQWGVGYSLNYQYSRYTDQNNDRALSLNLSIPLERWLPRSRVSYQMTSQKDRPTQHEMRLDGSLLDDGRLSYSLEQSLDDDNNHNSSLNASYRSPYGTFSAGYSYGNDSSQYNYGVTGSVVIHPHGVTLSQYLGNAFALIDANGASGVRIQNYPGIATDPFGYAVVPYLTTYQENRLSVDTTQLPDNVDLEQTTQFVVPNRGAMVAARFNANIGYRVLVTVSDRNGKPLPFGALASNDDTGQQSIVDEGGILYLSGISSKSQSWTVRWGNQADQQCQFAFSTPDSEPTTSVLQGTAQCH

SEQ ID NO: 5293 - protein, 869 aa, Escherichia coli
MKIPTTTDIPQRYTWCLAGICYSSLAILPSFLSYAESYFNPAFLLENGTSVADLSRFERGNHQPAGVYRVDLWRNDEFIGSQDIVFESTTENTGDKSGGLMPCFNQVLLERIGLNSSAFPELAQQQNNKCINLLKAVPDATINFDFAAMRLNITIPQIALLSSAHGYIPPEEWDEGIPALLLNYNFTGNRGNGNDSYFFSELSGINIGPWRLRNNGSWNYFRGNGYHSEQWNNIGTWVQRAIIPLKSELVMGDGNTGSDIFDGVGFRGVRLYSSDNMYPDSQQGFAPTVRGIARTAAQLTIRQNGFIIYQSYVSPGAFEITDLHPTSSNGDLDVTIDERDGNQQNYTIPYSTVPILQREGRFKFDLTAGDFRSGNSQQSSPFFFQGTVLGGLPQEFTAYGGTQLSANYTAFLLGLGRNLGNWGAVSLDVTHARSQLADDSRHEGDSIRFLYAKSMNTFGTNFQLMGYRYSTQGFYTLDDVAYRRMEGYEYDYDYDGEHRDEPIIVNYHNLRFSRKDRLQLNISQSLNDFGSLYISGTHQKYWNTSDSDTWYQVGYTSSWVGISYSLSFSWNESVGIPDNERIVGLNVSVPFNVLTKRRYTRENALDRAYASFNANRNSNGQNSWLAGVGGTLLEGHNLSYHVSQGDTSNNGYTGSATANWQAAYGTLGGGYNYDRDQHDVNWQLSGGVVGHENGITLSQPLGDTNVLIKAPGAGGVRIENQTGILTDWRGYAVMPYATVYRYNRIALDTNTMGNSIDVEKNISSVVPTQGALVRANFDTRIGVRALITVTQGGKPVPFGSLVRENSTGITSMVGDDGQVYLSGAPLSGELLVQWGDGANSRCIAHYVLPKQSLQQAVTVISAVCTHPGS

SEQ ID NO: 5294 - protein, 862 aa, Escherichia coli
MSGSYSSVWAEDDIQFDSRFLELKGDTKIDLKRFSSQGYVEPGKYNLQVQLNKQPLAEEYDIYWYAGEDDVSKSYACLTPELVAQFGLKEDVAKNLQWSHDGKCLKPGQLEGVEIKADLSQSALVISLPQAYLEYTWPDWDPPSRWDDGISGIIADYSITAQTRHEENGGDDSNEISGNGTVGVNLGPWRMRADWQTNYQHTRSNDDDDEFGGDDTQKKWEWSRYYAWRALPSLKAKLALGEDYLNSDIFDGFNYVGGSVSTDDQMLPPNLRGYAPDISGVAHTTAKVTVSQMGRVIYETQVPAGPFRIQDLGDSVSGTLHIRIEEQNGQVQEYDISTASMPYLTRPGQVRYKIMMGRPQEWGHHVEGGFFSGAEASWGIANGWSLYGGALGDENYQSAALGVGRDLSTFGAVAFDVTHSHTKLDKDTAYGKGSLDGNSFRVSYSKDFDQLNSRVTFAGYRFSEENFMTMSEYLDASDSEMVRTGNDKEMYTATYNQNFRDAGVSVYLNYTRHTYWDREEQTNYNIMLSHYFNMGSIRNMSVSLTGYRYEYDNRADKGMYISLSMPWGDNSTVSYNGNYGSGTDSSQVGYFSRVDDATHYQLNIGTSDKHTSVDGYYSHDGSLAQVDLSANYHEGQYTSAGLSLQGGATLTTHGGALHRTQNMGGTRLLIDADGVADVPVEGNGAAVYTNMFGKAVVSDVNNYYRNQAYIDLNKLPENAEATQSVVQATLTEGAIGYRKFAVISGQKAMAVLRLQDGSHPPFGAEVKNDNEQTVGLVDDDGSVYLAGVKPGEHMSVFWSGVAHCDINLPDPLPADLFNGLLLPCQHKGNVAPVVPDDIKPVIQEQTQQVTPTDPPVSVSANQ

SEQ ID NO: 5295 - protein, 789 aa, Escherichia coli
MKTFNLSQFETDGQLPVGKYSLSTLINNKRTPIHLDLQWVLIDNQTAVCVTPEQLTLLGFTDEFIEKTQQNLIDGCYPIEKEKQITTYLDKGKMQLSISAPQAWLKYKDANWTPPELWNHGIAGAFLDYNLYASHYAPHQGDNSQNISSYGQAGVNLGAWRLRTDYQYDQSFNNGKSQATNLDFPRIYLFRPIPAMNAKLTIGQYDTESSIFDSFHFSGISLKSDENMLPPDLRGYAPQITGVAQTNAKVTVSQNNHIIYQENVPPGPFAITNLFNTLQGQLDVKVEEEDGRVTQWQVASNSIPYLTRKGQIRYTTAMGKPTSVGGDSLQQPFFWTGEFSWGWLNNVSLYGGSVLTNRDYQSLAAGVGFNLNSLGSLSFDVTRSDAQLHNQDKETGYSYRANYSKRFESTGSQLTFAGYRFSDKNFVTMNEYINDTNHYTNYQNEKESYIVTFNQYLESLRLNTYVSLARNTYWDASSNVNYSLSLSRDFDIGPLKNVSTSLTFSRINWEEDNQDQLYLNISIPWGTSRTLSYGMQRNQDNEISHTASWYDSSDRNNSWSVSASGDNDEFKDMKASLRASYQHNTENGRLYLSGTSQRDSYYSLNASWNGSFTATRHGAAFHDYSGSADSRFMIDADGTEDIPLNNKRAVTNRYGIGVIPSVSSYITTSLSVDTRNLPENVDIENSVITTTLTEGAIGYAKLDTRKGYQIIGVIRLADGSHPPLGISVKDETSHKELGLVADGGFVYLNGIQDDNKLALRWGDKSCFIQPPNSSNLTTGTAILPCISQN

SEQ ID NO: 5296 - protein, 856 aa, Escherichia coli
MAGFFVRLVVACAFAAQAPLSSADLYFNPRFLADDPQAVADLSRFENGQELPPGTYRVDIYLNNGYMATRDVTFNTGDSEQGIVPCLTRAQLASMGLNTASVAGMNLLADDACVPLTTMVQDATAHLDVGQQRLNLTIPQAFMSNRARGYIPPELWDPGINAGLLNYNFSGNSVQNRIGGNSHYAYLNLQSGLNIGAWRLRDNTTWSYNSSDRSSGSKNKWQHINTWLERDIIPLRSRLTLGDGYTQGDIFDGINFRGAQLASDDNMLPDSQRGFAPVIHGIARGTAQVTIKQNGYDIYNSTVPPGPFTINDIYAAGNSGDLQVTIKEADGSTQIFTVPYSSVPLLQREGHTRYSITAGEYRSGNAQQEKPRFFQSTLLHGLPAGWTIYGGTQLADRYRAFNFGIGKNMGALGALSVDMTQANSTLPDDSQHDGQSVRFLYNKSLNESGTNIQLVGYRYSTSGYFNFADTTYSRMNGYNIETQDGVIQVKPKFTDYYNLAYNKRGKLQLTVTQQLGRTSTLYLSGSHQTYWGTSNVDEQFQAGLNTAFEDINWTLSYSLTKNAWQKGRDQMLALNVNIPFSHWLRSDSKSQWRHASASYSMSHDLNGRMTNLAGVYGTLLEDNNLSYSVQTGYAGGGDGNSGSTGYATLNYRGGYGNANIGYSHSDDIKQLYYGVSGGVLAHANGVTLGQPLNDTVVLVKAPGAKDAKVENQTGVRTDWRGYAVLPYATEYRENRVALDTNTLADNVDLDNAVANVVPTRGAIVRAEFKARVGIKLLMTLTHNNKPLPFGAMVTSESSQSSGIVADNGQVYLSGMPLAGKVQVKWGEEENAHCVANYQLPPESQQQLLTQLSAECR

SEQ ID NO: 5297 - protein, 793 aa, Escherichia coli
MLKKTLLAYTIGFAFSPPANADGIEIAAVDFDRETLKSLGVDPNISHYFSRSARFLPGEYSLIVSVNGEKKGNIATRFDENGDICLDQAFLQQAGLKIPSEEKNGCYDYILSYPGTTITPLPNQEALDIIVSPQAIIPIGLDLTNAATGGTAALLNYSLMSSRAEFSNGSSDYSQAALEGGININDWMLRSHQFLTQTNGTFSNQNSSTYLQRTFTDLKTLMRAGEVNLNNSVLEGASIYGIEIAPDNALQTSGSGVQVTGIANTSQARVEIRQQGVLIHSILVPAGAFTIPDVPVRNGNSDLNVTVVETDGSSHNYIVPSTLFNQHVESFQGYRFAIGRGDDDYDESPWVISASSGWNLTRWSAMNGGVIVAENYQAASIRSSLVPLPDLTVSSQISTSQDTKDSLQGQKYRLDANYNLPFSLGLTTSLTRSDRHYRELSEAIDDDYTDPTKSTYALGLNWSNSILGGFNISGYKTYSYDGDNDSSNLNINWNKAFKHATVSVNWQHQLSASENNEDDGDLFYVNISIPFGRSNTATLYTRHDDHKTHYGTGVMGVVSDEMSYYVNAERDHDERETSLNGSISSNLHYTQVSLAAGASGSDSRTYNGTMSGGIAVHDQGVTFSPWTINDTFAIAKMDNNIAGVRITSQAGPVWTDFRGNAVIPSIQPWRTSGVEIDTASLPKNVDIGNGTKMIKQGRGAVGKVGFSAITQRRALLNITLSDGKKLPRGVAIEDSEGNYLTTSVDDGVVFLNNIKPDMVLDIKDEQQSCRIHLTFPEDAPKDVFYETATGECQ

SEQ ID NO: 5298 - protein, 207 aa, Escherichia coli; identical to SEQ ID NO: 2211

SEQ ID NO: 5299 - protein, 851 aa, Escherichia coli
MPSFIGGLVVFVSAAFNAQAETWFDPAFFKDDPSMVADLSRFEKGQKITPGVYRVDIVLNQTIVDTRNVNFVEITPEKGIAACLTTESLDAMGVNTDAFPAFKQLDKQACVPLAEIIPDASVTFNVNKLRLEISVPQIAIKSNARGYVPPERWDEGINALLLGYSFSGANSIHSSADSDSGDSYFLNLNSGVNLGPWRLRNNSTWSRSSGQTAEWKNLSSYLQRAVIPLKGELTVGDDYTAGDFFDSVSFRGVQLASDDNMLPDSLKGFAPVVRGIAKSNAQITIKQNGYTIYQTYVSPGAFEISDLYSTSSSGDLLVEIKEADGSVNSYSVPFSSVPLLQRQGRIKYAVTLAKYRTNSNEQQESKFAQATLQWGGPWGTTWYGGGQYAEYYRAAMFGLGFNLGDFGAISFDATQAKSTLADQSEHKGQSYRFLYAKTLNHLGTNFQLMGYRYSTSGFYTLSDTMYKHMDGYEFNDGDDEDTPMWSRYYNLFYTKRGKLQVNISQQLGEYGSFYLSGSQQTYWHTDQQDRLLQFGYNTQIKDLSLGISWNYSKSRGQPDADQVFALNFSLPLNLLLPRSNDSYTRKKNYAWMTSNTSIDNEGHTTQNLGLTETLLDDGNLSYSVQQGYNSEGKTANGSASMDYKGAFADARVGYNYSDNGSQQQLNYALSGSLVAHSQGITLGQSLGETNVLIAAPGAENTRVANSTGLKTDWRGYTVVPYAISYRENRIALDAASLKRNVDLENAVVNVVPTKGALVLAEFNAHAGARVLMKTSKQGIPLRFGAIATLDGVQANSGIIDDDGSLYMAGLPAKGTISVRWGEAPDQICHINYELTEQQINSAITRMDAICR

SEQ ID NO: 5300 - protein, 368 aa, Escherichia coli; identical to SEQ ID NO: 2374

SEQ ID NO: 5301 - protein, 831 aa, Escherichia coli
MQELPMLRMTPLASAIVALLLGIEAYAAEETFDTHFMIGGMKDQQVANIRLDDNQPLPGQYDIDIYVNKQWRGKYEIIVKDNPQETCLSREVIKRLGINSDNFASGKQCLTFEQLVQGGSYSWDIGVFRLDFSVPQAWVEELESGYVPPENWERGINAFYTSYYVSQYYSDYKASGNNKSTYVRFNSGLNLLEWQLHSDASFSKTNNNPGVWKSNTLYLERGFAQLLGTLRVGDMYTSSDIFDSVRFSGVRLFRDMQMLPNSKQNFTPRVQGIAQSNALVTIEQNGFVVYQKEVPPGPFAITDLQLAGGGADLDVSVKEADGSVTTYLVPYAAVPNMLQPGVSNYDFAAGRSHIEGASKQSDFVQAGYQYGFNNLLTLYGGSMVANNYYAFTLGTGWNTRIGAISVDATKSHSKQDNGDVFDGQSYQIAYNKFVSQTSTRFGLAAWRYSSRDYRTFNDHVWANNKDNYRRDENDIYDIADYYQNDFGRKNSFSANMSQSLPEGWGSVSLSTLWRDYWGRSGSSKDYQLSYSNNWRRISYTLAASQAYDENHHEEKRFNIFISIPFDWGDDVTTPRRQIYMSNSTTFDDQGFASNNTGLSGTVGSRDQFNYGVNLSYQHQGNETTAGANLTWNAPVATVNGSYSQSSTYRQAGASVSGGIVAWSGSVNLANRLSETFAVMNAPGIKDAYVNGQKYRTTNRNGVVIYDGMTPYQENHLMLDVSQSDSEAELRGNRKIAAPYRGAVVLVNFDTDQRKPWFIKALRADGQPLMFGYEVNDIHGHNIGVVGQGSQLFIRTNEVPPSVNVAIDKQQGLSCTITFGKEIDESRNYICQ

SEQ ID NO: 5302 - protein, 897 aa, Escherichia coli
MKLNIFTKSMIGMGLVCSALPALAMEAWNNQQGGNKYQVIFDGKIYENAWWVSSTNCPGKAKANDATNPWRLKRTATAAEISQFGNTLSCEKSGSSSSSNSNTPASNTPANGGSATPAQGTVPSNSSVVAWNKQQGGQTWYVVFNGAVYKNAWWVASSNCPGDAKSNDASNPWRYVRAATATEISETSNPQSCTSAPQPSPDVKPAPDVKPAPDVQPAPADKSNDNYAVVAWKGQEGSSTWYVIYNGGIYKNAWWVGAANCPGDAKENDASNPWRYVRAATATEISQYGNPGSCSVKPDNNGGAVTPVDPTPETPVTPTPDNSEPSTPADSVNDYSLQAWSGQEGSEIYHVIFNGNVYKNAWWVGSKDCPRGTSAENSNNPWRLERTATAAELSQYGNPTTCEIDNGGVIVADGFQASKAYSADSIVDYNDAHYKTSVDQDAWGFVPGGDNPWKKYEPAKAWSASTVYVKGDRVVVDGQAYEALFWTQSDNPALVANQNATGSNSRPWKPLGKAQSYSNEELNNAPQFNPETLYASDTLIRFNGVNYISQSKVQKVSPSDINPWRVFVDWTGTKERVGTPKKAWPKHVYAPYVDFTLNTIPDLAALAKNHNVNHFTLAFVVSKDANTCLPTWGTAYGMQNYAQYSKIKALREAGGDVMLSIGGANNAPLAASCKNVDDLMQHYYDIVDNLNLKVLDFDIEGTWVADQASIERRNLAVKKVQDKWKSEGKDIAIWYTLPILPTGLTPEGMNVLSDAKAKGVELAGVNVMTMDYGNAICQSANTEGQNIHGKCATSAIANLHSQLKGLHPNKSDAEIDAMMGTTPMVGVNDVQGEVFYLSDARLVMQDAQKRNLGMVGIWSIARDLPGGTNLSPEFHGLTKEQAPKYAFSEIFAPFTKQ

SEQ ID NO: 5303 - protein, 274 aa, Escherichia coli; identical to SEQ ID NO: 2309

SEQ ID NO: 5304 - protein, 431 aa, Escherichia coli; identical to SEQ ID NO: 3408

SEQ ID NO: 5305 - protein, 233 aa, Escherichia coli; identical to SEQ ID NO: 2006

SEQ ID NO: 5306 - protein, 266 aa, Escherichia coli; identical to SEQ ID NO: 1894

SEQ ID NO: 5307 - protein, 729 aa, Escherichia coli; identical to SEQ ID NO: 2074

SEQ ID NO: 5308 - protein, 213 aa, Escherichia coli; identical to SEQ ID NO: 2232

SEQ ID NO: 5309 - protein, 541 aa, Escherichia coli; identical to SEQ ID NO: 4657

SEQ ID NO: 5310 - protein, 236 aa, Escherichia coli; identical to SEQ ID NO: 2726

SEQ ID NO: 5311 - protein, 517 aa, Escherichia coli; identical to SEQ ID NO: 3116

SEQ ID NO: 5312 - protein, 191 aa, Escherichia coli; identical to SEQ ID NO: 2727

SEQ ID NO: 5313 - protein, 331 aa, Escherichia coli; identical to SEQ ID NO: 2705

SEQ ID NO: 5314 - protein, 733 aa, Escherichia coli
MAQALAAEGQTNADDTLVVEASTPSLYAPQQSADPKFSRPVADTTRTMTVISEQVIKDQGATNLTDALKNVPGVGAFFAGENGNSTTGDAIYMRGADTSNSIYIDGIRDIGSVSRDTFNTEQVEVIKGPSGTDYGRSAPTGSINMISKQPRNDSGIDASASIGSAWFRRGTLDVNQVIGDTTAVRLNVMGEKTHDAGRDKVKNERYGVAPSVAFGLGTANRLYLNYLHVTQHNTPDGGIPTIGLPGYSAPSAGTAALNHSGKVDTHNFYGTDSDYDDSTTDTATMRFEHDINDNTTIRNTTRWSRVKQDYLMTAIMGGASNITQPTSDVNSWTWSRTANTKDVSNKILTNQTNLTSTFYTGSIGHDVSTGVEFTRETQTNYGVNPVTLPAVNIYHPDSSIHPGGLTRNGANANGQTDTFAIYAFDTLQITRDFELNGGIRLDNYHTEYDSATACGGSGRGAITCPTGVAKGSPVTTVDTAKSGNLMNWKAGALYHLTENGNVYINYAVSQQPPGGNNFALAQSGSGNSANRTDFKPQKANTSEIGTKWQVLDKRLLLTAALFRTDIENEVEQNDDGTYSQYGKKRVEGYEISVAGNITPAWQVIGGYTQQKATIKNGKDVAQDGSSSLPYTPEHAFTLWSQYQATDDISVGAGARYIGSMHKGSDGAVGTPAFTEGYWVADAKLGYRVNRNLDFQLNVYNLFDTDYVASINKSGYRYHPGEPRTFLLTANMHF

SEQ ID NO: 5315 - protein, 865 aa, Escherichia coli; identical to SEQ ID NO: 2167

SEQ ID NO: 5316 - protein, 774 aa, Escherichia coli; identical to SEQ ID NO: 2066

SEQ ID NO: 5317 - protein, 650 aa, Escherichia coli; identical to SEQ ID NO: 2146

SEQ ID NO: 5318 - protein, 663 aa, Escherichia coli; identical to SEQ ID NO: 1910

SEQ ID NO: 5319 - protein, 700 aa, Escherichia coli; identical to SEQ ID NO: 2784

SEQ ID NO: 5320 - protein, 386 aa, Escherichia coli; identical to SEQ ID NO: 3072

SEQ ID NO: 5321 - protein, 204 aa, Escherichia coli; identical to SEQ ID NO: 2957

SEQ ID NO: 5322 - protein, 367 aa, Escherichia coli; identical to SEQ ID NO: 2433

SEQ ID NO: 5323 - protein, 746 aa, Escherichia coli; identical to SEQ ID NO: 4083

SEQ ID NO: 5324 - protein, 353 aa, Escherichia coli; identical to SEQ ID NO: 3376

SEQ ID NO: 5325 - protein, 235 aa, Escherichia coli; identical to SEQ ID NO: 4365

SEQ ID NO: 5326 - protein, 231 aa, Escherichia coli; identical to SEQ ID NO: 2794

SEQ ID NO: 5327 - protein, 230 aa, Escherichia coli; identical to SEQ ID NO: 3222

SEQ ID NO: 5328 - protein, 161 aa, Escherichia coli; identical to SEQ ID NO: 2582

SEQ ID NO: 5329 - protein, 478 aa, Escherichia coli; identical to SEQ ID NO: 2404

SEQ ID NO: 5330 - protein, 554 aa, Escherichia coli
MALIPACIFLCFAALSVQAEETPVTPQPPDILLGPLFNDVQNAKLFPDQKTFADAVPNSDPLMILADYRMQQNQSGFDLRHFVNVNFTLPKEGEKYVPPEGQSLREHIDGLWPVLTRSTENTEKWDSLLPLPEPYVVPGGRFREVYYWDSYFTMLGLAESGHWDKVANMVANFAHEIDTYGHIPNGNRSYYLSRSQPPFFALMVELLAQHEGDAALKQYLPQMQKEYAYWMDGVENLQAGQQEKRVVKLQDGTLLNRYWDDRDTPRPESWVEDIATAKSNPNRPATEIYRDLRSAAASGWDFSSRWMDNPQQLNTLRTTSIVPVDLNSLMFKMEKILARASKAAGDNAMANQYETLANARQKGIEKYLWNDQQGWYADYDLKSHKVRNQLTAAALFPLYVNAAAKDRANKMATATKTHLLQPGGLNTTSVKSGQQWDAPNGWAPLQWVATEGLQNYGQKEVAMDISWHFLTNVQHTYDREKKLVEKYDVSTTGTGGGGGEYPLQDGFGWTNGVTLKMLDLICPKEQPCDNVPATRPTVKSATTQPSTKEAQPTP

SEQ ID NO: 5331 - protein, 518 aa, Escherichia coli; identical to SEQ ID NO: 2349

SEQ ID NO: 5332 - protein, 614 aa, Escherichia coli; identical to SEQ ID NO: 1888

SEQ ID NO: 5333 - protein, 230 aa, Escherichia coli; identical to SEQ ID NO: 2580

SEQ ID NO: 5334 - protein, 446 aa, Escherichia coli [sequence omitted]

SEQ ID NO: 5335 - protein, 360 aa, Escherichia coli; identical to SEQ ID NO: 3354

SEQ ID NO: 5336 - protein, 250 aa, Escherichia coli; identical to SEQ ID NO: 2761

SEQ ID NO: 5337 - protein, 594 aa, Escherichia coli
MTCLFAPSLTLGETDFSSNIFDGFSYTGAALASDDRMLPWELRGYAPQISGIAQTNATVTISQSGRVIYQKKVPPGPFIIDDLNQSVQGTLDVKVTEEDGRVNNFQVSAASTPFLTRQGQVRYKLAAGQPRPSMSHQTENETFFSNEVSWGMLSNTSLYGGLLISDDDYHSAAMGIGQNMLWLGALSFDVTWASSHFDTQQDERGLSYRFNYSKQVDATNSTISLAAYRFSDRHFHSYANYLDHKYNDSDAQDEKQTISLSVGQPITPLNLNLYANLLHQTWWNADASTTANITAGFNVDIGDWRDISISTSFNTTHYEDKDRDNQIYLSISLPFGNGGRVGYDMQNSSHSTIHRMSWNDTLDERNSWGMSAGLQSDRPDNGAQVSGNYQHLSSAGEWDISGTYAASDYSSVSSSWSGSFTATQYGAAFHRRSSTNEPRLMVSTDGVADIPVQGNLDYTNHFGIAVVPLISSYQPSTVAVNMNDLPDGVTVAENVIKETWIEGAIGYKSLASRSGKDVNVIIRNASGQFPPLGADIRQDDSGISVGMVGEEGHAWLSGVAENQLFTVVWGEQSCIIHLPERLEDTTKRLILPCH

SEQ ID NO: 5338 - protein, 208 aa, Escherichia coli; identical to SEQ ID NO: 1949

SEQ ID NO: 5339 - protein, 432 aa, Escherichia coli; identical to SEQ ID NO: 2026

SEQ ID NO: 5340 - protein, 747 aa, Escherichia coli; identical to SEQ ID NO: 2072

SEQ ID NO: 5341 - protein, 111 aa, Escherichia coli; identical to SEQ ID NO: 3153

SEQ ID NO: 5342 - protein, 784 aa, Escherichia coli; identical to SEQ ID NO: 2244

SEQ ID NO: 5343 - protein, 362 aa, Escherichia coli; identical to SEQ ID NO: 2434

SEQ ID NO: 5344 - protein, 221 aa, Escherichia coli; identical to SEQ ID NO: 3141

SEQ ID NO: 5345 - protein, 128 aa, Escherichia coli
MKLMRYLNTKNIIAAGVLLSCMSSIAWGAIIPDRTRIIMNESDKGEALKLTNQSKNLPYLAQTWIEDTKGNKSRDFIVTVPPMVRLNPSEQIQIRMITQEKIAQLPKDRETLFYFNVREIPPKTDKKM

SEQ ID NO: 5346 - protein, 241 aa, Escherichia coli; identical to SEQ ID NO: 2922

SEQ ID NO: 5347 - protein, 169 aa, Escherichia coli; identical to SEQ ID NO: 4636

SEQ ID NO: 5348 - protein, 192 aa, Escherichia coli
MKSKKYIIILLALAAIAGLGTHAAWSSNGLPRIDNKTLARLAQQHPVVVLFRHAERCDRSTNQCLSDKTGITVKGTQDARELGNAFSADIPDFDLYSSNTVRTIQSATWFSAGKKLTVDKRLLQCGNEIYSAIKDLQSKAPDKNIVIFTHNHCLTYIAKDKRDATFKPDYLDGLVMHVEKGKVYLDGEFVNH

SEQ ID NO: 5349 - protein, 121 aa, Escherichia coli
MDAVLSVQGASAPVKKKSFFSKFTRLNMLRLARAVIPAAVLMMFFPQLAMAAGSSGQDLMASGNTTVKATFGKDSSVVKWVVLAEVLVGAVMYMMTKNVKFLAGFAIISVFIAVGMAVVGL

SEQ ID NO: 5350 - protein, 721 aa, Escherichia coli
MKTQITFAALLPALASFIPLHAHASSTSEDEMIVTGNTAADTTDSAAGAGFKTNDIDVGPLGTKSWIETPYSSTTVTKEMIENQQAQSVSEMLKYSPSTQMQARGGMDVGRPQSRGMQGSVVANSRLDGLNIVSTTAFTVEMLERMDVLNSLTGALYGPASPAGQFNFVAKRPTEETLRKVTLGYQSRSAFTGHADLGGHFDENKRFGYRVNLLDQEGEGNVDDSTLRRKLVSVALDWNIQPGTQLQLDASHYEFIQKGYVGSFNYGPNVKLPSAPNPKDKNLALSTAGNDLTTDTISTRLIHYFNDDWSMNAGVGWQQADRAMRSVSSKILNNQGDISRSMKDSTAAGRFRVLSNTAGLNGHIDTGSIGHDLSLSTTGYVWSLYSAKGTGSSYSWGTTNMYHPDAIDEQGDGKIRTGGPRYRSSVNTQQSVTLGDTVTFTPQWSAMFYLSQSWLQTKNYDKHGNQTNQVDENGLSPNAALMYKITPNTMAYVSYADSLEQGGTAPTDESVKNAGQTLNPYRSKQYEVGLKSDIGEMNLGAALFRLERPFAYLDTDNVYKEQGNQVNNGLELTAAGNVWQGLNIYSGVTFLDPKLKDTANASTSNKQVVGVPKVQANLLAEYSLPSIPEWVYSANVHYTGKRAANDTNTSYASSYTTWDLVTRYTTKVSNVPTTFRVVVNNVFDKHYWASIFPSGTDGDNGSPSAFIGGGREVRASVTFDF

SEQ ID NO: 5351 - protein, 242 aa, Escherichia coli; identical to SEQ ID NO: 2697

SEQ ID NO: 5352 - protein, 122 aa, Escherichia coli; identical to SEQ ID NO: 2915

SEQ ID NO: 5353 - protein, 865 aa, Escherichia coli; identical to SEQ ID NO: 2167

SEQ ID NO: 5354 - protein, 897 aa, Escherichia coli; identical to SEQ ID NO: 1908

SEQ ID NO: 5355 - protein, 820 aa, Escherichia coli
SGNIGANPVIIIGCASAYAVEFNKDLIEAEDRENVNLSQFETDGQLPVGKYSLSTLINNKRTPIHLDLQWVLIDNQTAVCVTPEQLTLLGFTDEFIEKTQQNLIDGCYPIEKEKQITTYLDKGKMQLSISAPQAWLKYKDANWTPPELWNHGIAGAFLDYNLYASHYAPHQGDNSQNISSYGQAGVNLGAWRLRTDYQYDQSFNNGKSQATNLDFPRIYLFRPIPAMNAKLTIGQYDTESSIFDSFHFSGISLKSDENMLPPDLRGYAPQITGVAQTNAKVTVSQNNRIIYQENVPPGPFAITNLFNTLQGQLDVKVEEEDGRVTQWQVASNSIPYLTRKGQIRYTTAMGKPTSVGGDSLQQPFFWTGEFSWGWLNNVSLYGGSVLTNRDYQSLAAGVGFNLNSLGSLSFDVTRSDAQLHNQDKETGYSYRANYSKRFESTGSQLTFAGYRFSDKNFVTMNEYINDTNHYTNYQNEKESYIVTFNQYLESLRLNTYVSLARNTYWDASSNVNYSLSLSRDFDIGPLKNVSTSLTFSRINWEEDNQDQLYLNISIPWGTSRTLSYGMQRNQDNEISHTASWYDSSDRNNSWSVSASGDNDEFKDMKASLRASYQHNTENGRLYLSGTSQRDSYYSLNASWNGSFTATRHGAAFHDYSGSADSRFMIDADGTEDIPLNNKRAVTNRYGIGVIPSVSSYITTSLSVDTRNLPENVDIENSVITTTLTEGAIGYAKLDTRKGYQIIGVIRLADGSHPPLGISVKDETSHKELGLVADGGFVYLNGIQDDNKLALRWGDKSCFIQPPNSSNLTTGTAILPCISQN

SEQ ID NO: 5356 - protein, 793 aa, Escherichia coli; identical to SEQ ID NO: 2768

SEQ ID NO: 5357 - protein, 866 aa, Escherichia coli; identical to SEQ ID NO: 2004

SEQ ID NO: 5358 - protein, 578 aa, Escherichia coli
MPDHSLFRLRILPWCIALAMSGSYSSVWAEDDIQFDSRFLELKGDTKIDLKRFSSQGYVEPGKYNLQVQLNKQPLAEEYDIYWYAGEDDVSKSYACLTPELVAQFGLKEDVAKNLQWSHDGKCLKPGQLEGVEIKADLSQSALVISLPQAYLEYTWPDWDPPSRWDDGISGIIADYSITAQTRHEENGGDDSNEISGNGTVGVNLGPWRMRADWQTNYQHTRSNDDDDEFGGDDTQKKWEWSRYYAWRALPSLKAKLALGEDYLNSDIFDGFNYVGGSVSTDDQMLPPNLRGYAPDISGVAHTTAKVTVSQMGRVIYETQVPAGPFRIQDLGDSVSGTLHIRIEEQNGQVQEYDISTASMPYLTRPGQVRYKIMMGRPQEWGHHVEGGFFSGAEASWGIANGWSLYGGALGDENYQSAALGVGRDLSTFGAVAFDVTHSHTKLDKDTAYGKGSLDGNSFRVSYSKDFDQLNSRVTFAGYRFSEENFMTMSEYLDASDSEMVRTGNDKEMYTATYNQNFRDAGVSVYLNYTRHTYWDREEQTNYNIMLSHYFNMGSIRNMSVSLTGYRYEYDNRADKGM

SEQ ID NO: 5359 - protein, 368 aa, Escherichia coli; identical to SEQ ID NO: 2374

SEQ ID NO: 5360 - protein, 878 aa, Escherichia coli; identical to SEQ ID NO: 2077

SEQ ID NO: 5361 - protein, 207 aa, Escherichia coli; identical to SEQ ID NO: 2211

SEQ ID NO: 5362 - protein, 815 aa, Escherichia coli; identical to SEQ ID NO: 2698

SEQ ID NO: 5363 - protein, 266 aa, Escherichia coli; identical to SEQ ID NO: 1894

SEQ ID NO: 5364 - protein, 161 aa, Escherichia coli; identical to SEQ ID NO: 2582

SEQ ID NO: 5365 - protein, 838 aa, Escherichia coli; identical to SEQ ID NO: 2795

SEQ ID NO: 5366 - protein, 867 aa, Escherichia coli; identical to SEQ ID NO: 2581

SEQ ID NO: 5367 - protein, 826 aa, Escherichia coli; identical to SEQ ID NO: 2758

SEQ ID NO: 5368 - protein, 747 aa, Escherichia coli; identical to SEQ ID NO: 2072

SEQ ID NO: 5369 - protein, 203 aa, Escherichia coli; identical to SEQ ID NO: 2015

SEQ ID NO: 5370 - protein, 432 aa, Escherichia coli; identical to SEQ ID NO: 2026

SEQ ID NO: 5371 - protein, 678 aa, Escherichia coli; identical to SEQ ID NO: 2231

SEQ ID NO: 5372 - protein, 650 aa, Escherichia coli; identical to SEQ ID NO: 2146

SEQ ID NO: 5373 - protein, 230 aa, Escherichia coli; identical to SEQ ID NO: 2580

SEQ ID NO: 5374 - protein, 249 aa, Escherichia coli; identical to SEQ ID NO: 2793

SEQ ID NO: 5375 - protein, 518 aa, Escherichia coli; identical to SEQ ID NO: 2349

SEQ ID NO: 5376 - protein, 729 aa, Escherichia coli; identical to SEQ ID NO: 2074

SEQ ID NO: 5377 - protein, 232 aa, Escherichia coli; identical to SEQ ID NO: 2087

SEQ ID NO: 5378 - protein, 478 aa, Escherichia coli; identical to SEQ ID NO: 2404

SEQ ID NO: 5379 - protein, 242 aa, Escherichia coli; identical to SEQ ID NO: 2697

SEQ ID NO: 5380 - protein, 430 aa, Escherichia coli; identical to SEQ ID NO: 2617

SEQ ID NO: 5381 - protein, 331 aa, Escherichia coli
MKKPVVIGLAVVVLAAVVAGGYWWYQSRQDNGLTLYGNVDIRTVNLSFRVGGRVESLAVDEGDAIKAGQVLGELDHKPYEIALMQAKAGVSVAQAQYDLMLAGYRNEEIAQAAAAVKQAQAAYDYAQNFYNRQQGLWKSRTISANDLENARSSRDQAQATLKSAQDKLRQYRSGNREQDIAQAKASLEQAQAQLAQAELNLQDSTLIAPSDGTLLTRAVEPGTVLNEGGTVFTVSLTRPVWVRAYVDERNLDQAQPGRKVLLYTDGRPDKPYHGQIGFVSPTAEFTPKTVETPDLRTDLVYRLRIVVTDADDALRQGMPVTVQFGDEAGHE

SEQ ID NO: 5382 - protein, 784 aa, Escherichia coli; identical to SEQ ID NO: 2244

SEQ ID NO: 5383 - protein, 111 aa, Escherichia coli; identical to SEQ ID NO: 3153

SEQ ID NO: 5384 - protein, 162 aa, Escherichia coli; identical to SEQ ID NO: 1973

SEQ ID NO: 5385 - protein, 663 aa, Escherichia coli; identical to SEQ ID NO: 1910

SEQ ID NO: 5386 - protein, 828 aa, Escherichia coli; identical to SEQ ID NO: 2386

SEQ ID NO: 5387 - protein, 118 aa, Escherichia coli; identical to SEQ ID NO: 2737

SEQ ID NO: 5388 - protein, 700 aa, Escherichia coli; identical to SEQ ID NO: 2784

SEQ ID NO: 5389 - protein, 565 aa, Escherichia coli; identical to SEQ ID NO: 2669

SEQ ID NO: 5390 - protein, 351 aa, Escherichia coli; identical to SEQ ID NO: 2519

SEQ ID NO: 5391 - protein, 233 aa, Escherichia coli; identical to SEQ ID NO: 2006

SEQ ID NO: 5392 - protein, 241 aa, Escherichia coli; identical to SEQ ID NO: 2076

SEQ ID NO: 5393 - protein, 193 aa, Escherichia coli; identical to SEQ ID NO: 2246

SEQ ID NO: 5394 - protein, 760 aa, Escherichia coli; identical to SEQ ID NO: 2080

SEQ ID NO: 5395 - protein, 200 aa, Escherichia coli; identical to SEQ ID NO: 1793

SEQ ID NO: 5396 - protein, 446 aa, Escherichia coli [sequence omitted]

SEQ ID NO: 5397 - protein, 374 aa, Escherichia coli
MNIYRAVTSFFNNSSKKGLTMKKLTVAISAVAASVLMAMSAQAAEIYNKDSNKLDLYGKVNAKHYFSSNDADDGDTTYARLGFKGETQINDQLTGFGQWEYEFKGNRAESQGSSKDKTRLAFAGLKFGDYGSIDYGRNYGVAYDIGAWTDVLPEFGGDTWTQTDVFMTQRATGVATYRNNDFFGLVDGLNFAAQYQGKNDRSDFDNYTEGNGDGFGFSATYEYEGFGIGATYAKSDRTDTQVNAGKVLPEVFASGKNAEVWAAGLKYDANNIYLATTYSETQNMTVFADHFVANKAQNFEAVAQYQFDFGLRPSVAYLQSKGKDLGVWGDQDLVKYVDVGATYYFNKNMSTFVDYKINLLDKNDFTKEGANKSL

SEQ ID NO: 5398 - protein, 274 aa, Escherichia coli; identical to SEQ ID NO: 2309

SEQ ID NO: 5399 - protein, 246 aa, Escherichia coli; identical to SEQ ID NO: 1985

SEQ ID NO: 5400 - protein, 208 aa, Escherichia coli; identical to SEQ ID NO: 1949

SEQ ID NO: 5401 - protein, 170 aa, Escherichia coli [sequence omitted]

SEQ ID NO: 5402 - protein, 250 aa, Escherichia coli; identical to SEQ ID NO: 2761

SEQ ID NO: 5403 - protein, 746 aa, Escherichia coli; identical to SEQ ID NO: 2069

SEQ ID NO: 5404 - protein, 511 aa, Escherichia coli; identical to SEQ ID NO: 2466

SEQ ID NO: 5405 - protein, 412 aa, Escherichia coli; identical to SEQ ID NO: 2161

SEQ ID NO: 5406 - protein, 362 aa, Escherichia coli; identical to SEQ ID NO: 2434

SEQ ID NO: 5407 - protein, 359 aa, Escherichia coli; identical to SEQ ID NO: 2329

SEQ ID NO: 5408 - protein, 224 aa, Escherichia coli; identical to SEQ ID NO: 4515

SEQ ID NO: 5409 - protein, 231 aa, Escherichia coli; identical to SEQ ID NO: 2794

SEQ ID NO: 5410 - protein, 213 aa, Escherichia coli; identical to SEQ ID NO: 2232

SEQ ID NO: 5411 - protein, 229 aa, Escherichia coli; identical to SEQ ID NO: 3984

SEQ ID NO: 5412 - protein, 203 aa, Escherichia coli; identical to SEQ ID NO: 2201

SEQ ID NO: 5413 - protein, 237 aa, Escherichia coli; identical to SEQ ID NO: 1814

SEQ ID NO: 5414 - protein, 551 aa, Escherichia coli; identical to SEQ ID NO: 2449

SEQ ID NO: 5415 - protein, 774 aa, Escherichia coli; identical to SEQ ID NO: 2066

SEQ ID NO: 5416 - protein, 367 aa, Escherichia coli; identical to SEQ ID NO: 2433

SEQ ID NO: 5417 - protein, 614 aa, Escherichia coli; identical to SEQ ID NO: 1888

SEQ ID NO: 5418 - protein, 191 aa, Escherichia coli; identical to SEQ ID NO: 2727

SEQ ID NO: 5419 - protein, 368 aa, Escherichia coli; identical to SEQ ID NO: 3332

SEQ ID NO: 5420 - protein, 856 aa, Escherichia coli
MAGFFVRLFVACAFAAQAPLSSAELYFNPRFLADDPQAVADLSRFENGQELPPGTYRVDIYLNNGYMATRDVTFNTGDSEQGIVPCLTRAQLASMGLNMASVAGMNLLADDACVPLTTMVQDATAHLDVGQQRLNLTIPQAFMSNRARGYIPPELWDPGINAGLLNYNFSGNSVQNRIGGNSHYAYLNLQSGLNIGAWRLRDNTTWSYNSSDRSSGSKNKWQHINTWLERDIIPLRSRLTLGDGYTQGDIFDGINFRGAQLASDDNMLPDSQRGFAPVIHGIARGTAQVTIKQNGYDIYNSTVPPGPFTINDIYAAGNSGDLQVTIKEADGSTQIFTVPYSSVPLLQREGHTRYSITAGEYRSGNAQQEKPRFFQSTLLHGLPAGWTIYGGTQLADRYRAFNFGIGKNMGALGALSVDMTQANSTLPDDSQHDGQSVRFLYNKSLNESGTNIQLVGYRYSTSGYFNFADTTYSRMNGYNIETQDGVIQVKPKFTDYYNLAYNKRGKLQLTVTQQLGRSSTLYLSGSHQTYWGTSNVDEQFQAGLNTAFEDINWTLSYSLTKNAWQKGRDQMLALNVNIPFSHWLRSDSKSQWRHASASYSMSHDLNGRMTNLAGVYGTLLEDNNLSYSVQTGYAGGGDGNSGSTGYATLNYRGGYGNANIGYSHSDDIKQLYYGVSGGVLAHANGVTLGQPLNDTVVLVKAPGAKDAKVENQTGVRTDWRGYAVLPYATEYRENRVALDTNTLADNVDLDNAVANVVPTRGAIVRAEFKARVGIKLLMTLTHNNKPLPFGAMVTSESSQSSGIVADNGQVYLSGMPLAGKVQVKWGEEENAHCIANYQLPPESQQQLLTQLSAECR

SEQ ID NO: 5421 - protein, 266 aa, Escherichia coli; identical to SEQ ID NO: 1894

SEQ ID NO: 5422 - protein, 865 aa, Escherichia coli; identical to SEQ ID NO: 2167

SEQ ID NO: 5423 - protein, 161 aa, Escherichia coli; identical to SEQ ID NO: 2582

SEQ ID NO: 5424 - protein, 229 aa, Escherichia coli
MKSVLLLLTVLFVQSVEAGIMPASSRIIYRDGDREKTLMLVNTNDYPVLVQSWVDNGEGSPEAASPPFVVLPPVFRLAARRTQGLRIIYNHDPLPQDRESAFWLNLYEMPPETPHQDPTHLTLAMNTQLKIFYRPKSVTMTPQEAMRKISWHLGNDGSSSYIELNNPTPLNISFTSISIGATKVQQESDMMIKPFSQRRYWLASNNVSGVVAATYLDDNGAQIKQQLAQ

SEQ ID NO: 5425 - protein, 813 aa, Escherichia coli
MPMKKYVTTKSVQPVAFRLTTLSLVMSAVLGSASVIAGEKLDMSFIQGGGVNPEVWAALNGSYAPGRYLVDLSLNGKEAGKQILDVTPQDSNELCLTEAWLTKAGVYVSADYFREGYDATRQCYVLTKAPSVKVDFDVSTQSLALSIPQKGLVKMPENVDWDYGTSAFRVNYNANANTGRNNTSAFGSADLKANIGHWVVSSSATASGGDSGDNSTTINMFTATRAIRALSADLAVGKTSTGDSLLGSTGTYGVSLSRNNSMKPGNLGYTPVFSGIANGPSRVTLTQNGRLLHSEMVPAGPFSITDVPLYTSGDVTMKITGEDGREQVQNFPLSVMAGQLSPGQHEFSVAAGLPDDDSDLKGGVFAASYGYGLDGLTLRAGGVFNQDWQGASAGVVAGLGYLGAVSADGAYATAKYRDGSHSGNKVQLSWSKQLETTNTGLRVSWSRQSEEYEGMSSFDPTELWSQSNHGRRTKDEWNAGISQPVGGLFSLSVSGWQRSYYPASMTGSYRYSDDNGKETGITGSLSTQIKGVSLNLGWSGSRNSRGENNWSASASVSVPFTLFDRRYSSSASVSTSKGGGTGFSTGVSGSLNDRFSYGLGGGRDGDGGTSSYLNASYSGDRAYLNGVLNHSQSGGTSGSVSVSGSVLAVPAAKDIMFSRTTGDTVAVVNVKDAPGVKVTSGDGQTDSDGNLVVPLNSYDWNTVTIDAGTLPLSTELTNTSQKVVPTDKAVVWMPFDALKVKRYLLQVKQRDGEFVPGGTWARDSKNTPLGFVANNGVLMINTVDAPGDITLGQCRIPAARLQDTEKLQEITCE

SEQ ID NO: 5426 - protein, 233 aa, Escherichia coli; identical to SEQ ID NO: 2005

SEQ ID NO: 5427 - protein, 193 aa, Escherichia coli; identical to SEQ ID NO: 2250

SEQ ID NO: 5428 - protein, 266 aa, Escherichia coli; identical to SEQ ID NO: 1894

SEQ ID NO: 5429 - protein, 567 aa, Escherichia coli
MKIKLRITIILISVLCIFNGLFTPGAYAAAANGYVANKENLRSFFETVSSYAGKPTIVSKLAMKKQISGNFDLTEPYALIERLSAQMGLIWYDDGKAIYIYDSSEMRNALINLRKVSTNEFNNFLKKSGLYNSRYEIKGDGNGTFYVSGPPVYVDLVVNAAKLMEQNSDGIEIGRNKVGIIHLVNTFVNDRTYELRGEKIVIPGMAKVLSTLLNNNIKQSTGVNVLSEISSRQQLKNVSRMPPFPGAEEDDDLQVEKIISTAGAPETDDIQIIAYPDTNSLLVKGTVSQVDFIEKLVATLDIPKRHIELSLWIIDIDKTDLEQLGADWSGTIKIGSSLSASFNNSGSISTLDGTQFIATIQALAQKRRAAVVARPVVLTQENIPAIFDNNRTFYTKLVGERTAELDEVTYGTMISVLPRFAARNQIELLLNIEDGNEINSDKTNVDDLPQVGRTLISTIARVPQGKSLLIGGYTRDTNTYESRKIPILGSIPFIGKLFGYEGTNANNIVRVFLIEPREIDERMMNNANEAAVDARAITQQMAKNKEINDELLQKWIKTYLNREVVGG

SEQ ID NO: 5430 - protein, 111 aa, Escherichia coli; identical to SEQ ID NO: 2911

SEQ ID NO: 5431 - protein, 127 aa, Escherichia coli
MPMYLLRLFFAVTLITQMSMATAGIVVGGTRVIFYGDKPDTTISIFNKETNLPYLLQTWVDPFNKEDKSKPPFSVIPPVSRIEPQQEKILRILKTAGELPKDRESVFWLNVKNIPPSIDKKIPMFLR

SEQ ID NO: 5432 - protein, 445 aa, Escherichia coli; identical to SEQ ID NO: 4474

SEQ ID NO: 5433 - protein, 230 aa, Escherichia coli
MMTKIKLLMLIIFYLIISASVHAAGGIALGATRIIYPADAKQTAVWIRNSHTNERFLVNSWIENSSGVKEKSFIITPPLFVSEPKSENTLRIIYTGPPLAADRESLFWMNVKTIPSVDKNALNGRNVLQLAILSLMKLFLRPIQLQELPAEAPDTLKFSRSGNYINVHNPSPFYVTLVNLQVGSQKLGNAMAAPRVNSQIPLPSGVQGKLKFQTVNDYGSVTPVREVNLN

SEQ ID NO: 5434 - protein, 200 aa, Escherichia coli; identical to SEQ ID NO: 1788

SEQ ID NO: 5435 - protein, 793 aa, Escherichia coli
MLKKTLLAYTIGFAFSPPANADGIEIAAVDFDRETLKSLGVDPNISHYFSRSARFLPGEYSLAVSVNGEKKGNIATRFDENGDICLDQAFLQQAGLKIPSEEKNGCYDYILSYPGTTITPLPNQEALDIIVSPQAIIPIGLDLTNAATGGTAALLNYSLMSSRAEFSNGSSDYSQAALEGGININDWMLRSHQFLTQTNGTFSNQNSSTYLQRTFTDLKTLMRAGEVNLNNSVLEGASIYGIEIAPDNALQTSGSGVQVTGIANTSQARVEIRQQGVLIHSILVPAGAFTIPDVPVRNGNSDLNVTVVETDGSSHNYIVPSTLFNQHVESFQGYRFAIGRVDDDYDESPWVISASSGWNLTRWSAMNGGVIVAENYQAASIRSSLVPLPDLTVSSQISTSQDTKDSLQGQKYRLDANYNLPFSLGLTTSLTRSDRHYRELSEAIDDDYTDPTKSTYALGLNWSNSILGGFNISGYKTYSYDGDNDSSNLNINWNKAFKHATVSVNWQHQLSASENNEDDGDLFYVNISIPFGRSNTATLYTRHDDHKTHYGTGVMGVVSDEMSYYVNAERDHDERETSLNGSISSNLHYTQVSLAAGASGSDSRTYNGTMSGGIAVHDQGVTFSPWTINDTFAIAKMDNNIAGVRITSQAGPVWTDFRGNAVIPSIQPWRTSGVEIDTASLPKNVDIGNGTKMIKQGRGAVGKVGFSAITQRRALLNITLSDGKKLPRGVAIEDSEGNYLTTSVDDGVVFLNNIKPDMVLDIKDEQQSCRIHLTFPEDAPKDVFYETATGECQ

SEQ ID NO: 5436 - protein, 816 aa, Escherichia coli
MNIYRLSVLSCLAMVTPPALTAEFNLNVLDKSIRDSVDISLLNQKGVVAPGDYFVSVTVNNNKISNGQQIRWQKSGDKIIPCINESLIELFGLKSDFRKKLPAIKECVDFSVFPEIIFTFDQANQQLNITIPQAWLAWHSENWTPPSTWNNGIPGFLMDYNLFASTYRPQSGSSSNNLNAYGTTGLNAGAWRLRSDYQLSQSDSGDNREQSGAISRTYLFRPLPQIGSRLTLGETDFSSNIFDGFSYTGAALASDDRMLPWELRGYAPQISGIAQTNATVTISHSGRVIYQKKVPPGPFIIDDLNQSVQGTLDVKVSEEDGRVNNFQVSAASTPFLTRQGQVRYKLAAGRPRSSMSHHTEDETFISHEVSWGMLSNTSLYGGMLLAGDDYRSGALGIGQNMLWMGALSFDVTWADSHFDTQQDEQGYSYRFNYSKQVDATNSTISLAAYRFSDRHFHSYANYIDHKYNDADAQDEKQTISLSFGQPITLLNLNLYANILHQSWWNADTSTTANITVGFNVDIGDWKDISVSTSFNTTHYEDKDRDNQIYFSISLPIGESGRLGYDMQNNSNTTTHRMSWNDTLDERNSWGMSAGIQSDRPDNGAQVSGNYQHLSSAGEWDLTGTYAANDYTSASASWSGSFTATQHGAAFHRRSSTNEPRLMVSTDGVGDIPIQGNIDYTNRFGIAVVPFVSSYQPTTVAVNMNDLPDGVTVSENVVKETWTEGAIGFKSLASRAGKDLNVIISDANGHFPPLGADVRQAEGGVSVGMVGENGHAWLSGVDENQQFTVHWGDQKTCAIHLPEHLEDVTKRLILPCN

SEQ ID NO: 5437 - protein, 713 aa, Escherichia coli
MAKFTPSFSGIKGRALFSLLFAAPMIHATDTATTKDGETITVTADANTATEATDGYQPLSTSTATLTDMPMLDIPQVVNTVSDQVLENQNATTLDEALYNVSNVVQTNTLGGTQDAFVRRGFGANRDGSIMTNGLRTVLPRSFNAATERVEVLKGPASTLYGILDPGGLINVVTKRPEKTFHGSVSATSSSFGGGTGQLDITGPIEGTQLAYRLTGEVQDEDYWRNFGKERSTFIGPSLTWFGDNATVTMLYSHRDYKTPFDRGTIFDLTTKQPVNVDRKIRFDEPFNITDGQSDLAQLNAEYHLNSQWTARFDYSYSQDKYSDNQARVTAYDATTGTLTRRVDATQGSTQRMHSTRADLQGNVDIAGFYNEILGGVSYEYYDLLRTDMIRCKNAKDFNIYNPVYGNTSKCTTVSASDSDQTIKQESYSAYAQDALYLTDNWIAVAGIRYQYYTQYAGKGRPFNVNTDSRDEQWTPKLGLVYKLTPSVSLFANYSQTFMPQSSIASYIGDLPPESSNAYEVGAKFELFDGITADIALFDIHKRNVLYTESIGDETIAKTAGRVRSRGVEVDLAGALTENINIIASYGYTDAKVLEDPDYAGKPLPNVPRHTGSLFLTYDIHNMPGNNTLTFGGGGHGVSRRSATNGADYYLPGYFVADAFAAYKMKLQYPVTLQLNVKNLFDKTYYTSSIATNNLGNQIGDPREVQFTVKMEF

SEQ ID NO: 5438 - protein, 270 aa, Escherichia coli
PEVLKQAVNDAVANIPVPADGKSITPDDMRPMLEQMVKEAVSHIPVPRDGRDYDPEVLQKAVNDAVANIPQPADGKSLTPDDVRPMLEQMVKEAVSHIPVPRDGRDYDPDVLQKAVLDAVSALPAPQDGRDATALEIIPAIDDQKSFPRGTYATHQGGLWRAYEKTHGMRGWECLVDGVADIDVSMTGERSFTVVVRQSSGQRTEKTFSLPVMLYRGVFRAGETYHPGDTVTWGGSLWHCNSMTGDKPGEAHSSGWTLAAKRGRDAGGGK

SEQ ID NO: 5439 - protein, 170 aa, Escherichia coli
MSGILTRWRQFGKRYFWPHLLLGMVAASLGLPALSNAAEPNAPAKATTRNHEPSAKVNFGQLALLEANTRRPNSNYSVDYWHQHAIRTVIRHLSFAMAPQTLPVAEESLPLQAQHLALLDTLSALLTQEGTPSEKDYRIDYAHFTPQAKFSTPVWISQAQGIRAGPQRLS

SEQ ID NO: 5440 - protein, 760 aa, Escherichia coli
MENNRNFPARQFHSLTFFAGLCIGITPVAQALAAEGQTNADDTLVVEASTPSLYALQQSADPKFSRPVADTTRTMTVISEQVIKDQGATNLTDALKNVPGVGAFFAGENGNSTTGDAIYMRGADTSNSIYIDGIRDIGSVSRDTFNTEQVEVIKGPSGTDYGRSAPTGSINMISKQPRNDSGIDASASIGSAWFRRGTLDVNQVIGDTTAVRLNVMGEKTHDAERDKVKNERYGVAPSIAFGLGTANRLYLNYLHVTQHNTPDGGIPTIGLPGYSAPSAGTATLNHSGKVDTHNFYGTDSDYDDSTTDTATMRFEHDINDNTTIRNTTRWSRVKQDYLMTAIMGGASNITQPTSDVNSWTWSRTANTKDVSNKILTNQTNLTSTFYTASIGHDVSTGVEFTRETQTNYGVNPVTLPAVNIYHPDSSIHPGGLTRNDANANGQTDTFAIYAFDTLQITRDFELNGGIRLDNYHTEYDSATACGGSGRGAITCPAGVAKGSPVTAVDTAKSGNLVNWKAGALYHLTENGNVYINYAVSQQPPGGNNFALAQSGSGNSANRTDFKPQKANTSEIGTKWQVLDKRLLLTAALFRTDIENEVEQNDEGTYSQYGKKRVEGYEISVAGNITPAWQVIGGYTQQKATIKNGKDVAQDGSSSLPYTPEHAFTLWSQYQATDDISVGAGARYIGSMHKGSDGAVGTPAFTEGYWVADAKLGYRVNRNLDFQLNVYNLFDTDYVASINKSGYRYHPGEPRTFLLTANMHF

SEQ ID NO: 5441 - protein, 274 aa, Escherichia coli; identical to SEQ ID NO: 2891

SEQ ID NO: 5442 - protein, 840 aa, Escherichia coli
MNNKNTFTGDTLSHAIKNALSGVVCSLLFVLPAHAVEFNVDMIDVEDRENIDISRFEKKGYIPPGRYLARVQINKNMLPQALILEWVKADNESGSLLCLTKEDLTSFGLNTEFIESLQTIAGRECLDLSQRQELTTRLDKATMILSLSVPQAWLKYQATNWTPPEFWDTGIAGFILDYNVYASQYAPHHGDSTQNVSSYGTLGFNLGAWRLRSDYQYNQNFADGRSVNRDSEFARTYLFRPIPSWSSKFTMGQYDLSSNLYDTFHFTGASLESDESMLPPDLQGYAPQITGIAQTNAKVTVAQNGRVLYQTTVAPGPFTISDLGQSFQGQLDVTVEEEDGRTSTFQVGSASIPYLTRKGQVRYKTSLGKPTSVGHNDINNPFFWTAEASWGWLNNVSLYGGGMFTADDYQAITTGIGFNLNQFGSLSFDVTGADASLQKQNSDNLRGYSYRFNYAKHFESTGSQITFAGYRFSDKDYVSMSEYLSSRNGDESIDNEKESYVISLNQYFETLELNSYLNVTRNTYWDSASNTNYSVSVSKNFDIGDFKGISASLAVSRIRWDDDEENQYYFSFSLPLQQNRNISYSMQRTGSSNTSQMISWYDSSDRNNIWNISASATDDNIRDGEPTLRGSYQHYSPWGRLNINGSVQPNQYNSVTAGWYGSLTATRHGVALHDYSYADNARMMVDTDGISGVEINSNRTVTNGLGIAVVPSLSNYTTSMLRVNNNDLPEGVDVENSVIRTTLTQGAIGYAKLNATTGYQIVGVIRQENGRFPPLGVNVTDKATGKDVGLVAEDGFVYLSGIQENSILHLTWGDNTCEVTPPNQSNISESAIILPCKTVK

SEQ ID NO: 5443 - protein, 871 aa, Escherichia coli
MHQVLILPRFARLTFALGLATAVFPVDAEYYFNPRFLSNDLAESVDLSAFTKGREAPPGTYRVDIYLNDEFMASRDITFIADDNNADLIPCLSTDLLVSLGIKKSALLDNKEHSADKHVPDNSACTPLQDRLADASSEFDVGQQHLSLSVPQIYVGRMARGYVSPDLWEEGINAGLLNYSFNGNSINNRSNHNAGKSNYAYLNLQSGINIGSWRLRDNSTWSYNSGSSNSSDSNKWQHINTSAERDIIPLRSRLTVGDSYTDGDIFDSVNFRGLKINSTEAMLPDSQHGFAPVIHGIARGTAQVSVKQNGYDVYQTTVPPGPFTIDDINSAANGGDLQVTIKEADGSIQTLYVPYSSVPVLQRAGYTRYALAMGEYRSGNNLQSSPKFVQASLMHGLKGNWTPYGGMQIAEDYQAFNLGIGKDLGLFGAFSFDITQANTTLADDTRHSGQSVKSVYSKSFYQTGTNIQVAGYRYSTQGFYNLSDSAYSRMSGYTVKPPTGDTSEQTLFIDYFNLFYSKRGQEQISISQQLGHYGTTFFSASRQSYWNTSRSDQQISFGLNVPFGDITTSLNYSYSNNIWQNDRDHLLAFTLNVPFSHWMRTDSQSAFRNSNASYSMSNDLKGGMTNLSGVYGTLLPDNNLNYSVQVGNTQGGNTSSGTSGYSSLNYRGAYGNTNVGYSRSGDSSQIYYGMSGGIIAHADGITFGQPLGDTMVLVKAPGADNVKIENQTGIHTDWRGYAILPFATEYRENRVALNANSLADNVELDETVVTVIPTHGAIARATFNAQIGGKVLMTLKYGNKSVPFGAIVTHGENKNGSIVAENGQVYLTGLPQSGKLQVSWGNDKNSNCIVDYKLPAVSPGTLLNQQTAICR

SEQ ID NO: 5444 - protein, 815 aa, Escherichia coli; identical to SEQ ID NO: 2698

SEQ ID NO: 5445 - protein, 580 aa, Escherichia coli
MYRTHRQHSLLSSGGVPSFIGGLVVFVSAAFNAQAETWFDPAFFKDDPSMVADLSRFEKGQKITPGVYRVDIVLNQTIVDTRNVNFVEITPEKGIAACLTTESLDAMGVNTDAFPAFKQLDKQACVPLAEIIPDASVTFNVNKLRLEISVPQIAIKSNARGYVPPERWDEGINALLLGYSFSGANSIHSSADSDSGDSYFLNLNSGVNLGPWRLRNNSTWSRSSGQTAEWKNLSSYLQRAVIPLKGELTVGDDYTAGDFFDSVSFRGVQLASDDNMLPDSLKGFAPVVRGIAKSNAQITIKQNGYTIYQTYVSPGAFEISDLYSTSSSGDLLVEIKEADGSVNSYSVPFSSVPLLQRQGRIKYAVTLAKYRTNSNEQQESKFAQATLQWGGPWGTTWYGGGQYAEYYRAAMFGLGFNLGDFGAISFDATQAKSTLADQSEHKGQSYRFLYAKTLNHLGTNFQLMGYRYSTSGFYTLSDTMYKHMDGYEFNDGDDEDTPMWSRYYNLFYTKRGKLQVNISQQLGEYGSFYLSGSQQTYWHTDQQDRLLQFGYNTQIKDLSLGISGTTVSPVVNLMLIRCLL

SEQ ID NO: 5446 - protein, 266 aa, Escherichia coli; identical to SEQ ID NO: 1894

SEQ ID NO: 5447 - protein, 715 aa, Escherichia coli; identical to SEQ ID NO: 3971

SEQ ID NO: 5448 - protein, 834 aa, Escherichia coli; identical to SEQ ID NO: 3118

SEQ ID NO: 5449 - protein, 539 aa, Escherichia coli; identical to SEQ ID NO: 3050

SEQ ID NO: 5450 - protein, 208 aa, Escherichia coli; identical to SEQ ID NO: 1949

SEQ ID NO: 5451 - protein, 227 aa, Escherichia coli; identical to SEQ ID NO: 3570

SEQ ID NO: 5452 - protein, 207 aa, Escherichia coli
MPLPDFRLIRLLPLAALVLTACSVTTPKGPGKSPDSPQWRQHQQDVRNLNQYQTRGAFAYISDQQKVYARFFWQQTGQDRYRLLLTNPLGSTELELNAQPGNVQLVDNKGQRYTADDAEEIIGKLTGMPIPLNSLRQWILGLPGDATDYKLDDQYRLSEITYSQNGKNWKVVYGGYDTKTQPAMPANMELTDGGQRIKLKMDNWIVK

SEQ ID NO: 5453 - protein, 840 aa, Escherichia coli
MNKSVVSISAAMLVLLCQPVMGSEISPATPSDEDNYTFDPQLFRGSRFSQSSLAKLTTRESVAPGNYKMDIYTNNKLSGSWNVTFKEAADGRVLPCLTPEVADAIGLKTGEDKGEKDPVCTFAKELAPGITSQTQLSQLRLDLSVPQSQLISRPRGYVPPSELDTGASLAFMNYIANYYNVAYSGQNAHSQRSLWASFNGGINLGAWQYRQLSNMTWDNDKGNQWNNIRSYLQRPLPAINSQLMMGQLITSGRFFSGLSYHGVSLATDERMLPDSMRGYAPTIRGVAATNARVSVMQNGHEIYQTTVAPGPFEINDLYPTSYSGDLDVTVTEANGAVSRFSVPFSAVPESMRPGTSRYNVEVGKTQDSGDDSMFGDLTWQHGMTNTLTFNSGSRIADGYQALMLGGVYGSSLGAFGANLTWSHARVPESEAQSGWMSQLTWSKTFQPTSTTVSLAGYRYSTSGYRDLADVLGERHAASNKQSWDSSQWRQQSRFDLTLSQSLANYGNLFVSGSTQNYRGGKSRDTQLQLGYSNSFSHGISMNLSVGRQRMGGYKDNSDDMQTVTSLSFSFPLGGNGPRVPSLSNSWTHSTDGSSQLQSSLTGMLDEAQTTNYSLNVMRDQQYKQTTLSGNMQKRFSQTIVGLNASKGQDYWQASGNVQGAMAVHGGGITFGPYLGETFALVEAKGAEGAKVYNSSQLEINDSGYALVPAVTPYRYNRISLDPQGMDGDAELVDSERQVAPVAGAAVKVIFRTRPGKALLIKSRMADGSELPMGADVLDENNTVVGIAGQGGQIYLRTEQTKGHLSVRWGEGANDSCQLPFDISGKDSNSPIIRLNETCQS

SEQ ID NO: 5454 - protein, 862 aa, Escherichia coli; identical to SEQ ID NO: 5294

SEQ ID NO: 5455 - protein, 793 aa, Escherichia coli; identical to SEQ ID NO: 2768

SEQ ID NO: 5456 - protein, 656 aa, Escherichia coli
MRLKKHYLCTALSLAFTQQAVAAQESDSLTVWSSPVSSTTTTVLDQPTMKALDKQNVAQALSVVPGVVLQKSGSRNEEQVKVRGFDSRQVPVYFDGVPIYVPYDGNLDLARILTNNLGAVEVSKGYSSLLQGPNQMGGAINITTQKPTKPLEASLGYRQGWSRSQDNAYDMHASFAASSELGYLQVSDSQLKQDFLGLPHGVNNDIAGKHGKMINSSADDKRGIVKLGFTPRENDEYTLTYIKQDGEKDNPPYSGNSGQKSRYWQWPEYDKESFYYQGTTQLNDRFTLKSRLYRDTFENTLMMYNSLADLKNKKGSYSHYSDYSDGAGLQLAADVRENDLLSFAVNWKDDVHREKGAPHAAYDRYEDRTWSLASEYQWAAADNVDVVAGISYDWRDSVEAKKHEKDGSITHYDDNNQSAFNWQVMGKYHFVNEDTLALSYYDRKRFPTLKERYTTSKPAYNQIAIVNPQLKPERARGVDLTWNGAFTHDWGFEVSVYYNRVSDAILSHNIDADTIQNQNSGTVDYSGLDAGIKGKISNILDVGLSYALIHADAKRKDIGKITDLPTQTMTAWMTLKPWEPLSVTLSEEARSSSYSNSDGSQKAAGFAVTHIRADYTLGHGFSVNASVNNLFDTQYAYSEGFIEEGRNFWAGVEYTF

SEQ ID NO: 5457 - protein, 162 aa, Escherichia coli
MKTILPAVLFAAFATISAWAAESVQPLEKIAPYPQAEKGMKRQVIQLTPQEDESTLKVELLIGQTLEVDCNLHRLGGKLESKTLEGWGYDYYVFDKVSSPVSTMMACPDGKKEKKFVTAYLGDTGMLRYNSKLPIVVYTPDNVDVKYRVWKAEEKIDNAVVR

SEQ ID NO: 5458 - protein, 826 aa, Escherichia coli
MLRMTPLASAIVALLLGIEAYAAEETFDTHFMIGGMKDQQVANIRLDDNQPLPGQYDIDIYVNKQWRGKYEIIVKDNPQETCLSREVIKRLGINSDNFASGKQCLTFEQLVQGGSYTWDIGVFRLDFSVPQAWVEELESGYVPPENWERGINAFYTSYYLSQYYSDYKASGNNKSTYVRFNSGLNLLGWQLHSDASFSKTNNNPGVWKSNTLYLERGFAQLLGTLRVGDMYTSSDIFDSVRFRGVRLFRDMQMLPNSKQNFTPRVQGIAQSNALVTIEQNGFVVYQKEVPPGPFAITDLQLAGGGADLDVSVKEADGSVTTYLVPYAAVPNMLQPGVSKYDFAAGRSHIEGASKQSEFVQVGYQYGFNNLLTLYGGSMVANNYYAFTLGTGWNTRIGAISVDATKSHSKQDNGDVFDGQSYQIAYNKFVSQTSTRFGLAAWRYSSRDYRTFNDHVWANNKDNYRRDENDVYDIADYYQNDFGRKNSFSANMSQSLPEGWGSVSLSTLWRDYWGRSGSSKDYQLSYSNNWRRISYTLAASQAYDENHHEEKRFNIFISIPFDWGDDVTTPRRQIYMSNSTTFDDQGFASNNTGLSGTVGSRDQFNYGVNLSYQHQGNETTAGANLTWNAPVATVNGSYSQSSTYRQAGASVSGGIVAWSGGVNLANRLSETFAVMNAPGIKDAYVNGQKYRTTNRNGVVVYDGMTPYRENHLMLDVSQSGSEAELRGNRKIAAPYRGAVVLVNFDTDQRKPWFIKALRADGQPLMFGYEVNDIHGHNIGVVGQGSQLFIRTNEVPLSVNVAIDKQQGLSCTITFGKEIDESRNYICQ

SEQ ID NO: 5459 - protein, 882 aa, Escherichia coli
MPNHSNFRLRGIACYIALAISGGSVNAWADDSIQFDPRFLELKGDTKIDLGKFSKKGYVDAGKYNLRVFINKQSLSDEYDINWYVSENDPTKTYACLTPELVAALGLKEGIAKSLQWTHNDECLKPGQLDGMEVENDLSQSALLLTVPQAYLEYTSSDWDPPSRWDDGISGLIADYSLNAQTRHQEQGGEDSHDISGNGTVGANLGAWRFRADWQSDYQHTRSNDDEDDSSNSTTSKNWDWSRYYAWRALPSLKAKLSLGEDYLNSDIFDGFNYIGSSVSTDDQMLPPNLRGYAPDVSGVAHSSAKVTISQMGRVLYETQVPAGPFRIQDIGDSVSGTLHVRVEEQNGQVQEYDVTTASMPFLTRQGQVRYKVMMGRPEDWNHKTEGGFFSGGEASWGVADGWSLYGGALADEHYQSAAMGVGRDLAQFGALAFDVTHSHVNLDHDSAYGKGKLDGNSFRVSYAKDFDELNSRVTFAGYRFSEKNFMTMSEYLDASQSDMARTGNDKEMYTITYNQNFAAAGVSVYLNYSHRTYWDRPEQTNYNLMFSHYFNMGSIRNMSISVTGYRYEYDDNTDKGMYLSMSIPWSDSSTVTYNGSYGSGSDSSQVGYFNRIDDATHYQINVGTSEQHGSVDGYLSHDGTLAKVDLSANYHEGEYRSAGIALQGGATLTAHGGALHRTQNMGGTRLLIDADGIANVPVESNGAPVYTNMFGKAVVADINNYYRNQAYIDLNNLPEDAEATQSVVQATLTEGAIGYRKFKVISGQKAMAVLRLRDGSYPPFGAEVKNDEQQQVGIVDDEGNVYLAGINAGEHMMVFWEGSAQCEIVLPKPLPADLFRGLLLPCEQKGTTAPDSLAPEIKPVIQDQTRQVTPSEAPTSISATQ

SEQ ID NO: 5460 - protein, 537 aa, Escherichia coli
MLRMTPLASAIVALLLGIEAYAAEETFDTHFMIGGMKDQQVANIRLDDNQPLPGQYDIDIYVNKQWRGKYEIIVKDNPQETCLSREVIKRLGINSDNFASGKQCLTFEQLVQGGSYSWDIGVFRLDFSVPQAWVEELESGYVPPENWERGINAFYTSYYVSQYYSDYKASGNNKSTYVRFNSGLNLLGWQLHSDASFSKTNNNPGVWKSNTLYLERGFAQLLGTLRVGDMYTSSDIFDSVRFSGVRLFRDMQMLPNSKQNFTPRVQGIAQSNALVTIEQNGFVVYQKEVPPGPFAITDLQLAGGGADLDVSVKEADGSVTTYLVPYAAVPNMLQPGVSKYDFAAGRSHIEGASKQSDFVQAGYQYGFNNLLTLYGGSMVANNYYAFTLGTGWNTRIGAISVDATKSHSKQDNGDVFDGQSYQIAYNKFVSQTSTRFGLAAWRYLSRDYRTFNDHVWANNKDNYRRDKNDIYDIADYYQNDFGRKNSFSANMSQSLPEGWGSVSLSTLWRDYWGRSGSSKDYQLSYSNNWRRVMTRTY

SEQ ID NO: 5461 - protein, 800 aa, Escherichia coli
MFFRRAALALAVSAAFASATGIAGEKLDMSFIQGGAGVNPEVWAALNGSYAPGRYLVDLSLNGKEAGKQILDVTPQDSNELCLTEAWLTKAGVYVSADYFREGYDATRQCWVLTKSPSVKVDFDVSTQSLALSIPQKGLVKMPENVDWDYGTSAFRVNYNANANTGRNNTSAFGSADLKANIGRWVVSSSATASGGDSGDNSTTINMFTATRAIRALSADLAVGKTSTGDSLLGSTGTYGASLSRNNSMKPGNLGYTPVFSGIANGPSRVTLTQNGRLLYSEMVPAGPFSITDVPLYTSGDVTMKVTGEDGREQTQVFPLAVMNGQLSPGEHEFNLAAGLPDDDSDMDGAVFAASYGYGLENLTLRTGLVFNQDWKGASAGMVVGLGWLGAVSVDGAYASAKYRDGSHSGNKVQLAWSKQLEPTNTSLRLSWSRRSEEYEDMSSFNPSEVYSQVNQGRRTKDEWSVGIGQPVGDLFSLSLSGWQRSYYPASVISAHRQQKDSGKERGVTGTLSTQVKGATLNLGWSGSRNSDGENNWSASASVSVPFTLFDRRYSSSTSVSTSKDGGTGFSTGVSGSLNDRFSYGLGGGRDSGGGVSSYLNASYSGDRAYLSGALNQSSSGGTSGSVSVSGSVLAVPAAKDIMFSRTTGDTVAVVNVKDTPGVKVTSGDGQTNSDGNLVVPLNSYDWNTVTIDAGTLPLSTELTNTSQKVVPTDKAVVWMPFDALKIKRYLLQVKQRDGEFVPGGTWARDSKNTPLGFVSNNGVLMINTVDAPGDITLGQCRIPAAKLQDTEKLQEITCE

SEQ ID NO: 5462 - protein, 207 aa, Escherichia coli
MTLPDFRFIRLLPLAALVLTACSVTTPKGPGKSPDSPQWRQHQQDVRNLNQYQTRGAFAYISDQQKVYARFFWQQTGQDRYRLLLTNPLGSTELELNAQPGNVQLVDNKGQRYTADDAEEMIGKLTGMPIPLNSLRQWILGLPGDATDYKLDDQYRLSEITYSQNGKNWKVVYGGYDTKTQPAMPANMELTDGGQRIKLKMDNWIVK

SEQ ID NO: 5463 - protein, 161 aa, Escherichia coli; identical to SEQ ID NO: 2582

SEQ ID NO: 5464 - protein, 816 aa, Escherichia coli; identical to SEQ ID NO: 4456

SEQ ID NO: 5465 - protein, 412 aa, Escherichia coli; identical to SEQ ID NO: 2908

SEQ ID NO: 5466 - protein, 331 aa, Escherichia coli; identical to SEQ ID NO: 2705

SEQ ID NO: 5467 - protein, 834 aa, Escherichia coli
MYKKLKLTTISELIKNIYCSLSVIIIGCASAYAVEFNKDLIEAEDRENVNLSQFETDGQLPVGKYSLSTLINNKRTPIHLDLQWVLINNQTAVCVTPEQLTLLGFTDEFIEKTQQNLIDGCYPIEKEKQITTYLDKGKMQLSISAPQAWLKYKDANWTPPELWNHGIAGAFLDYNLYASHYAPHQGDNSQNISSYGQAGVNLGAWRLCTDYQYDQSFNNGKSQATNLDFPRIYLFRPIPAMNAKLTIGQYDTESSIFDSFHFSGISLKSDENMLPPDLRGYAPQITGVAQTNAKVTVSQNNRIIYQENVPPGPFAITNLFNTLQGQLDVKVEEEDGRVTQWQVASNSIPYLTRKGQIRYTTAMGKPTSVGGDSLQQPFFWTGEFSWGWLNNVSLYGGSVLTKRDYQSLAAGVGFNLNSLGSLSFDVTRSDAQLHNQDKETGYSYRANYSKRFESTGSQLTFAGYRFSDKNFVTMNEYINDTNHYTNYQNEKESYIVTFNQYLESLRLNTYVSLARNTYWDASSNVNYSLSLSRDFDIGPLKNVSTSLTFSRINWEEDNQDQLYLNISIPWGTSRTLSYGMQRNQDNEISHTASWYDSSDRNNSWSVSASGDNDEFKDMKASLRASYQHNTENGRLYLSGTSQRDSYYSLNASWNGSFTATRHGAAFHDYSGSADSRFMIDADGTEDIPLNNKRAVTNRYGIGVIPSVSSYITTSLSVDTRNLPENVDIENSVITTTLTEGAIGYAKLDTRKGYQIIGVIRLADGSHPPLGISVKDETSHKELGLVADGGFVYLNGIQDDNKLALRWGDKSCFIQPPNSSNLTTGTAILPCISQN

SEQ ID NO: 5468 - protein, 266 aa, Escherichia coli; identical to SEQ ID NO: 1894

SEQ ID NO: 5469 - protein, 368 aa, Escherichia coli; identical to SEQ ID NO: 2370

SEQ ID NO: 5470 - protein, 512 aa, Escherichia coli; identical to SEQ ID NO: 2813

SEQ ID NO: 5471 - protein, 118 aa, Escherichia coli [sequence omitted]

SEQ ID NO: 5472 - protein, 686 aa, Escherichia coli
MFWRDITLSVWRKKTTGLKTKKRLLPLVLAAALCSSPVWAEEATFTANFKDTDLKSFIETVGANLNKTIIMGPGVQGKVSIRTMTPLNERQYYQLFLNLLEAQGYAVVPMENDVLKVVKSSAAKVEPLPLVGEGSDNYAGDEMVTKVVPVRNVSVRELAPILRQMIDSAGSGNVVNYDPSNVIMLTGRASVVERLTEVIQRVDHAGNRTEEVIPLDNASASEIARVLESLTKNSGENQPATLKSQIVADERTNSVIVSGDPATRDKMRRLIRRLDSEMERSGNSQVFYLKYSKAEDLVDVLKQVIGTLTAAKEEAEGTVGSGREVVSIAASKHSNALIVTAPQDIMQSLQSVIEQLDIRRAQVHVEALIVEVAEGSNINFGVQWASKDAGLMQFANGTQIPIGTLGAAISQAKPQKGSTVISENGATTINPDTNGDLSTLAQLLSGFSGTAVGVVKGDWMALVQAVKNDSSSNVLSTPSITTLDNQEAFFMVGQDVPVLTGSTVGSNNSNPFNTVERKKVGIMLKVTPQINEGNAVQMVIEQEVSKVEGQTSLDVVFGERKLKTTVLANDGELIVLGGLMDDQAGESVAKVPLLGDIPLIGNLFKSTADKKEKRNLMVFIRPTILRDGMAADGVSQRKYNYMRAEQIYRDEQGLSLMPHTAQPVLPAQNQALPPEVRAFLNAGRTR

SEQ ID NO: 5473 - protein, 660 aa, Escherichia coli; identical to SEQ ID NO: 4092

SEQ ID NO: 5474 - protein, 231 aa, Escherichia coli; identical to SEQ ID NO: 2868

SEQ ID NO: 5475 - protein, 432 aa, Escherichia coli; identical to SEQ ID NO: 2026

SEQ ID NO: 5476 - protein, 241 aa, Escherichia coli; identical to SEQ ID NO: 2887

SEQ ID NO: 5477 - protein, 362 aa, Escherichia coli; identical to SEQ ID NO: 2998

SEQ ID NO: 5478 - protein, 700 aa, Escherichia coli; identical to SEQ ID NO: 2926

SEQ ID NO: 5479 - protein, 241 aa, Escherichia coli
MFPLVKKTVSALFVSTLLASAPAFADIIISGTRIIYNADKKDVNVRLENKGNRPLLIQNWLDTGDDNADPSQIKVPFTATPPVSRVEPKRGQTVKVMYTGATALPKDRESVYWFNVLEVPPKPKDAEADKNLLQLAFRTRIKLFYRLSGLQGEPAEAPAKITWKLNNAQLQANNPTPYYVSFNEVKLESGGKTYNVNSSMVTPFSQASFGVTGLPGSVSSGKVVFKAINDFGGNIDGSATF

SEQ ID NO: 5480 - protein, 878 aa, Escherichia coli; identical to SEQ ID NO: 4404

SEQ ID NO: 5481 - protein, 203 aa, Escherichia coli; identical to SEQ ID NO: 2009

SEQ ID NO: 5482 - protein, 816 aa, Escherichia coli
MNIYRLSFVSCLVMAMPCALAVEFNLNVLDKSMRDRIDISLLKEKGVIAPGEYFVSVAVNNNQISNGQKINWQKKGDKTIPCINDSLVDKFGLKPDIRQSLPQIDRCIDFSSRPEMLFNFDQANQQLNISIPQAWLAWHSENWAPPSTWKEGVAGVLMDYNLFASNYRPQDGSSSTNLNAYGTTGINAGSWRLRSDYQLNNTDSEDSHEQSGGISRTYLFRPLPQLGSKLTLGETDFSSNIFDGFSYTGAALASDDRMLPWELRGYAPQISGIAQTNATVTISQSGRVIYQKKVPPGPFIIDDLNQSVQGTLDVKVTEEDGRVNNFQVSAASTPFLTRQGQVRYKLAAGQPRPSMSHQTENETFFSNEVSWGMLSNTSLYGGLLLSGDDYHSAAMGIGQNMLWLGALSFDVTWASSHFDTQQDERGLSYRFNYSKQVDATNSTISLAAYRFSDRHFHSYANYLDHKYNDSDAQDEKQTISLSVGQPITPLNLNLYANLLHQTWWNADASTTANITAGFNVDIGDWRDISISTSFNTTHYEDKDRDNQIYLSISLPFGNGGRVGYDMQNSSHSTTHRMSWNDTLDERNSWGMSAGLQSDRPDNGAQVSGNYQHLSSAGEWDISGTYAANDYSSVSSSWSGSFTATQYGAAFHRRSSTNEPRLMVSTDGVADIPVQGNLDYTNHFGIAVVPLISSYQPSTVAVNMNDLPDGVTVAENVIKETWIEGAIGYKSLASRSGKDVNVIIRNASGQFPPLGADIRQDDSGISVGMVGEEGHAWLSGVAENQKFTVVWGDSQHCSLHLPEHMEDTANRLILPCH

SEQ ID NO: 5483 - protein, 430 aa, Escherichia coli; identical to SEQ ID NO: 2617

SEQ ID NO: 5484 - protein, 518 aa, Escherichia coli; identical to SEQ ID NO: 2349

SEQ ID NO: 5485 - protein, 881 aa, Escherichia coli
MPDHSLFRLRILPWCIALAMSGSYSSVWAEDDIQFDSRFLELKGDTKIDLKRFSSQGYVEPGKYNLQVQLNKQPLAEEYDIYWYAGEDDVSKSYACLTPELVAQFGLKEDVAKNLQWSHDGKCLKPGQLEGMEIKADLSQSALVISLPQAYLEYTWPDWDPPSRWDDGISGIIADYSITAQTRHEENGGDDSNEISGNGTVGVNLGPWRMRADWQTNYQHTRSNDDDEEFSGDDTQKKWEWSRYYAWRALPSLKAKLALGEDYLNSDIFDGFNYVGGSVSTDDQMLPPNLRGYAPDISGVAHTTAKVTVSQMGRVIYETQVPAGPFRIQDLGDSISGTLHVRIEEQNGQVQEYDISTASMPYLTRPGQVRYKIMMGRPQEWGHHVEGGFFSGAEASWGIANGWSLYGGALGDENYQSAALGVGRDLSTFGAVAFDVTHSHTKLDKDTAYGKGSLDGNSFRVSYSKDFDQLNSRVTFAGYRFSEENFMTMSEYLDASDSEMVRTGNDKEMYTATYNQNFRDAGVSVYLNYTRHTYWDREEQTNYNIMLSHYFNMGSIRNMSVSLTGYRYEYDNRADKGMYISLSMPWGDNSTVSYNGNYGSGTDSSQVGYFSRVDDATHYQLNVGTSDKHTSVDSYYSHDGSLAQVDLSANYHEGQYTSAGLSLQGGATLTTHGGALHRTQNMGGTRLLIDADGVADVPVEGNGAAVYTNMFGKAVVSDVNNYYRNQAYIDLNKLPENAETTQSVVQATLTEGAIGYRKFAVISGQKAMAVLRLQDGSHPPFGAEVKNDNEQTVGLVDDDGNVYLAGVKPGEHMSVFWSGVAHCDINLPDPLPADLFNGLLLPCQHKGNVAPVVPDDIKPVIQEQTQQVTPTDPPVSVSANQ

SEQ ID NO: 5486 - protein, 359 aa, Escherichia coli; identical to SEQ ID NO: 2332

SEQ ID NO: 5487 - protein, 836 aa, Escherichia coli
MKDRIPFAVNNITCVILLSLFCNAASAVEFNTDVLDAADKKNIDFTRFSEAGYVLPGQYLLDVIVNGQSISPASLQISFVEPQSSGDKAEKKLPQACLTSDMVRLMGLTAESLDKVVYWHDGQCADFHGLPGVDIRPDTGAGVLRINMPQAWLEYSDATWLPPSRWDDGIPGLMLDYNLNGTVSRNYQGGDSHQFSYNGTVGGNLGPWRLRADYQGSREQSRYNGEKTTNRNFTWSRFYLFRAIPRWRANLTLGENNINSDIFRSWSYTGASLESDDRMLPPRLRGYAPQITGIAETNARVVVSQQGRVLYDSMVPAGPFSIQDLDSSVRGRLDVEVIEQNGRKKTFQVDTASVPYLTRPGQVRYKLVSGRSRGYGHETEGPVFATGEASWGLSNQWSLYGGAVLAGDYNALAAGAGWDLGVPGTLSADITQSVARIEGERTFQGKSWRLSYSKRFDNADADITFAGYRFSERNYMTMEQYLNARYRNDYSSREKEMYTVTLNKNVADWNTSFNLQYSRQTYWDIRKTDYYTVSVNRYFNVFGLQGVAVGLSASRSKYLGRDNDSAYLRISVPLGTGTASYSGSMSNDRYVNMAGYTDTFNDGLDSYSLNAGLNSGGGLTSQRQINAYYSHRSPLANLSANIASLQKGYTSFGVSASGGATITGKGAALHAGGMSGGTRLLVDTDGVGGVPVDGGQVVTNRWGTGVVTDISSYYRNTTSVDLKRLPDDVEATRSVVESALTEGAIGYRKFSVLKGKRLFAILRLADGSQPPFGASVTSEKGRELGMVADEGLAWLSGVTPGETLSVNWDGKIQCQVNVPETAISDQQLLLPCTPQK

SEQ ID NO: 5488 - protein, 368 aa, Escherichia coli; identical to SEQ ID NO: 3171

SEQ ID NO: 5489 - protein, 879 aa, Escherichia coli
MPDHSLFRLRVLPCCVALAMSGSYVNAWAENEIQFDSRFLELKGDTKIDLKRFSSQGYVEPGKYNLQVQLNKQPLTEEYDIYWYASENDASKTYACLTPELVAQFGLKEDVAKNLQWIHDGKCLKPGQLEGIDIKADLSQSALVISLPQAYLEYTDINWDPPSRWDDGISGLIADYSITAQTRHEENGGDDSNEISGNGTVGVNLGAWRLRADWQTDYLHSKSNDDDVINGDDTQKNWEWSRYYAWRALPSLKAKLGLGEDYLNSDIFDGFNYVGGSISTDDQMLPPNLRGYAPDISGVAHTTAKVTVSQLGRVIYETQVPAGPFRIQDLGDSVSGTLHIRIEEQNGQVQEYDINTASMPFLTRPGQVRYKLMMGRPQEWGHHVEGGFFSGGEASWGIANGWSLYGGALADEYYQSAALGVGRDLSVFGAVAFDITHSHTRLDKETAYGKGSLDGNSFRLSYSKDFDELNSRVTFAGYRFSEENFMTMSEYLDASDSEMVRTGNDKEMYTATYNQNFRDAGVSVYLNYTGHTYWDRDEQTNYNVMLSHYFNLGSIRNMSISMTGYRYEYDNQADKGVYISLSMPWGDSSTISYNGNYGSGSDSSQVGYFSRVDDATHYQLNVGTSDNHSSVDGYYSHDGSLAQVDLSANYHEGQYTSAGISLQGGATLTAQGGALHRTQNMGGTRLLIDADGVAGVPVEGNGAAVYTNMFGKAVVADVNNYYRNQAYIDLNNLPENAEATQSVVQATLTEGAIGYRKFSVISGQKAMAVLRLQDGSYPPFGAEVKNDSAQNVGLVDDDGNVYLAGVKPGEHMIVSWGGVAHCDIHLPDPLPADLFNGLLLPCQQTGSISPSMPHEIKPVIQEQTQQVMPTEAPVSVSAN

SEQ ID NO: 5490 - protein, 851 aa, Escherichia coli
MPSFIGGLVVFVSAAFNAQAETWFDPAFFKDDPSMVADLSRFEKGQKITPGVYRVDIVLNQTIVDTRNVNFVELTPEKGIAACLTTESLDAMGVNTDAFPAFKQLDKQECALLAEIIPDASVTFNVNKLRLEISVPQIAIKSNARGYVPPERWDEGINALLLGYSFSGANSIHSSADSDSGDSYFLNLNSGVNLGPWRLRNNSTWSRSSGQTAEWKNLSSYLQRAVIPLKGELTVGDDYTAGDFFDSVSFRGVQLASDDNMLPDSLKGFAPVVRGIAKSNAQITIKQNGYTIYQTYVSPGAFEISDLYSTSSSGDLLVEIKEADGSVNSYSVPFSSVPLLQRQGRIKYAVTLAKYRTNSNEQQESKFAQATLQWGGPWGTTWYGGGQYAEYYRAAMFGLGFNLGDFGAISFDATQAKSTLADQSEHKGQSYRFLYAKTLNQLGTNFQLMGYRYSTSGFYTLSDTMYKHMDGYEFNDGDDEDTPMWSRYYNLFYTKRGKLQVNISQQLGEYGSFYLSGSQQTYWHTDQQDRLLQFGYNTQIKDLSLGVSWNYSKSRGQPDADQVFALNFSLPLNLLLPRSNDSYTRKKNYAWMTSNTSIDNEGHITQNLGLTETLLDDGNLSYSVQQGYNSEGKTANGSASMDYKGAFADARVGYNYSDNGSQQQLNYALSGSLVAHSQGITLGQSLGETNVLIAAPGAENTRVANSTGLKTDWRGYTVVPYATSYRENRIALDAASLKRNVDLENAVVNVVPTKGALVLAEFNAHTGARVLMKTSKQGIPLRFGAIATLDGVQANSGIIDDDGSLYMAGLPAKGTISVRWGEAPDQICHINYELTEQQINSAITRMDAICR

SEQ ID NO: 5491 - protein, 869 aa, Escherichia coli
MKIPTTTDIPQRYTWCLAGICYSSLAILPSFLSYAESYFNPAFLLENGTSVADLSRFERGNHQPAGVYRVDLWRNDEFIGSQDIVFESTTENTGDKSGGLMPCFNQVLLERIGLNSSAFPELAQQQNNKCINLLKAVPDATINFDFAAMRLNITIPQIALLSSAHGYIPPEEWDEGIPALLLNYNFTGNRGNGNDSYFFSELSGVNIAPWRLRNNGSWNYFRGNGYHSEQWNNIGTWVQRAIIPLKSELVMGDGNTGSDIFDGVGFRGVRLYSSDNMYPDSQQGFAPTVRGIARTAAQLTIRQNGFIIYQSYVSPGAFEITDLHPTSSNGDLDVTIDERDGNQQNYTIPYSTVPILQREGRFKFDLTAGDFRSGNSQQSSPFFFQGTALGGLPQEFTAYGGTQLSANYTAFLLGLGRNLGNWGAVSLDVTHARSQLADDSRHEGDSIRFLYAKSMNTFGTNFQLMGYRYSTQGFYTLDDVAYRRMEGYEYDYDYDGEHRDEPIIVNYHNLRFSRKDRLQLNISQSLNDFGSLYISGTHQKYWNTSDSDTWYQVGYTSSWVGISYSLSFSWNESVGIPDNERIVGLNVSVPFNVLTKRRYTRENALDRAYASFNANRNSNGQNSWLAGVGGTLLEGHNLSYHVSQGDTSNNGYTGSATANWQAAYGTLGVGYNYDRDQHDVNWQLSGGVVGHENGITLSQPLGDTNVLIKAPGAGGVRIENQTGILTDWRGYAVMPYATVYRYNRIALDTNTMGNSIDVEKNISSVVPTQGALVRANFDTRIGVRALITVTQGGKPVPFGSLVRENSTGITSMVGDDGQVYLSGAPLSGELLVQWGDGANSRCIAHYVLPKQSLQQAVTVISAVCTHPGS

SEQ ID NO: 5492 - protein, 228 aa, Escherichia coli
MKSKFVALALSLFLSQSVLAGGVGLSSTRVIYDGSKKEASLTVQNKSKTEEFLIQSWVDDAAGSKKTPFIITPPLFKLDPEKNNILRIVNITPGLPQDRESVYWVNVKAIPSKSDDSENKNVLQIAVRTRIKLFYRPAGLKGDVKTAPNELRFTRNGNQLRVDNPTVFNITFNQFFANDKEIEKAGMVPAKGALNITLPAGVGSVSKIKYNTINDFGSSAEMITKNVD

SEQ ID NO: 5493 - protein, 869 aa, Escherichia coli; identical to SEQ ID NO: 3173

SEQ ID NO: 5494 - protein, 87 aa, Escherichia coli
MKKMIIAVLFGLFSANSMAADCAVGKIEFSKYNEDNTFTVRVSGREYWTNRWNLQPLLQSAQLTGMTVTIISNTCSSGSGFAQVKFN

SEQ ID NO: 5495 - protein, 869 aa, Escherichia coli
MKIPTTTDIPQRYTWCLAGICYSSLAILPSFLSYAESYFNPAFLLENGTSVADLSRFERGNHQPAGVYRVDLWRNDEFIGSQDIVFESTTENTGDKSGGLMPCFNQVLLERIGLNSSAFPELAQQQNNKCINLLKAVPDATINFDFAVMRLNITIPQIALLSSAHGYIPPEEWDEGVPALLLNYNFTGNRGNGNDSYFFSELSGINIGPWRLRNNGSWNYFRGNGYHSEQWNNIGTWVQRAIIPLKSELVMGDGNTGSDIFDGVGFRGVRLYSSDNMYPDSQQGFAPTVRGIARTAAQLTIRQNGFIIYQSYVSPGAFEITDLHPTSSNGDLDVTIDERDGNQQNYTIPYSTVPILQREGRFKFDLTAGDFRSSNSQQSSPFFFQGTALGGLPQEFTAYGGTQLSANYTAFLLGLGRNLGNWGAVSLDVTHARSQLADDSRHEGDSIRFLYAKSMNTFGTNFQLMGYRYSTQGFYTLDDVAYRRMEGYEYDYDYDGEHRDEPIIVNYHNLRFSRKDRLQLNISQSLNDFGSLYISGTHQKYWNTSDSDTWYQVGYTSSWVGISYSLSFSWNESVGIPDNERIVGLNVSVPFNVLTKRRYTRENALDRAYASFNANRNSNGQNSWLAGVGGTLLEGHNLSYHVSQGDTSNNGYTGSATANWQAAYGTLGVGYNYDRDQHDVNWQLSGGVVGHENGITLSQPLGDTNVLIKAPGAGGVRIENQTGILTDWRGYAVMPYATVYRYNRIALDTNTMGNSIDVEKNISSVVPTQGALVRANFDTRIGVRALITVTQGGKPVPFGSLVRENSTGITSMVGDDGQVYLSGAPLSGELLVQWGDGANSRCIAHYVLPKQSLQQAVTVISAVCTHPGS

SEQ ID NO: 5496 - protein, 203 aa, Escherichia coli; identical to SEQ ID NO: 2201

SEQ ID NO: 5497 - protein, 229 aa, Escherichia coli
MALLIFAVLSLLVAGELQAGVVVGGTRFIFPADRESISILLTNTSQESWLINSKINRPTRWAGGEASTVPAPLLAAPPLILLKPGTTGTLRLLRTESDILPVDRETLFELSIASVPSGKVENQSVKVAMRSVFKLFWRPEGLPGDPLEAYQQLRWTRKSQGVQLTNPTPYYINLIQVSVNGKALSNVGVVPPKSQRQTSWCQAIAPCHVAWRAINDYGGLSAKKEQNLP

SEQ ID NO: 5498 - protein, 233 aa, Escherichia coli; identical to SEQ ID NO: 3548

SEQ ID NO: 5499 - protein, 366 aa, Escherichia coli
MKLKIVAVVVTGLLAANVAHAAEVYNKDGNKLDLYGKVTALRYFTDDKRDDGDKTYARLGFKGETQINDQMIGFGHWEYDFKGYNDEANGSRDNKTRLAYAGLKISEFGSLDYGRNYGVGYDIGSWTDMLPEFGGDTWSQKDVFMTYRTTGVATYRNYDFFGLIEGLNFAAQYQGKNERTDNSHLYGADYTRANGDGFGISSTYVYDGFGIGAVYTKSDRTNAQERAAANPLNASGKNAELWATGIKYDANNIYFAANYAETLNMTTYGDGYISNKAQSFEVVAQYQFDFGLHPSLAYLKSKGIDLGRYGDQDMIEYIDVGATYFFNKNMSTYVDYKINLIDESDFTRAVDIRTDNIVATGITYQF

SEQ ID NO: 5500 - protein, 883 aa, Escherichia coli
MTAFRAAFKAYRMHQVLLLPRFARLTIALSLATAVFPVDAEYYFNPRFLSNDLAESVDLSAFTKGREAPPGTYRVDIYLNDEFMTSRDITFITDDNNADLIPCLSTDLLVSLGIKKSALLDNKEHSAEKHVPDNSACTPLQDRLVDASTEFDVGQQHLSLSVPQIYVGRMARGYVSPDLWEEGINAGLLNYSFNGNSINNRSNHNAGKSNYAYLNLQSGINIGSWRLRDNSTWSYNSGSSNSSDSNKWQHINTSAERDIIPLRSRLTVGDSYTDGDIFDSVNFRGLKINSTEAMLPDSQHGFAPVIHGIARGTAQVSVKQNGYDVYQTTVPPGPFTIDDINSAANGGDLQVTIKEADGSIQTLYVPYSSVPVLQRAGYTRYALAMGEYRSGNNLQSSPRFIQGSLMHGLEGNWTPYGGMQIAEDYQAFNLGIGKDLGLFGAFSFDITQANTTLADGTRHSGQSVKSVYSKSFYQTGTNIQVAGYRYSTQGFYNLSDSAYSRMSGYTVKPPTGDSNEQTQFIDYFNLFYSKRGQEQISISQQLGNYGTTFFSASRQSYWNTSRSDQQISFGLNVPFGDITTSLNYSYSNNIWQNDRDHLLAFTLNVPFSHWMRTDSQSAFRNSNASYSMSNDLKGGMTNLSGVYGTLLPDNNLNYSVQVGNTHGGNTSSGTSGYSTLNYRGAYGNTNVGYSRSGDSSQIYYGMSGGIIAHADGITFGQPLGDTMVLVKAPGADNVKIENQTGIHTDWRGYAILPFATEYRENRVALNANSLADNVELDETVVTVIPTHGAIARATFNAQIGGKVLMTLKYGNKSVPFGAIVTHGENKNGSIVAENGQVYLTGLPQSGKLQVSWGNDKNSNCIVDYKLPEVSPGTLLNQQTAICR

SEQ ID NO: 5501 - protein, 239 aa, Escherichia coli; identical to SEQ ID NO: 4453

SEQ ID NO: 5502 - protein, 252 aa, Escherichia coli
MTNLFCSARTAATTLALLITAASLSVQASVTPDRTRLIFNESDKSISVTLRNNDPKMPYLAQSWMEDGQGNRISSPLTVLPPVQRIDSMMNGQVKVQGMPDINKLPADRESVFYFNVREIPPKSNKPNTLQIALQTRIKLFWRPKALENVSMKNPWQHKVTLTRSGQEFTVNNPTPYFVVISNASAQKNGNPAAGFSPMVISPKTSVPLKVKMDSVPVLTYVNDYGARLPLFFRCTGNTCQVDEEQNSKGQG

SEQ ID NO: 5503 - protein, 614 aa, Escherichia coli; identical to SEQ ID NO: 4469

SEQ ID NO: 5504 - protein, 237 aa, Escherichia coli; identical to SEQ ID NO: 2816

SEQ ID NO: 5505 - protein, 351 aa, Escherichia coli; identical to SEQ ID NO: 2872

SEQ ID NO: 5506 - protein, 517 aa, Escherichia coli; identical to SEQ ID NO: 2462

SEQ ID NO: 5507 - protein, 191 aa, Escherichia coli; identical to SEQ ID NO: 2727

SEQ ID NO: 5508 - protein, 729 aa, Escherichia coli; identical to SEQ ID NO: 2948

SEQ ID NO: 5509 - protein, 213 aa, Escherichia coli; identical to SEQ ID NO: 2232

SEQ ID NO: 5510 - protein, 243 aa, Escherichia coli; identical to SEQ ID NO: 4409

SEQ ID NO: 5511 - protein, 249 aa, Escherichia coli; identical to SEQ ID NO: 2793

SEQ ID NO: 5512 - protein, 119 aa, Escherichia coli
MNTVLSVQGASAPVEKKSFFSKFTCLNMLRLVRAVIPVAVLMMLFPELAMAAGKGDLMAKGQETVKATFGKNSSIVKWIVLAEVLVGAVMYMMTKNIKFLVGFAILSVFIAVGMSVAGF

SEQ ID NO: 5513 - protein, 782 aa, Escherichia coli
MKKRIPTLLATMIATALYSQQGLAADLASQCMLGVPSYDRPLVQGDTNDLPVTINADHAKGDYPDDAVFTGSVDIMQGNSRLQADEVQLHQAPGQPEPVRTVDALGNVHYDDNQVILKGPKGWANLNTKDTNVWEGDYQMVGRQGRGKADLMKQRGENRYTILDNGSFTSCLPGSDTWSVVGSEIIHDREEQVAEIWNARFKVGPVPIFYSPYLQLPVGDKRRSGFLIPNAKYTTTNYFEFYLPYYWNIAPNMDATITPHYMHRRGNIMWENEFRYLSQAGAGLMELDYLPSDKVYEDEHPNDDSSRRWLFYWNHSGVMDQVWRFNVDYTKVSDPSYFNDFDNKYGSSTDGYATQKFSVGYAVQNFNATVSTKQFQVFSEQNTSSYSAEPQLDVNYYQNDVGPFDTRIYGQAVHFVNTRDDMPEATRVHLEPTINLPLSNNWGSINTEAKLLATHYQQTNLDWYNSRNTTKLDESVNRVMPQFKVDGKMVFERDMEMLAPGYTQTLEPRAQYLYVPYRDQSDIYNYDSSLLQSDYSGLFRDRTYGGLDRIASANQVTTGVTSRIYDDAAVERFNISVGQIYYFTESRTGDDNITWENDDKTGSLVWAGDTYWRISERWGLRGGIQYDTRLDNVATSNSSIEYRRDEDRLVQLNYRYASPEYIQATLPKYYSTAEQYKNGISQVGAVASWPIADRWSIVGAYYYDTNANKQADSMLGVQYSSCCYAIRVGYERKLNGWDNDKQHAVYDNAIGFNIELRGLSSNYGLGTQEMLRSNILPYQNTL

SEQ ID NO: 5514 - protein, 478 aa, Escherichia coli; identical to SEQ ID NO: 2404

SEQ ID NO: 5515 - protein, 407 aa, Escherichia coli
MTERELSIIRALGEEFATVLADLQRTFEEKMAAQAQAFEEKLASLSAVLQKHVTVDEVHPVLQAMVDDAVGTIPVPRDGRDYDPDVLQQAVNDAVANIPVPADGKSITPDDVRPMLEQMVKEAVSHIPAPRDGRDYDPEVLKQVVNDAVGSIPVPADGKSLTPDDVRPMLEQMVKEAVSHIPVPRDGRDYDPEVLKQAVNDAVAKIPVPADGKSITPDDVRPMLEQMVKEAVSHIPAPRDGRDYDPDVLRKAVLEAVNALPAPQDGRDATALEVLPAIDDQKSFPRGTYATHLGGFWRAYEKTHGMRGWECLVDGVADIDVSMTGERLFSVVIRHSSGQRTEKTFSLPVMLYRGVFRAGETYHPGDTVTWGGSLWHCNSMTGDKPGEAHSSGWTLAAKRGRDAGGGK

SEQ ID NO: 5516 - protein, 395 aa, Escherichia coli
MKRKVLAMLVPALLVAGAANAAEIYNKDGNKLDLYGKVAGLHYFSDDASSDGDMSYARIGFKGETQIADQFTGYGQWEFNIGANGPESDKGNTATRLAFAGFGFGQNGTFDYGRNYGVVYDVEAWTDMLPEFGGDTYAGADNFMNGRANSVATYRNNGFFGQVDGLNFALQYQGNNEKSGLFDQEGSGNGNGRKLAKENGDGYGMSTSYDFDFGLSLGAAYSNSDRTDNQVHKGTHNTRYGDRFDATAGGETAEAWTVGAKYDANNVYLAAMYAETRNMTGYGDADAIANKTQNFEVVAQYQFDFGLRPSIAYLQSKGKDLGGVNSDNFDSQGNHHYTNKDLVKYVDIGMTYYFNKNMSTYVDYKINLLDNDDDFYKENGIATDDIVAVGLVYQF

SEQ ID NO: 5517 - protein, 747 aa, Escherichia coli; identical to SEQ ID NO: 2954

SEQ ID NO: 5518 - protein, 1024 aa, Escherichia coli
MPTITTAQIKSTLQSAKQSAANKLHSAGQSTKDALKKAAEQTRNAGNRLILLIPKDYKGQGSSLNDLVRTADELGIEVQYDEKNGTAITKQVFGTAEKLIGLTERGVTIFAPQLDKLLQKYQKAGNKLGGSAENIGDNLGKAGGILSTFQNFLGTALSSMKIDELINKQKSGGNVSSSEMAEASIELINQLVDTAASLNNNVNSFSQQLNTLGSVLSNTKHLNGVGNKLQNLPNLDNIGAGLDTVSGILSAISASFILSNADADTRTKAAAGVELTTKVLGNVGKGISQYIIAQRAAQGLSTSAAAAGLIASAVTLAISPLSFLSIADKFKRANKIEEYSQRFKKLGYDGDSLLAAFHKETGAIDASLTTISTVLASVSSGISAAATTSLVGAPVSALVGAVTGIISGILEASKQAMFEHVASKMADVIAEWEKKHGKNYFENGYDARHAAFLEDNFKILSQYNKEYSVERSVLITQQHWDTLIGELAGVTRNGDKTLSGKSYIDYYEEGKRLEKKPDEFQKQVFDPLKGNIDLSDSKSSTLLKFVTPLLTPGEEIRERRQSGKYEYITELLVKGVDKWTVKGVQDKGAVYDYSNLIQHASVGNNQYREIRIESHLGDGDDKVFLSAGSANIYAGKGHDVVYYDKTDTGYLTIDGTKATEAGNYTVTRVLGGDVKVLQEVVKEQEVSVGKRTEKTQYRSYEFTHINGKNLTETDNLYSVEELIGTTRADKFFGSKFTDIFHGADGDDLIEGNDGNDRLYGDKGNDTLSGGNGDDQLYGGDGNDKLIGGAGNNYLNGGDGDDELQVQGNSLAKNVLFGGKGNDKLYGSEGADLLDGGEGNDLLKGGYGNDIYRYLSGYGHHIIDDDGGKEDKLSLADIDFRDVAFKREGNDLIMYKAEGNVLSIGHENGITFRNWFEKESGDISNHQIEQIFDKGGRIITPDSLKKALEYQQRNNKASYVYGNDALAYGSQDDLNPLINEISKIISAAGNFDVKEERTAASLLQLSGNASDFSYGRNSITLTTSA

SEQ ID NO: 5519 - protein, 517 aa, Escherichia coli; identical to SEQ ID NO: 3116

SEQ ID NO: 5520 - protein, 678 aa, Escherichia coli
MVPSTFSRLKAARCLPVVLAALIFAGCGTHTPDQSTAYMQGTAQADSAFYLQQMQQSSDDTRINWQLLAIRALVKEGKTGQAVELFNQLPQELNDAQRREKTLLAVEIKLAQKDFASAQNLLAKITPADLEQNQQARYWQAKIDASQGRPSIDLLRALIAQEPLLGAKEKQQNIDATWQALSSMTQEQANTLVINADENILQGWLDLQRVWFDNRNDPDMMKAGIADWQKRYPNNPGAKMLPTQLVNVKAFKPASTNKIALLLPLNGQAAVFGRTIQQGFEAAKNIGTQPVAAQVAAAPAADVAEQPQPQTVDGVASPAQASVSDLTGEQPAAQPVPVSAPATSTAAVSAPANPSAELKIYDTSSQPLSQILSQVQQDGASIVVGPLLKNNVEELLKSNTPLNVLALNQPENIENRVNICYFALSPEDEARDAARHIRDQGKQAPLVLIPRSSLGDRVANAFAQEWQKLGGGTVLQQKFGSTSELRAGVNGGSGIALTGSPITLRATTDSGMTTNNPTLQTTPTDDQFTNNGGRVDAVYIVATPGEIAFIKPMIAMRNGSQSGATLYASSRSAQGTAGPDFRLEMEGLQYSEIPMLAGGNLPLMQQALSAVNNDYSLARMYAMGVDAWSLANHFSQMRQVQGFEINGNTGSLTANPDCVINRKLSWLQYQQGQVVPVS

SEQ ID NO: 5521 - protein, 539 aa, Escherichia coli; identical to SEQ ID NO: 3050

SEQ ID NO: 5522 - protein, 700 aa, Escherichia coli
MKIFSVRQTVLPALLALSPVVFAADEQTMIVSAAPQVVSELDTPAAVSVVDGEEMRLATPRINLSESLTGVPGLQVQNRQNYAQDLQLSIRGFGSRSTYGIRGIRLYVDGIPATMPDGQGQTSNIDLSSVQNVEVLRGPFSALYGNASGGVMNVTTQTGQQPPTVEASSYYGSFGSWRYGLKATGATGDGTQPGDVDYTVSTTRFTTHGYRDHSGAQKNLANAKLGVRIDDASKLSLIFNSVDIKADDPGGLTKAEWKANPQQAPRAEQYDTRKTIKQTQAGLRYERSLSAQDDMSVMMYAGERETTQYQSIPMAPQLNPSHAGGVITLQRHYQGIDSRWTHRGELGVPVTFTTGLNYENMSENRKGYNNFRLNSGVPEYGQKGELRRDERNLMWNVDPYLQTQWQLSEKLSLDAGVRYSSVWFDSNDHYVTPGNGDDSGDASYHKWLPAGSLKYAMTDAWNIYLAAGRGFETPTVNELSYRADGQSGMNFGLKPSTNDTIEIGSKTRIGDGLLSLALFQTDTDDEIVVDSSSGGRTTYKNAGKTRRQGAELAWDQRFAGDFRVNASWTWLDATYRSNVCNEQDCNGNRMPGIARNMGFASIGYVPEDGWYAGTEARYMGDIMADDENTAKAPSYTLVGLFTGYKYNYHNLTVDLFGRVDNLFDKEYVGSVIVNESNGRYYEPAPGRNYGVGMNIAWRFE

SEQ ID NO: 5523 - protein, 170 aa, Escherichia coli
MSGILTRWRQFGKRYFWPHLLLGMVAASLGLPALSNAAEPNAPAKATTRNHEPSAKVNFGQLALLEANTRRPNSNYSVDYWHQHAIRTVIRHLSFAMAPQTLPVAEESLPLQAQHLALLDTLSALLTQEGTPSEKGYRIDYAHFTPQAKFSTPVWISQAQGIRAGPQRLC

SEQ ID NO: 5524 - protein, 729 aa, Escherichia coli; identical to SEQ ID NO: 2074

SEQ ID NO: 5525 - protein, 224 aa, Escherichia coli
MKGLLSLLIFSMVLPAHAGIVIYGTRIIYPAENKEVMVQLMNQGNCSSLLQAWIDDGDTSLPPEKIQVPFMLTPPVAKIGANSGQQVKIKIMPNKLPTNKESIFYLNVLDIPPNSPEQEGKNALKFAMQNRIKLFYRPAGIAPVNKATFKKLLVNRSGNGLVIKNDSANWVTISDVKANNVKVNYETIMIAPLESQSVNVKSNNANNWHLTIIDDHGNYISDKI

SEQ ID NO: 5526 - protein, 161 aa, Escherichia coli; identical to SEQ ID NO: 2582

SEQ ID NO: 5527 - protein, 224 aa, Escherichia coli
MTVSLTAILLSCSSAWAAGKGGIGLAATRLVYSEGEEQISLGVRNTSPDVPYLIQSWVMTPDNKKSADFIITPLLFVLNPANENLLRIMYIGAPLAKDRETLFFTSVRAVPSTTKREEGNTLKIATQSVIKLFWRPKGLAYPLAEAPAKLRCTSSADMVTVSNPTPYFITLTDLKIGGKVVKNQMISPFDKYQFSLPKGAKNSSVTYRTINDYGAETPQLNCKS

SEQ ID NO: 5528 - protein, 213 aa, Escherichia coli; identical to SEQ ID NO: 2232

SEQ ID NO: 5529 - protein, 430 aa, Escherichia coli; identical to SEQ ID NO: 2617

SEQ ID NO: 5530 - protein, 199 aa, Escherichia coli; identical to SEQ ID NO: 3190

SEQ ID NO: 5531 - protein, 232 aa, Escherichia coli; identical to SEQ ID NO: 2087

SEQ ID NO: 5532 - protein, 746 aa, Escherichia coli; identical to SEQ ID NO: 2949

SEQ ID NO: 5533 - protein, 631 aa, Escherichia coli
MVVTASSVEQNLKDAPASISVITQEDLQRKPVQNLKDVLKEVPGVQLTNEGDNRKGVSIRGLDSSYTLILVDGKRVNSRNAVFRHNDFDLNWIPVDSIERIEVVRGPMSSLYGSDALGGVVNIITKKIGQKWSGTVTVDTTVQEHRDRGDTYNGQFFTSGPLIDGVLGMKAYGSLAKREKDDPQNSTTTDTGETPRIEGFSSRDGNVEFAWTPNQNHDFTAGYGFDRQDRDSDSLDKNRLERQNYSVSHNGRWDYGTSELKYYGEKVENKNPGNSSPITSESNTVDGKYTLPLTAINQFLTVGGEWRHDKLSDAVNLTGGTSSKTSASQYALFVEDEWRIFEPLALTTGVRMDDHETYGEHWSPRAYLVYNATDTVTVKGGWATAFKAPSLLQLSPDWTSNSCRGACKIVGSPDLKPETSESWELGLYYMGEEGWLEGVESSVTVFRNDVKDRISISRTSDVNAAPGYQNFVGFETGANGRRIPVFSYYNVNKARIQGVETELKIPFNDEWKLSINYTYNDGRGVSNGENKPLSDLPFHTANGTLDWKPLALEDWSFYVSGHYTGQKRADSATAKTPGGYTIWNTGAAWQVTKDVKLRAGVLNLGDKDLSRDDYSYNEDGRRYFMAVDYRF

SEQ ID NO: 5534 - protein, 518 aa, Escherichia coli; identical to SEQ ID NO: 2349

SEQ ID NO: 5535 - protein, 246 aa, Escherichia coli; identical to SEQ ID NO: 1985

SEQ ID NO: 5536 - protein, 747 aa, Escherichia coli; identical to SEQ ID NO: 2072

SEQ ID NO: 5537 - protein, 161 aa, Escherichia coli; identical to SEQ ID NO: 2582

SEQ ID NO: 5538 - protein, 193 aa, Escherichia coli; identical to SEQ ID NO: 2246

SEQ ID NO: 5539 - protein, 243 aa, Escherichia coli
MTFMKGLPLLLLVASLCSHAALQPDRTRIVFNANDKATSLRVDNRSDKLPYLAYSWLENEKGEKSDDLLVALPPIQRLEPKATTQVRIVKQASTAKLPGDRETLFFYNMREIPPAPEKNSGHAVLQVAIQSRIKVFWRPAALRKKAGEKVELQLQVSQQGNQLTLKNPTAYYLTIAYLGRNEKGVFPGFKTVMIAPFSTVNTNTGSYSGSQFYLGYMDDYGALRMTTLNCSGECRLQAVEAKK

SEQ ID NO: 5540 - protein, 828 aa, Escherichia coli; identical to SEQ ID NO: 2386

SEQ ID NO: 5541 - protein, 376 aa, Escherichia coli
MKVKVLSLLVPALLVAGAANAAEVYNKDGNKLDLYGKVDGLHYFSDNKSEDGDQTYVRLGFKGETQVTDQLTGYGQWEYQIQGNTSEDNKENSWTRVAFAGLKFQDVGSFDYGRNYGVVYDVTSWTDVLPEFGGDTYGSDNFMQQRGNGFATYRNTDFFGLIDGLNFAVQYQGKNGSVSGEGMTNNGRVALRQNGDGVGGSITYDYEGFGIGAAVSSSKRTDDQNGSYTSNGVARNYIGTGDRAETYTGGLKYDANNIYLAAQYTQTYNATRVGSLGWANKAQNFEAVAQYQFDFGLRPSLAYLQSKGKNLGVINGRNYDDEDILKYVDVGATYYFNKNMSTYVDYKINLLDDNQFTRDAGINTDNIVALGLVYQF

SEQ ID NO: 5542 - protein, 203 aa, Escherichia coli; identical to SEQ ID NO: 2015

SEQ ID NO: 5543 - protein, 207 aa, Escherichia coli; identical to SEQ ID NO: 2211

SEQ ID NO: 5544 - protein, 897 aa, Escherichia coli; identical to SEQ ID NO: 1908

SEQ ID NO: 5545 - protein, 351 aa, Escherichia coli; identical to SEQ ID NO: 2519

SEQ ID NO: 5546 - protein, 359 aa, Escherichia coli
MKKYLALALIAPLLISCSTTKKGDIYNEAWVKDTNGFDILMGQFAHNIENIWGFKEVVIAGPKDYVKYTDQYQTRSHINFDDGTITIETIAGTEPAAHLRRAIIKTLLMGDDPSSVDLYSDVDDITISKEPFLYGQVVDNTGQPIRWEGRASNFADYLLKNRLKSRSNGLRIIYSVTINMVPNHLDKRAHKYLGMVRQASRKYGVDESLILAIMQTESSFNPYAVSRSDALGLMQVVQHTAGKDVFRSQGKSGTPSRSFLFDPASNIDTGTAYLAMLNNVYLGGIDNPTSRRYAVITAYNGGAGSVLRVFSNDKIQAANIINTMTPGDVYQTLTTRHPSAESRRYLYKVNTAQKSYRRR

SEQ ID NO: 5547 - protein, 446 aa, Escherichia coli
MMITLRKLPLAVAVAAGVMSAQAMAVDFHGYARSGIGWTGSGGEQQCFQTTGAQSKYRLGNECETYAELKLGQEVWKEGDKSFYFDTNVAYSVAQQNDWEATDPAFREANVQGKNLIEWLPGSTIWAGKRFYQRHDVHMIDFYYWDISGPGAGLENIDVGFGKLSLAVTRSSEAGGSSSFASNNIYDYTNETANDVFDVRLAQMEINPGGTLELGVDYGRANLRDNYRLVDGASKDGWLFTAEHTQSVLKGFNKFVVQYATDSMTSQGKGLSQGSGVAYVDEKFSYDINNNGHMLRILDHGAISMGDNWDMMYVGMYQDINWDNDNGTKWWTVGIRPMYKWTPIMSTLMEIGYDNVKSQRTGDTNNQYKITLAQQWQAGDSIWSRPAIRVFATYAKWDEKWGYDYTDKAKGTPNYGKAVPANFEGGSFGRGDSDEWTFGAQMEIWW

SEQ ID NO: 5548 - protein, 229 aa, Escherichia coli
MALLIFAVLSLLVAGELQAGVVVGGTRFIFPADRESISILLTNTSQESWLINSKINRPTRWAGGEASTVPAPLLAAPPLILLKPGTTGTLRLLRTESDILPVDRETLFELSIASVPSGKVENQSVKVAMRSVFKLFWRPEGLPGDPLEAYQQLRWTRNSQGVQLTNPTPYYINLIQLSVNGEALSNAGVVPPKSQRQTSWCQAIAPCHVAWRAINDYGGLSAKKEQNLP

SEQ ID NO: 5549 - protein, 250 aa, Escherichia coli
MSDLLCSAKLGAMTLALLLSATSLSALASVTPDRTRLIFNESDKSISVTLRNNDPKLPYLAQSWIEDEKGNKITSPLTVLPPVQRIDSMMNGQVKVQGMPDINKLPADRESMFYFNVREIPPKSNKPNTLQIALQTRIKLFWRPKALEKVSMKSPWQHKVTLTRSGQAFTVNNPTPYYVIISNASAQKNGNPATGFSPLVIEPKTTVPLNVKMDSVPVLTYVNDFGARMPLFFRCDGNTCQVDKDQSLKG

SEQ ID NO: 5550 - protein, 203 aa, Escherichia coli; identical to SEQ ID NO: 2201

SEQ ID NO: 5551 - protein, 224 aa, Escherichia coli; identical to SEQ ID NO: 3115

SEQ ID NO: 5552 - protein, 659 aa, Escherichia coli; identical to SEQ ID NO: 2942

SEQ ID NO: 5553 - protein, 828 aa, Escherichia coli
MKLSRRSFMKANAVAAAAAAAGLSVPGVARAVVGQQEAIKWDKAPCRFCGTGCGVLVGTQQGRVVACQGDPDAPVNRGLNCIKGYFLPKIMYGKDRLTQPLLRMKNGKYDKEGEFTPITWDQAFVVMEEKFKTALKEKGPESIGMFGSGQWTIWEGYAASKLFKAGFRSNNIDPNARHCMASAVVGFMRTFGMDEPMGCYDDIEQADAFVLWGANMAEMHPILWSRITNRRLSNQDVTVAVLSTYQHRSFELADNGIIFTPQSDLVILNYIANYIIQNNAINQDFFSKHVNLRKGATDIGYGLRPTHPLEKAAKNPGSDASEPMSFEDYKAFVAEYTLEKTAEMTGVPKDQLEQLAQLYADPNKKVISYWTMGFNQHTRGVWANNLVYNLHLLTGKISQPGCGPFSLTGQPSACGTAREVGTFAHRLPADMVVTNEKHRDICEKKWNIPSGTIPAKIGLHAVAQDRALKDGKLNVYWTMCTNNMQAGPNINEERMPGWRDPRNFIIVSDPYPTVSALAADLILPTAMWVEKEGAYGNAERRTQFWRQQVQAPGEAKSDLWQLVQFSRRFKTEEVWPEELLAKKPELRGKTLYEVLYATPEVSKFPVSELAEDQLNDESRELGFYLQKGLFEEYAWFGRGHGHDLAPFDDYHKARGLRWPVVNGKETQWRYSEGNDPYVKAGEGYKFYGKPDGKAVIFALPFEPAAEAPDEEYDLWLSTGRVLEHWHTGSMTRRVPELHRAFPEAVLFIHPLDAKARDLRRGDKVKVVSRRGEVISIVETRGRNRPPQGLVYMPFFDAAQLVNKLTLDATDPLSKETDFKKCAVKLEKV

SEQ ID NO: 5554 - protein, 367 aa, Escherichia coli; identical to SEQ ID NO: 2431

SEQ ID NO: 5555 - protein, 838 aa, Escherichia coli; identical to SEQ ID NO: 2916

SEQ ID NO: 5556 - protein, 678 aa, Escherichia coli; identical to SEQ ID NO: 2902

SEQ ID NO: 5557 - protein, 518 aa, Escherichia coli; identical to SEQ ID NO: 2349

SEQ ID NO: 5558 - protein, 87 aa, Escherichia coli; identical to SEQ ID NO: 2871

SEQ ID NO: 5559 - protein, 203 aa, Escherichia coli; identical to SEQ ID NO: 2201

SEQ ID NO: 5560 - protein, 224 aa, Escherichia coli; identical to SEQ ID NO: 4053

SEQ ID NO: 5561 - protein, 729 aa, Escherichia coli; identical to SEQ ID NO: 2074

SEQ ID NO: 5562 - protein, 213 aa, Escherichia coli
MTKMSRYALITALAMFLAGCVGQREPAPVEEVKPASEQPAEPQQPVPTVPSVPTIPQQPGPIEHEDQTAPPAPHIRHYDWNGAMQPMVSKMLGADGVTAGSVLLVDSVNNRTNGSLNAAEATETLRNALANNGKFTLVSAQQLSMAKQQLGLSPQDSLGTRSKAIGIARNVGAHYVLYSSASGNVNAPTLQMQLMLVQTGEIIWSGKGAVSQQ

SEQ ID NO: 5563 - protein, 342 aa, Escherichia coli
MSAQAAEIYNKDSNKLDLYGKVNAKHYFSSNDADDGDTTYARLGFKGETQINDQLTGFGQWEYEFKGNRAESQGSSKDKTRLAFAGLKFGDYGSIDYGRNYGVAYDIGAWTDVLPEFGGDTWTQTDVFMTGRTTGVATYRNNDFFGLVDGLNFAAQYQGKNDRTDVTEANGDGFGFSTTYEYEGFGVGATYAKSDRTNNQVIYGNNSLNASGQNAEVWAAGLKYDANNIYLATTYSETQNMTVFGNNHIANKAQNFEVVAQYQFDFGLRPSVAYLQSKGKDLGAWGDQDLVEYIDVGATYYFNKNMSTFVDYKINLIDKSDFTKASGVATDDIVAVGLVYQF

SEQ ID NO: 5564 - protein, 232 aa, Escherichia coli
MQKNAAHTYAISSLLALSLTGCAWIPSTPLVQGATSAQPVPGPTPVANGSIFQSAQPINYGYQPLFEDRRPRNIGDTLTIVLQENVSASKSSSANASRDGKTNFGFDTVPRYLQGLFGNARADVEASGGNTFNGKGGANASNTFSGTLTVTVDQVLVNGNLHVVGEKQIAINQGTEFIRFSGVVNPRTISGSNTVPSTQVADARIEYVGNGYINEAQNMGWLQRFFLNLSPM

SEQ ID NO: 5565 - protein, 351 aa, Escherichia coli
MKKSTLALVVMGIVASVSVQAAEIYNKDGNKLDVYGKVKAMHYMSDNDSKDGDQSYIRFGFKGETQINDQLTGYGRWEAEFAGNKAESDTAQQKTRLAFAGLKYKDLGSFDYGRNLGALYDVEAWTDMFPEFGGDSSAQTDNFMTKRASGLATYRNTDFFGVIDGLNLTLQYQGKNENRDVKKQNGDGFGTSLTYDFGGSDFAISGAYTNSDRTNEQNLQSRGTGKRAEAWATGLKYDANNIYLATFYSETRKMTPISGGFANKTQNFEAVAQYQFDFGLRPSLGYVLSKGKDIEGIGDEDLVNYVDVGATYYFNKNMSAFVDYKINQLDSDNKLNINNDDIVAVGMTYQF

SEQ ID NO: 5566 - protein, 274 aa, Escherichia coli
MNKTAIALLALLASSASLAATPWQKITQPVPGSAQSIGSFSNGCIIGADTLPIQSEHYQVMRTDQRRYFGHPDLVMFIQRLSRQVSNLGMGTVLIGDMGMPAGGRFNGGHASHQTGLDVDIFLQLPKTRWTSAQLLRPQALDLVSRDGKHVVPTLWKPEIFSLIKLAAQDKDVTRIFVNPAIKQQLCLDAGTDRDWLRKVRPWFQHRAHMHVRLRCPADSLECEDQPLPPPGDGCGAELQSWFEPPKPGTTKPEKKTPPPLPPSCQALLDEHVI

SEQ ID NO: 5567 - protein, 331 aa, Escherichia coli; identical to SEQ ID NO: 2705

SEQ ID NO: 5568 - protein, 714 aa, Escherichia coli
MAPAVAQQTDDETFVVSANRSNRTVAEMAQTTWVIENAELEQQIQGGKELKDALAQLIPGLDVSSRSRTNYGMNVRGRPLVVLVDGVRLNSSRTDSRQLDSIDPFNIDHIEVISGATSLYGGGSTGGLINIVTKKGQPETMMEFEAGTKSGFSSSKDHDERIAGAVSGGNEHISGRLSVAYQKFGGWFDGNGDATLLDNTQTGLQYSDRLDIMGTGTLNIDESRQLQLITQYYKSQGDDDYGLNLGKGFSAIRGTSTPFVSNGLNSDRIPGTERHLISLQYSDSAFLGQELVGQVYYRDESLRFYPFPTVNANKQVTAFSSSQQDTDQYGMKLTLNSKPMDGWQITWGLDADHERFTSNQMFFDLAQASASGGLNNKKIYTTGRYPSYDITNLAAFLQSDYDINNLFTLNGGVRYQYTENKIDDFIGYAQQRQIAAGKATSADAIPGGSVDYDNFLFNAGLLMHITERQQAWLNFSQGVELPDPGKYYGRGIYGAAVNGHLPLTKSVNVSDSKLEGVKVDSYELGWRFTGNNLRTQIAAYYSISDKSVVANKDLTISVVDDKRRIYGVEGAVDYLIPDTDWSTGVNFNVLKTESKVNGTWQKYDVKTASPSKATAYIGWAPDPWSLRVQSTTSFDVSDAQGYKVDGYTTVDLLGSYQLPVGTLSFSIENLFDRDYTTVWGQRAPLYYSPGYGPASLYDYKGRGRTFGLNYSVLF

SEQ ID NO: 5569 - protein, 774 aa, Escherichia coli; identical to SEQ ID NO: 3426

SEQ ID NO: 5570 - protein, 359 aa, Escherichia coli; identical to SEQ ID NO: 2329

SEQ ID NO: 5571 - protein, 654 aa, Escherichia coli
MDSAMKGLNKITCCLLAALLMPCAGHAENEQYGANFNNADIRQFVEIVGQHLGKTILIDPSVQGTISVRSNDTFSQQEYYQFFLSILDLYGYSVITLDNGFLKVVRSANVKTSPGMIADSSRPGVGDELVTRIVPLENVPARDLAPLLRQMMDAGSVGNVVHYEPSNVLILTGRASTINKLIEVIKRVDVIGTEKQQIIHLEYASAEDLAEILNQLISESHGKSQMPALLSAKIVADKRTNSLIISGPEKARQRITSLLKSLDVEESEEGNTRVYYLKYAKATNLVEVLTGVSEKLKDEKGNSRKPSSTSAMDNVAITADEQTNSLVITADQSVQEKLATVIARLDIRRAQVLVEAIIVEVQDGNGLNLGVQWANKNVGAQQFTNTGLPVFNAAQGVADYKKNGGITSANPAWDMFSAYNGMAAGFFNGDWGVLLTALASNNKNDILATPSIVTLDNKLASFNVGQDVPVLSGSQTTSGDNVFNTVERKTVGTKLKVTPQVNEGDAVLLEIEQEVSSVDSSSNSTLGPTFNTRTIQNAVLVKTGETVVLGGLLDDFSKEQVSKVPLLGDIPLVGQLFRYTSTERAKRNLMVFIRPTIIRDDDVYRSLSKEKYTRYRQEQQLRIDGKSKALVGSEDLPVLNENTFNSHAPAPSSR

SEQ ID NO: 5572 - protein, 900 aa, Escherichia coli
MKLNIFTKSMIGMGLVCSSLPALAMEAWNNQQGGNKYQVIFDGKIYENAWWVSSTNCPGKAKANDATNPWRLKRTATAAEISQFGNTLSCEKSGSSSSSTSNTPASNTPANGGSATPAQGTVPSNSSVVAWNKQQGGQTWYVVFNGAVYKNAWWVASSNCPGDAKGNDASNPWRYVRAATATEISETSNPQSCTSAPQPAPDVKPAPDVKPAPDVQPAPADKSNDNYAVVAWKGQEGSSTWYVIYNGSIYKNAWWVGAANCPGDAKENDASNPWRYVRAATATEITQYGNPGSCSVKPDNNGGAVTPVDPTPETPETPVTPTPDNNEPSTPADSSNDYSLQAWSGQEGSEIYHVIFNGNVYQNAWWVGSEDCPRGTSVENSNNPWRLVRTATAAEMSQYGNPTTCEIDNGGVIIVDGFQASKAYSANSIVDYNDAHYKTSVDQDAWGFVPGGDNPWKKYEPAKAWSASTVYVKGDRVVVDGQAYEALFWTQSDNPALVANQNATGSNSRPWKPLGKTQSYSNEELNNAPQFNPETLYASDTLIRFNGENYISQSKVQKVSPSDSNPWRVFVDWTGTKERVGTPKKAWPKHVYAPYVDFTLNTIPDLAALAKNHNVNHFTLAFVVSKDANTCLPTWGTAYGMQNYAQYSKIKALREAGGDVMLSIGGANNAPLAASCKNVDDLMQHYYDIVDNLNLRVLDFDIEGTWVADQASIERRNLAVKKVQDKWKSEGKDIAIWYTLPILPTGLTPEGMNVLSDAKAKGVELAGVNVMTMDYGNAICQSANTEGQNIHGKCATSAIANLHAQLKGLYGNKSDAEIDAMMGTTPMVGVNDVQGEVFYLSDARLVMQDAQKRNLGMVGIWSIARDLPGGTNLSPEFHGLTKEQAPKYAFSEIFAPFTKQ

SEQ ID NO: 5573 - protein, 208 aa, Escherichia coli; identical to SEQ ID NO: 1948

SEQ ID NO: 5574 - protein, 656 aa, Escherichia coli
MRLKKRYLCTALSLAFTQQAVAAQESDTLTVWSSPVSSTTTTVLDQPTMKALDKQNVAQALSVVPGVVLQKSGSRNEEQVKVRGFDSRQVPVYFDGVPIYVPYDGNLDLARILTNNLGAVEVSKGYSSLLQGPNQMGGAINITTQKPTKPLEASLGYRQGWSRSQDNAYDMHASFAASSDLGYLQVSGSQLKQDFLGLPHGVNNDIAGKHGKMINSSADDKRGIVKLGFTPRENDEYTLTYIKQDGEKDNPPYSGNSGQKSRYWQWPEYDKESFYYQGTTQLNDRFTLKSRLYRDTFENTLMMYNSLADLKNKKGSYSHYSDYSDGAGLQLAADVRENDLLSFAVNWKDDVHREKGAPHAAYDRYEDRTWSLASEYQWAAADNVDVVAGISYDWRDSVEAKKHEKDGSITHYDDNNQSAFNWQVMGKYHFANEDTLALSYYDRTRFPTLKERYTTSKPAYNQIAIVNPQLKPERARGVDLTWNGAFTHDWGFEVSVYYNRVSDAILSHNIDADTIQNQNSGTVDYSGLDAGIKGKISNILDVGLSYALIHADAKRKDIGKITDLPTQTMTAWMTLKPWEPLSVTLSEEARSSSYSNSDGSQKAAGFAVTHIRADYTLGHGFSVNASVNNLFDTKYAYSEGFIEEGRNFWAGIEYTF

SEQ ID NO: 5575 - protein, 386 aa, Escherichia coli
MVDDVPVAQVLQALAEQEKLNLVVSPDVSGTVSLHLTDVPWKQALQTVVKSAGLITRQEGNILSVHSVAWQNDNIARQEAEQTRAQANLPLENRNITLQYADAGELAKAGEKLLSAKGSMTVDKRTNRLLLRDNKTALSTLEQWVSQMDLPVGQVELSAHIVTINEKSLRELGVKWTLADAQQAGGVGQVTTLGSDLSVATATTHIGFNIGRINGRLLDLELSALEQKQQLDIIASPRLLASHLQPASIKQGSEIPYQVSSGESGATSVEFKEAVLGMEVTPTVLQKGRIRLKLHISQNVPGQVLQQADGEVLAIDKQEIETQVEVKSGETLALGGIFTRKNKSGQDSVPLLGDIPWFGQLFRHDGKEDERRELVVFITPRLVSSE

SEQ ID NO: 5576 - protein, 696 aa, Escherichia coli
MRITTLASVVIPCLGFSASSIAAAEDVMIVSASGYEKKLTNAAASVSVISQEELQSSQYHDLAEALRSVEGVDVESGTGKTGGLEISIRGMPASYTLILIDGVRQGGSSDVTPNGFSAMNTGFMPPLAAIERIEVIRGPMSTLYGSDAMGGVVNIITRKNADKWLSSVNAGLNLQESNKWGNSSQFNFWSSGPLVDDSVSLQVRGSTQQRQGSSVTSLSDTAATRIPYPTESQNYNLGARLDWKASAQDVLWFDMDTTRQRYDNRDGQLGSLTGGYDRTLRYERNKISAGYDHTFTFGTWKSYLNWNETENKGRELVRSVLKRDKWGLAGQPRELKESNLILNSLLLTPLGESHLVTVGGEFQSSSMKDGVVLASTGETFRQKSWSVFAEDEWHLTDALALTVGSRYEHHEQFGGHFSPRAYLVWDVADAWTLKGGVTTGYKAPRMGQLHKGISGVSGQGKTNLLGNPDLKPEESVSYEAGVYYDNPAGLNANVTGFMTDFSNKIVSYSINDNTNSYVNSGKARLHGVEFAGTLPLWSEDVTLSLNYTWTRSEQRDGDNKGAPLSYTPEHMVNAKLNWQITEEVASWLGARYRGKTPRFTQNYSSLSAVQKKVYDEKGEYLKAWTVVDAGLSWKMTDALTLNAAVNNLLNKDYSDVSLYSAGKSTLYAGDYFQTGSSTTGYVIPERNYWMSLNYQF

SEQ ID NO: 5577 - protein, 237 aa, Escherichia coli; identical to SEQ ID NO: 3793

SEQ ID NO: 5578 - protein, 517 aa, Escherichia coli; identical to SEQ ID NO: 3116

SEQ ID NO: 5579 - protein, 746 aa, Escherichia coli
MNKKIHSLALLVNLGIYGVAQAQEPTDTPVSHDDTIVVTAAEQNLQAPGVSTITADEIRKNPVARDVSEIIRTMPGVNLTGNSTSGQRGNNRQIDIRGMGPENTLILIDGKPVSSRNSVRQGWRGERDTRGDTSWVPPEMIERIEVLRGPAAARYGNGAAGGVVNIITKKGSGEWHGSWDAYFNAPEHKEEGATKRTNFSLTGPLGDEFSFRLYGNLDKTQADAWDINQGHQSARAGTYATTLPAGREGVINKDINGVVRWDFAPLQSLELEAGYSRQGNLYAGDTQNTNSDAYTRSKYGDETNRLYRQNYSLTWNGGWDNGVTTSNWVQYEHTRNSRIPEGLAGGTEGKFNEKAAQDFVDIDLDDVMLHSEVNLPIDFLVNQTLTLGTEWNQQRMKDLSSNTQALTGTNTGGAIDGVSATDRSPYSKAEIFSLFAENNMELTDSTIVTPGLRFDHHSIVGNNWSPALNISQGLGDDFTLKMGIARAYKAPSLYQTNPNYILYSKGQGCYASAGGCYLQGNDDLKAETSINKEIGLEFKRDGWLAGVTWFRNDYRNKIEAGYVAVGKNAVGTDLYQWDNVPKAVVEGLEGSLNVPVSETVMWTNNITYMLKSENKTTGDRLSIIPEYTLNSTLSWQAREDLSMQTTFTWYGKQQPKKYNYKGQPAVGPETKEISPYSIVGLSATWDVTKNVSLTGGVDNLFDKRLWRAGNAQTTGDLAGANYIAGAGAYTYNEPGRTWYMSINTHF

SEQ ID NO: 5580 - protein, 118 aa, Escherichia coli [sequence omitted]

SEQ ID NO: 5581 - protein, 866 aa, Escherichia coli
MTIKPTKNYHNHLTRIATFCALLYCNGAFCAELVEYDHTFLMGQNASNIDLSRYSEGNPAIPGVYDVSVYVNDQPVINQSITFVAIEGKKNAQACITLKNLLQFHINSPDINSEKAVLLARDEALGNCLNLTEIIPQASVRYDVNDQRLDIDVPQAWVMKNYQNYVDPSLWENGINAAMLSYNLNGYHSETPGRKNDSIYAAFNGGMNLGAWRLRASGNYNWMTDSGGNYDFKNRYIQRDIASLRSQFIIGESYTTGETFDSVSIRGIRLYSDSRMLPPTLASFAPIIHGVANTNAKVTITQGGYKIYETTVPPGAFVIDDLSPSGYGSDLIVTIEESDGSKRTFSQPFSSVVQMLRPGVGRWDISGGQVLKDDIQDEPNLFQASYYYGLNNYLTGYTGIQITDNNYTAGLLGLGLNTSVGAFSFDVTHSNVRIPDDKTYQGQSYRVSWNKLFEETSTSLNIAAYRYSTQNYLGLNDALTLIDEVKHPEQDLEPKSMRNYSRMKNQVTVSINQPLKFEKKDYGSFYLSGSWSDYWASGQNRSNYSIGYSNSASWGSYSISAQRSWNEDGDADDSVYLSFTIPIEKLLGTEQRTSGFQSIDTQMSSDFKGNNQLNVSSSGYSDNARVSYSVNTGYTMNKASKDLSYVGGYASYESPWGTLAGSVSANSDNSRQVSLSTDGGFVLHSGGLTFSNDSFSDSDTLAVVQAPGAQGARINYGNSTIDRWGYGVTSALSPYHENRIALDINDLENDVELKSTSAVAVPRQGSVVFADFETVQGQSAIMNITRSDGKNIPFAADIYDDQGNVIGNVGQGGQAFVRGIEQQGNINIKWLEESKPVSCLAHYQQSSEAEKIAQSIILNGIRCQIQ

SEQ ID NO: 5582 - protein, 432 aa, Escherichia coli; identical to SEQ ID NO: 2026

SEQ ID NO: 5583 - protein, 207 aa, Escherichia coli; identical to SEQ ID NO: 2211

SEQ ID NO: 5584 - protein, 838 aa, Escherichia coli; identical to SEQ ID NO: 2795

SEQ ID NO: 5585 - protein, 654 aa, Escherichia coli; identical to SEQ ID NO: 4042

SEQ ID NO: 5586 - protein, 241 aa, Escherichia coli; identical to SEQ ID NO: 2922

SEQ ID NO: 5587 - protein, 193 aa, Escherichia coli; identical to SEQ ID NO: 2246

SEQ ID NO: 5588 - protein, 660 aa, Escherichia coli
MSRPQFTSLRLSLLALAVSATLPTFAFATETMTVTATGNARSSFEAPMMVSVIDTSAPENQTATSATDLLRHVPGITLDGTGRTNGQDVNMRGYDHRGVLVLVDGVRQGTDTGHLNGTFLDPALIKRVEIVRGPSALLYGSGALGGVISYDTVDAKDLLQEGQSSGFRVFGTGGTGDHSLGLGASAFGRTENLDGIVAWSSRDRGDLRQSNGETAPNDESINNMLAKGTWQIDSAQSLSGLVRYYNNDAREPKNPQTVEASDSSNPMVDRSTIQRDAQLSYKLAPQGNDWLNADAKIYWSEVRINAQNTGSSGEYREQITKGARLENRSTLFADSFASHLLTYGGEYYRQEQHPGGATTGFPQAKIDFSSGWLQDEITLRDLPITLLGGTRYDSYRGSSDGYKDVDADKWSSRAGMTINPTNWLMLFGSYAQAFRAPTMGEMYNDSKHFSIGRFYTNYWVPNPNLRPETNETQEYGFGLRFDDLMLSNDALEFKASYFDTKAKDYISTTVDFAAATTMSYNVPNAKIWGWDVMTKYTTDLFSLDVAYNRTRGKDTDTGEYISSINPDTVTSTLNIPIAHSGFSVGWVGTFADRSTHISSSYSKQPGYGVNDFYVSYQGQQALKGMTTTLVLGNAFDKEYWSPQGIPQDGRNGKIFVSYQW

SEQ ID NO: 5589 - protein, 362 aa, Escherichia coli
MMKRNILAVIVPALLVAGTANAAEIYNKDGNKVDLYGKAVGLHYFSKGNGEDSYGGNGDMTYARLGFKGETQINSDLTGYGQWEYNFQGNNSEGADAQTGNKTRLAFAGLKYADVGSFDYGRNYGVVYDALGYTDMLPEFGGDTAYSDDFFVGRVGGVATYRNSNFFGLVDGLNFAVQYLGKNERDTARRSNGDGVGGSISYEYEGFGIVGAYGAADRTNLQEESPLGKGKKAEQWATGLKYDANNIYLAANYGETRNATPITNKFTNTSGFANKTQDVLLVAQYQFDFGLRPSIAYTKSKAKDVDGIGDVDLVNYFEVGATYYFNKNMSTYVDYIINQIDSDNKLGVGSDDTVAVGIVYQF

SEQ ID NO: 5590 - protein, 614 aa, Escherichia coli
MIKKASLLTACSVTAFSAWAQDTSPDTLVVTANRFEQPRSTVLAPTTVVTRQDIDRWQSTSVNDVLRRLPGVDITQNGGSGQLSSIFIRGTNASHVLVLIDGVRLNLAGVSGSADLSQFPIALVQRVEYIRGPRSAVYGSDAIGGVVNIITTRDHPGTEISAGWGSNSYQNYDVSTQQQLGDKTRVTLLGDYAHTHGYDVVAYGNTGTQAQPDNDGFLSKTLYGALEHNFTDVWSGFVRGYGYDNRTNYDAYYSPGSPLVDTRKLYSQSWDAGLRYNGELIKSQLITSYSHSKDYNYDPHYGRYDSSATLDEMKQYTVQWANNIIIGHGNIGAGVDWQKQSTAPGTAYVEDGYDQRNTGIYLTGLQQVGDFTFEGAARSDDNSQFGRHGTWQTSAGWEFIEGYRFIASYGTSYKAPNLGQLYGFYGNPNLDPEKSKQWEGAFEGLTAGVNWRISGYRNDVSDLIDYDDHTLKYYNEGKARIKGVEATANFDTGPLTHTVSYDYVDARNAITDTPLLRRAKQQVKYQLDWQLYDFDWGITYQYLGSRYDKDYSSYPYQTVKMGGVSLWDLAVAYPVTSHLTVRGKIANLFDKDYETVYGYQTAGREYTLSGSYTF

SEQ ID NO: 5591 - protein, 377 aa, Escherichia coli
MLQALAEQEKLNLVVSPDVSGTVSLHLTDVPWKQALQTVVKSAGLITRQEGNILSVHSIAWQNNNIARQEAEQARAQANLPLENRSITLQYADAGELAKAGEKLLSAKGSMTVDKRTNRLLLRDNKTALSALEQWVAQMDLPVGQVELSAHIVTINEKSLRELGVKWTLADAQHAGGVGQVTTLGSDLSVATATTHVGFNIGRINGRLLDLELSALEQKQQLDIIASPRLLASHLQPASIKQGSEIPYQVSSGESGATSVEFKEAVLGMEVTPTVLQKGRIRLKLHISQNVPGQVLQQADGEVLAIDKQEIETQVEVKSGETLALGGIFTRKNKSGQDSVPLLGDIPWFGQLFRHDGKEDERRELVVFITPRLVSSE

SEQ ID NO: 5592 - protein, 200 aa, Escherichia coli; identical to SEQ ID NO: 1785

SEQ ID NO: 5593 - protein, 539 aa, Escherichia coli; identical to SEQ ID NO: 3845

SEQ ID NO: 5594 - protein, 446 aa, Escherichia coli; identical to SEQ ID NO: 2177

SEQ ID NO: 5595 - protein, 221 aa, Escherichia coli
MKNYLWLVALLPLLSGCESQAILVKKDDAYFAPPTTEAPPPADGRAGGVFETGYNWSLTADRRAYRVGDILTVILEESTQSSKQAKTNFGKSNTVDIGAPTIFGHTKDKLSGSIDANRDFDGSATSQQQNSLRGEITVSVHAVQPNGILEIRGEKWLTLNQGDEYIRLSGLVRADDIQNDNSVSSQRIADARISYAGRGALSDANAAGWLTRLFNHPLFPI

SEQ ID NO: 5596 - protein, 272 aa, Escherichia coli
MSKRNAVTTFFTNRVTKALGMTLALMMTCQSAMASLAADQTRYIFLGDKDALTITVTNNDKERTFGGQAWVDNIVEKDTRPTFVVTPSFFRVKPNGQQTLRIIMASDHLPKDKESVYWLNLQDIPPALEGSGIAVALRTKLKLFYRPKALLEGRKGAEEELSLQSRPDGRTMLVNTTPYIFAIGSLLDGNGKKIATDNETAQKLLMFMPGDEVQVKGNVVKVASLNDYGELQTWTINQKKTSASSGEKVSDSSVNLPDKADKADKADKADKK

SEQ ID NO: 5597 - protein, 246 aa, Escherichia coli; identical to SEQ ID NO: 1985

SEQ ID NO: 5598 - protein, 118 aa, Escherichia coli [sequence omitted]

SEQ ID NO: 5599 - protein, 208 aa, Escherichia coli; identical to SEQ ID NO: 1949

SEQ ID NO: 5600 - protein, 462 aa, Escherichia coli
MIKKASLLTACSVTAFSAWAQDTSPDTLVVTANRFEQPRSTVLAPTTVVTRQDIDRWQSTSVNDVLRRLPGVDITQNGGSGQLSSIFIRGTNASHVLVLIDGVRLNLAGVSGSADLSQFPIALVQRVEYIRGPRSAVYGSDAIGGVVNIITTRDEPGTEISAGWGSNSYQNYDVSTQQQLGDKTRVTLLGDYAHTHGYDVVAYGNTGTQAQTDNDGFLSKTLYGALEHNFTDAWSGFVRGYGYDNRTNYDAYYSPGSPLLDTRKLYSQSWDAGLRYNGELIKSQLITSYSHSKDYNYDPHYGRYDSSATLDEMKQYTVQWANNVIVGHGSIGAGVDWQKQTTTPGTGYVEDGYDQRNTGIYLTGLQQVGDFTFEGAARSDDNSQFGRHGTWQTSAGWEFIEGYRFIASYGTSYKAPNLGQLYGFYGNPNLDPEKSKQWEGAFEGLTAGVNCVFPDIVTMSVT

SEQ ID NO: 5601 - protein, 152 aa, Escherichia coli
MIDYDDHTLKYYNEGKARIKGVEATANFDTGPLTHTVSYDYVDARNAITDTPLLRRAKQQVKYQLDWQLYDFDWGITYQYLGTRYDKDYSSYPYQTVKMGGVSLWDLAVAYPVTSHLTVRGKIANLFDKDYETVYGYQTAGREYTLSGSYTF

SEQ ID NO: 5602 - protein, 828 aa, Escherichia coli; identical to SEQ ID NO: 2386

SEQ ID NO: 5603 - protein, 222 aa, Escherichia coli
MLIIFYLIISASAHAAGGIALGATRIIYPADAKQTAVWIRNSHTNERFLVNSWIENSSGVKEKSFIITPPLFVSEPKSENTLRIIYTGPPLAADRESLFWMNVKTIPSVDKNALNGRNVLQLAILSRMKLFLRPIQLQELPAEAPDTLKFSRSGNYINVHNPSPFYVTLVNLQVGSQKLGNAMAAPRVNSQIPLPSGVQGKLKFQTVNDYGSVTPVREVNLN

SEQ ID NO: 5604 - protein, 746 aa, Escherichia coli; identical to SEQ ID NO: 4083

SEQ ID NO: 5605 - protein, 774 aa, Escherichia coli; identical to SEQ ID NO: 3122

SEQ ID NO: 5606 - protein, 331 aa, Escherichia coli; identical to SEQ ID NO: 2705

SEQ ID NO: 5607 - protein, 784 aa, Escherichia coli; identical to SEQ ID NO: 2242

SEQ ID NO: 5608 - protein, 250 aa, Escherichia coli; identical to SEQ ID NO: 2761

SEQ ID NO: 5609 - protein, 203 aa, Escherichia coli; identical to SEQ ID NO: 2015

SEQ ID NO: 5610 - protein, 715 aa, Escherichia coli
MLYNIPCRIYILSTLSLCISGIVSTATATSSETKISNEETLVVTTNRSASNLWESPATIQVIDQQTLQNSTNASIADNLQDIPGVEITDNSLAGRKQIRIRGEASSRVLILIDGQEVTYQRAGDNYGVGLLIDESALERVEVVKGPYSVLYGSQAIGGIVNFITKKGGDKLASGVVKAVYNSATAGWEESIAVQGSIGGFDYRINGSYSDQGNRDTPDGRLPNTNYRNNSQGVWLGYNSGNHRFGLSLDRYRLATQTYYEDPDGSYEAFSVKIPKLEREKVGVFYDTDVDGDYLKKIHFDAYEQTIQRQFANEVKTTQPVPSPMIQALTVHNKTDTHDKQYTQAVTLQSHFSLPANNELVTGAQYKQDRVSQRSGGMTSSKSLTGFINKETRTRSYYESEQSTVSLFAQNDWRFADHWTWTMGVRQYWLSSKLTRGDGVSYTAGIISDTSLARESASDHEMVTSTSLRYSGFDNLELRAAFAQGYVFPTLSQLFMQTSAGGSVTYGNPDLKAEHSNNFELGARYNGNQWLIDSAVYYSEAKDYIASLICDGSIVCNGNTNSSRSSYYYYDNIDRAKTWGLEISAEYNGWVFSPYISGNLIRRQYETSTLKTTNTGEPAINGRIGLKHTLVMGQANIISDVFIRAASSAKDDSNGTETNVPGWATLNFAVNTEFGNEDQYRINLALNNLTDKRYRTAHETIPAAGFNAAIGFVWNF

SEQ ID NO: 5611 - protein, 236 aa, Escherichia coli
MQTTRTPYSVSFMATVLLLFLFACHSTIANAAVALGATRVIYPANQKQVLLPVTNNDPASVYLIQSWIENAGDQKDTQFVITPPLFSMQGKKENTLRIINATNHQLPGDRESLFWVNVKAIPAMEKDQKNENTLQLAIISRIKMFYRPTHLAMAPEEAPAMLRFRRSGSILTLINPTPYFITVTNMKAGNSNLPNTMVPPKGEVSVDIPHAVTGDISFQTINDYGALTPLIKATMQ

SEQ ID NO: 5612 - protein, 162 aa, Escherichia coli; identical to SEQ ID NO: 1973

SEQ ID NO: 5613 - protein, 191 aa, Escherichia coli; identical to SEQ ID NO: 2727

SEQ ID NO: 5614 - protein, 170 aa, Escherichia coli [sequence omitted]

SEQ ID NO: 5615 - protein, 641 aa, Escherichia coli
MLAVDDDGETMVVTASSVEQNLKDAPASISVITQEDLQRKPVQNLKDVLKEVPGVQLTNEGDNRKGVSIRGLDSSYTLILVDGKRVNSRNAVFRHNDFDLNWIPVDSIERIEVVRGPMSSLYGSDALGGVVNIITKKIGQKWSGTVTVDTTVQEHRDRGDTYNGQFFTSGPLIDGVLGMKAYGSLAKREKDDPQNSTTTDTGETPRIEGFSSRDGNVEFAWTPNQNHDFTAGYGFDRQDRDSDSLDKNRLERQNYSASHNGRWDYGTSELKYYGEKVENKNPGNSSPITSESNTVDGKYTLPLTAINQFLTVGGEWRHDKLSDAVNLTGGTSSKTSASQYALFVEDEWRIFEPLALTTGVRMDDHETYGEHWSPRAYLVYNATDTVTVKGGWATAFKAPSLLQLSPDWTSNSCRGACKIVGSPDLKPETSESWELGLYYMGEEGWLEGVESSVTVFRNDVKDRISISRTSDVNAAPGYQNFVGFETGANGRRIPVFSYYNVNKARIQGVETELKIPFNDEWKLSINYTYNDGRDVSNGENKPLSDLPFHTANGTLDWKPLALEDWSFYVSGHYTGQKRADSATAKTPGGYTIWNTGAAWQVTKDVKLRAGVLNLGDKDLSRDDYSYNEDGRRYFMAVDYRF

SEQ ID NO: 5616 - protein, 729 aa, Escherichia coli
MLSTQFNRDNQHQAIIKPSLLAGCIALALLPSAAFAAPATEETVIVEGSATAPDDGENDYNVTSTSAGTKMQMTQRDIPQSVTIVSQQRMEDQQLQTLGEVMENTLGISKSQADSDRALYYSRGFQIDNYMVDGIPTYFESRWNLGDALSDMALFERVEVVRGATGLMTGTGNPSAAINMVRKHATSREFKGDVSAEYGSWNKERYVADLQSPLTEDGKIRARIVGGYQNNDSWLDRYNSEKTFFSGIVDADLGDLTMLSAGYEYQRIDVNSPTWGGLPRWNTDGSSNSYDRARSTAPDWAYNDKEINKVFMTLKQRFADTWQATLNATHSEVEFDSKMMYVDAYVNKADGMLVGPYSNYGPGFDYVGGTGWNSGKRKVDALDLFADGSYELFGRQHNLMFGGSYSKQNNRYFSSWANIFPDEIGSFYNFNGNFPQTDRSPQSLAQDDTTHMKSLYAATRVTLADPLHLILGARYTKWRVDTLTYSMEKNHTTPYAGLVFDINDNWSTYASYTSIFQPQNDRDSSGKYLAPITGNNYELGLKSDWMNSRLTTTLAIFRIEQDNVAQSTGTPIPGSNGETAYKAVDGTVSKGVEFELNGAITDNWQLTFGATRYIAEDNEGNAVNPNLPRTTVKMFTSYRLPVMPELTVGGGVNWQNRVYTDTVTPYGTFRAEQGSYALVDLFTRYQVTKNFSLQGNVNNLFDKTYDTNVEGSIVYGAPRNLSITGTYQF

SEQ ID NO: 5617 - protein, 711 aa, Escherichia coli
MFTPSFSGLKGRALFSLLFAAPMIHATDSVTTKDGETITVTADANTATEATDGYQPLSTSTATLTDMPMLDIPQVVNTVSDQVLENQNATTLDEALYNVSNVVQTNTLGGTQDAFVRRGFGANRDGSIMTNGLRTVLPRSFNAATERVEVLKGPASTLYGILDPGGLINVVTKRPEKTFHGSVSATSSSFGGGTGQLDITGPIEGTQLAYRLTGEVQDEDYWRNFGKERSTFIAPSLTWFGDNATVTMLYSHRDYKTPFDRGTIFDLTTKQPVNVDRKIRFDEPFNITDGQSDLAQLNAEYHLNSQWTARFDYSYSQDKYSDNQARVTAYDATTGTLTRRVDATQGSTQRMHATRADLQGNVDIAGFYNEILGGVSYEYYDLLRTDMIRCKKAKDFNIYNPVYGNTSKCTTVSASDSDQTIKQESYSAYAQDALYLTDNWIAVAGIRYQYYTQYAGKGRPFNVNTDSRDEQWTPKLGLVYKLTPSVSLFANYSQTFMPQSSIASYIGDLPPESSNAYEVGAKFELFDGITADIALFDIHKRNVLYTESIGDETIAKTAGRVRSRGVEVDLAGALTENINIIASYGYTDAKVLEDPDYAGKPLPNVPRHTGSLFLTYDIHNMPGNNTLTFGGGGHGVSRRSATNGADYYLPGYFVADAFAAYKMKLQYPVTLQLNVKNLFDKTYYTSSIATNNLGNQIGDPREVQFTVKMEF

SEQ ID NO: 5618 - protein, 539 aa, Escherichia coli; identical to SEQ ID NO: 3146

SEQ ID NO: 5619 - protein, 191 aa, Escherichia coli
MKKSLLGLTFASLMFSAGSAVAADYKIDKEGQHAFVNFRIQHLGYSWLYGTFKDFDGTFTFDEKNPAADKVNVTINTTSVDTNHAERDKHLRSADFLNTAKYPQATFTSTSVKKDGDELDITGNLTLNGVTKPVTLEAKLIGQGDDPWGGKRAGFEAEGKIKLKDFNIKTDLGPASQEVDLIISVEGVQQK

SEQ ID NO: 5620 - protein, 242 aa, Escherichia coli; identical to SEQ ID NO: 2697

SEQ ID NO: 5621 - protein, 359 aa, Escherichia coli; identical to SEQ ID NO: 2329

SEQ ID NO: 5622 - protein, 646 aa, Escherichia coli
MAASPGSKNKWQHINTWLERDIIPLRSRLTLGDGYTQGDIFDGINFRGAQLASDDNMLPDSQRGFAPVIHGIARGTAQVTIKQNGYDIYNSTVPPGPFTINDIYAAGNSGDLQVTIKEADGSTQIFTVPYSSVPLLQREGHTRYSITAGEYRSGNAQQEKPRFFQSTLLHGLPAGWTIYGGTQLADRYRAFNFGIGKNMGALGALSVDMTQANSTLPDDSQHDGQSVRFLYNKSLNESGTNIQLVGYRYSTSGYFNFADTTYSRMNGYNIETQDGVIQVKPKFTDYYNLAYNKRGKLQLTVTQQLGRTSTLYLSGSHQTYWGTSNVDEQFQAGLNTAFEDSNWTLSYSLTKNAWQKGRDQMLALNVNIPFSHWLRSDSKSQWRHASASYSMSHDLNGRMTNLVGVYGTLLEDNNLSYSVQTGYAGGGDGNSGSTGYATLNYRGGYGNANIGYSHSDDIKQLYYGVSGGILAHANGVTLGQPLNETVVLVKAPGAKDAKVENQTGVRTDWRGYAVLPYATEYRENRVALDTNTLADNVDLDNAVANVVPTRGAIVRAEFKARVGIKLLMTLTHNNKPLPFGAMVTSESSQSSGIVADNGQVYLSGMPLAGKVQVKWGEEENAHCVANYQLPPESQQQLLTQLSAECR

SEQ ID NO: 5623 - protein, 331 aa, Escherichia coli; identical to SEQ ID NO: 2705

SEQ ID NO: 5624 - protein, 213 aa, Escherichia coli
MTKMSRYALITALAMFLAGCVGQREPAPVEEVKPAPEQPTEPQQPVPTVPSVPTIPQQPGPIEHEDQTAPPAPHIRHYDWNGAMQPMVSKMLGADGVTAGSVLLVDSVNNRTNGSLNAAEATETLRNALANNGKFTLVSAQQLSMAKQQLGLSPQDSLGTRSKAIGIARNVGAHYVLYSSASGNVNAPTLQMQLMLVQTGEIIWSGKGAVSQQ

SEQ ID NO: 5625 - protein, 111 aa, Escherichia coli; identical to SEQ ID NO: 3419

SEQ ID NO: 5626 - protein, 205 aa, Escherichia coli
MVIFGTRIIYPAEQKEVMVQLMNQGNRSSLMQAWIDDGDTSLPPEKIQVPFMLTPPVVKVAANSGQQIKIKIMPNKLPSNKESIFYLNVLDIPPNSPEQEGKNALKFAMQNRIKLFYRPAGIAPVNKATFKKLLINRSGNGLVIKNDSANWVTISDVKANNVKVNYETIMIAPLESQSVNVKSNNANNWYLTIIDDHGNYISDKI

SEQ ID NO: 5627 - protein, 162 aa, Escherichia coli; identical to SEQ ID NO: 1965

SEQ ID NO: 5628 - protein, 673 aa, Escherichia coli; identical to SEQ ID NO: 2919

SEQ ID NO: 5629 - protein, 746 aa, Escherichia coli
MNKKIHSLALLVNLGIYGVAQAQEPTDTPVSHDDTIVVTAAEQNLQAPGVSTITADEIRKNPVARDVSEIIRTMPGVNLTGNSTSGQRGNNRQIDIRGMGPENTLILIDGKPVSSRNSVRQGWRGERDTRGDTSWVPPEMIERIEVLRGPAAARYGNGAAGGVVNIITKKGSGEWHGSWDAYFNAPEHKEEGATKRTNFSLTGPLGDEFSFRLYGNLDKTQADAWDINQGHQSARAGTYATTLPAGREGVINKDINGVVRWDFAPLQSLELEAGYSRQGNLYAGDTQNTNSDSYTRSKYGDETNRLYRQNYALTWNGGWDNGVTTSNWVQYEHTRNSRIPEGLAGGTEGKFNEKATQDFVDIDLDDVMLHSEVNLPIDFLVNQTLTLGTEWNQQRMKDLSSNTQALTGTNTGGAIDGVSATDRSPYSKAEIFSLFAENNMELTDSTIVTPGLRFDHHSIVGNNWSPALNISQGLGDDFTLKMGIARAYKAPSLYQTNPNYILYSKGQGCYASAGGCYLQGNDDLKAETSINKEIGLEFKRDGWLAGVTWFRNDYRNKIEAGYVAVGQNAVGTDLYQWDNVPKAVVEGLEGSLNVPVSETVMWTNNITYMLKSENKTTGDRLSIIPEYTLNSTLSWQAREDLSMQTTFTWYGKQQPKKYNYKGQPAVGPETKEISPYSIVGLSATWDVTKNVSLTGGVDNLFDKRLWRAGNAQTTGDLAGANYIAGAGAYTYNEPGRTWYMSVNTHF

SEQ ID NO: 5630 - protein, 244 aa, Escherichia coli; identical to SEQ ID NO: 4064

SEQ ID NO: 5631 - protein, 749 aa, Escherichia coli
MARSKTAQPKHSLRKIAVVVATAVSGMSVYAQAAVEPKEDTITVTAAPAPQESAWGPAATIAARQSATGTKTDTPIQKVPQSISVVTAEEMALHQPKSVKEALSYTPGVAVGTRGASNTYDYLIIRGFAADGQSQNNYLNGLKMQGNFYNDAVIDPYMLERAEIMRGPVSVLYGKSSPGGLLNMVSKRPTTEPLKEVQFKAGTDSLFQTGFDFSDALDDDGVYSYRLTGLARSANAQQKGAEEQRYAIAPAFTWRPNDKTNFTFLSYFQNEPETGYYGWLPKEGTVEPLPNGKRLPTDFNEGAKNNTYSRNEKMIGYSFDHEFNDTFTVRQNLRFAQNKVSQKSVYGYGMCSDPLYSSNPSSSPCANVPQSQWGHTLTRQYVIDNEKLENFSVDTQLQSKFATGSVDHTLLTGVDFMRMRNDIDSWFGYAGSVAPSDIYNLDRSDFDFGAHPNPSGPYRVLLKQKQTGLYVQDQAQWDKVLVTLGGRYDWADQSSFNRDYGNKSERDDKEFTWRGGVNYLFDNGVTPYFSYSESFEPASQTDANGDLFAPSKGKQYEVGVKYVPEDRPIVVTGALYQLTKTNNLMADPNGSLFSVEGGEIRARGVELEAKAALSASVNLVGSYTYTDAEYTTDTNYKGNTPAQVPKHMASLWADYTFFDGPLSGLTLGTGGRYTGSSYGDPANSFKVGSYTVVDALVRYDLARVGMAGSNVALHVNNLFDREYVASCFNTYGCFWGAERQVVATATFRF

SEQ ID NO: 5632 - protein, 478 aa, Escherichia coli; identical to SEQ ID NO: 2405

SEQ ID NO: 5633 - protein, 246 aa, Escherichia coli
MKSPLITTGMICLLGICNFAQATVSPDRTRIIFNASNKSATVRLTNQSKIDPYLAQSWIEDASGKKTRGYISTLPPMERIEPDEQVQIRLMALASLNNLPQDRETLFYYNVREIPPRTKEQNVMQIAMQSRLKLFWRPKAIELKEGQMVPLQKVTITRTAAGLTLNNPTPYHITVGYIGTNGKTLMPGADSIMVTPFASATQYLNNLPSTFQLGFVADYGGLEMFKVECNSVQSLCQSSPAKKGKI

SEQ ID NO: 5634 - protein, 162 aa, Escherichia coli; identical to SEQ ID NO: 1973

SEQ ID NO: 5635 - protein, 232 aa, Escherichia coli; identical to SEQ ID NO: 2087

SEQ ID NO: 5636 - protein, 565 aa, Escherichia coli; identical to SEQ ID NO: 3088

SEQ ID NO: 5637 - protein, 565 aa, Escherichia coli
MKSPAPSRPQKMALIPACIFLCFAALSVQAEETSVTPQPPDILLGPLFNDVQNAKLFPDQKTFADAVPNSDPLMILADYRMQQNQSGFDLRHFVNVNFTLPKEGEKYVPPEGQSLREHIDGLWPVLTRSTENTEKWDSLLPLPKPYVVPGGRFREVYYWDSYFTMLGLAESGHWDKVADMVANFAHEIDTYGHIPNGNRSYYLSRSQPPFFALMVELLAQHEGDAALKQYLPQMQKEYAYWMDGVENLQAGQQEKRVVKLQDGTLLNRYWDDRDTPRPESWVEDIATAKSNPNRPATEIYRDLRSAAASGWDFSSRWMDNPQQLNTLRTTSIVPVDLNSLMFKMEKILARASKAIGDNAMANQYETLANARQKGIEKYLWNDQQSWYADYDLKSHKVRNQLTAAALFPLYVNAAAKDRASKMATATKTHLLQPGGLNTTSVKSGQQWDAPNGWAPLQWVATEGLQNYGQKEVAMDISWHFLTNVQHTYDREKKLVEKYDVSTTGTGGGGGEYPLQDGFGWTNGVTLKMLDLICPKEQPCDNVPATRPLSESTTQPLKQKEAEPTP

SEQ ID NO: 5638 - protein, 191 aa, Escherichia coli; identical to SEQ ID NO: 2727

SEQ ID NO: 5639 - protein, 675 aa, Escherichia coli
MAAEDVMIVSASGYEKKLTNAAASVSVISQEELQSSQYHDLAEALRAVEGVDVESGTGKTGGLEISIRGMPASYTLILIDGVRQGGSGDVTPNGFSAMNTGFMPPLAAIERIEVIRGPMSTLYGSDAMGGVVNIITKKNADKWLSSVNAGLNLQESNKWGNSSQFNFWSSGPLVDDSVSLQIRGSTQQRQGSSVTSLSDTSATRIPYPTESQNYNLGARIDWKATEQDVLWFDMDTTRQRYDNQDGQLGSLTGGYDHTLRYERNKISAGYDHTFTFGTWKSYLNWNETENKGRELVRSVLKSDKWGLAGKPRELKESNLILNSLLLTPLGESHLLTVGGEYQSSSMKDGVVLASTGETFRQKSWSVFAEDEWHLTDVLALTAGSRYEHHDQFGGHFSPRAYLVWDVTDAWTLKGGVTTGYKAPTMGQLHKGISGVSGQGRTNLLGNPELKPEESVSYEAGVYYDNLSGLNANITGFITDFSNKIVSYSIDDNTNSYTNSGKARLHGVEFAGTLPLWSEDVTLSLNYTWTQSEQRDGDNKGDPLSYTPEHMVNAKLNWQITEEVASWLGARYRGKTPRFTRNYSSLSAVQKKVYDEKGEYLKAWTVVDAGLSWKVTDALTLNAAVNNLLNKDYSDVSLYSADKSTLYAGDYFQTGSSTTGYVIPERNYWMSLNYQF

SEQ ID NO: 5640 - protein, 246 aa, Escherichia coli
MFFNTKYTAALCFATCVAFSSSAIADIVISGTRVIYKSDQKSVNIRLENKGNNPLLVQSWLDTGDDNAEPGSITVPFTATPPVSRIDAKRGQTIKLMYTASSVLPKDRESVFWFNVLEVPPKPDAATVANQSLLQLAFRTRIKLFYRPEALKGNPSEAPLALKWSWSGSEGKAALRVANPTPYYVSFSSGDLEASGKRFPIDVKMIAPFSDEVMKVTGLNGKANSAKVHFYAINDFGGAIEGNASL

SEQ ID NO: 5641 - protein, 118 aa, Escherichia coli [sequence omitted]

SEQ ID NO: 5642 - protein, 686 aa, Escherichia coli; identical to SEQ ID NO: 3015

SEQ ID NO: 5643 - protein, 193 aa, Escherichia coli; identical to SEQ ID NO: 2246

SEQ ID NO: 5644 - protein, 540 aa, Escherichia coli
MKLNIFTKSMIGMGLVCSALPALAMEAWNNQQGGNKYQVIFDGKIYENAWWVSSTNCPGKAKANDATNPWRLKRTATAAEISQFGNTLSCEKSGSSSSSNSNTPASNTPANGGSATPAQGTVPSNSSVVAWNKQQGGQTWYVVFNGAVYKNAWWVASSNCPGDAKSNDASNPWRYVRAATATEISETSNPQSCTSAPQPSPDVKPAPDVKPAPDVQPAPADKSNDNYAVVAWKGQEGSSTWYVIYNGGIYKNAWWVGAANCPGDAKENDASNPWRYVRAATATEISQYGNPGSCSVKPDNNGGAVTPVDPTPETPVTPTPDNSEPSTPADSVNDYSLQAWSGQEGSEIYHVIFNGNVYKNAWWVGSKDCPRGTSAENSNNPWRLERTATAAELSQYGNPTTCEIDNGGVIVADGFQASKAYSADSIVDYNDAHYKTSVDQDAWGFVPGGDNPWKKYEPAKAWSASTVYVKGDRVVVDGQAYEALFWTQSDNPALVANQNATGSNSRPWKPLGKAQSYSNEELNNAPQFNPETLYASDTLI

SEQ ID NO: 5645 - protein, 361 aa, Escherichia coli; identical to SEQ ID NO: 3061

SEQ ID NO: 5646 - protein, 203 aa, Escherichia coli; identical to SEQ ID NO: 2008

SEQ ID NO: 5647 - protein, 274 aa, Escherichia coli; identical to SEQ ID NO: 2309

SEQ ID NO: 5648 - protein, 557 aa, Escherichia coli
MTREGGYYGMTMDPGEYAVSVTVKGKTAVYGRVRIEGTESTVTLNMLLRRSLVEVSIPGELLTDFRQIQNNVADDLATIRRLNEDTATKNTQATQSKESAAASAKSASDSAKTATSRAAEAGQKASEAAEAATRAGESEKAAAADAKNAKQHAETARVAQQAAGDILERAEAATVSAEEARRMAENARGPQGDQGPKGDTGPRGEKGEPGQRGPQGPKGERGERGPQGSVGPAGPRGEKGEQGERGPQGLQGLKGETGERGAQGAQGPAGPTGATGPAGPRGETGPQGAQGPAGATGPVGPQGERGIQGPAGPAGPRGETGARGEKGDPGDPGGPPGPKGDTGPAGPAGEKGEPGERGPQGLQGPPGPAGERGPAGEPGAKGETGKPGPAGPQGQPGPQGLKGDRGEPGPTGPQGPAGERGPQGPRGVAGPVGPAGAAGAKGDAGPAGPAGPRGPAGERGPAGPKGERGEPGPMGPPGPAGDAGNSTVKGIRLGNEMVYRPYSGYSNLSLRSMDGCVLTGIAGTNMPDKSRIDEIYYRPLQMTFGDGSWRSVGIGEV

SEQ ID NO: 5649 - protein, 656 aa, Escherichia coli
MYMNVIRTVICTLIILPVGLQAATSHSSMAKDTITVVATGNQNTVFETPSMVSVITNDTAWSQNAVTSAGMLKGVAGLSQTGAGRTNGQTFNLRGYDKSGVLVLVDGVRQLSDMAKSSGTYLDPALIKRIEVVRGPNSSLYGSGGLGGVVDFRTADAADFLPPGETNGVSLWGNIASGDHSTGSGLTWFGKTGKTDALLSVIMRKRGNIYQSDGERAPNKEKPAALFAKGSVSITDSNKAGASLRLYQNNTTEPGNPTLTHGDNGLRDRKTAQNDVQFWYQYSPADNSLINVKSTLYLSDITIKTNGHNKTAEWRNNRTSGVNVVNRSHTLIFPGAHQLSYGAEYYRQQQKPEGSATLYPEGNIDFTSLYFQDEMTMKSNPVNIIVGSRYDRYKSFNPRAGKLKAERLSPRAAISVSPTDWLMMYGSISSAFRAPTMAEMYRDDVHFYRKGKPNYWVPNLNLKPENNITREIGAGIQLDGLLTDNDRLQLKGGYFGTDARNYIATRVDMKRMRSYSYNVSRARIWGWDMQGNYHSDYFDWMLSYNRTESMDASSREWLGSGNPDTLISDISIPVGHGGVSAGWHAELSAAATHVKKGDPHQAGYALHSFSLSYKPVSVKGFEASVTLDNAFNKLAMNGKGVPLSGRTVSLYTRYQW

SEQ ID NO: 5650 - protein, 250 aa, Escherichia coli
MFYKLSCSMVVSTTLAVLLTTTNLAAHASVTPDRTRLVFNESDKSISVTLRNNNEKLPYLAQSWLEDEKGNKITSPLAVLPPVQRIDAMMNGQVKIQALPDIHTLPSDRESLFYYNVREIPPKSGKANTLQIALQTRIKLFWRPKALEKIDMRKPWQFKVTLTRSGQDYIVNNPTPYHVIISDASTQKKGLTAAGFKPLVMPPKTSQPLKAKMNSAPVLTYINDYGARLPLVFRCEGDTCKVDEAQSLKG

SEQ ID NO: 5651 - protein, 200 aa, Escherichia coli; identical to SEQ ID NO: 1793

SEQ ID NO: 5652 - protein, 430 aa, Escherichia coli; identical to SEQ ID NO: 2617

SEQ ID NO: 5653 - protein, 102 aa, Escherichia coli; identical to SEQ ID NO: 1829

SEQ ID NO: 5654 - protein, 760 aa, Escherichia coli; identical to SEQ ID NO: 2080

SEQ ID NO: 5655 - protein, 446 aa, Escherichia coli [sequence omitted]

SEQ ID NO: 5656 - protein, 696 aa, Escherichia coli; identical to SEQ ID NO: 4038

SEQ ID NO: 5657 - protein, 430 aa, Escherichia coli; identical to SEQ ID NO: 2617

SEQ ID NO: 5658 - protein, 386 aa, Escherichia coli
MVDDVPVAQVLQALAEQEKLNLVVSPDVSGTVSLHLTDVPWKQALQTVVKSAGLITRQEGNILSVHSIAWQNNNIARQEAEQARAQANLPLENRSITLQYADAGELAKAGEKLLSAKGSMTVDKRTNRLLLRDNKTALSALEQWVAQMDLPVGQVELSAHIVTINEKSLRELGVKWTLADAQHAGGVGQVTTLGSDLSVATATTHVGFNIGRINGRLLDLELSALEQKQQLDIIASPRLLASHLQPASIKQGSEIPYQVSSGESGATSVEFKEAVLGMEVTPTVLQKGRIRLKLHISQNVPGQVLQQADGEVLAIDKQEIETQVEVKSGETLALGGIFTRKNKSGQDSVPLLGDIPWFGQLFRHDGKEDERRELVVFITPRLVSNE

SEQ ID NO: 5659 - protein, 286 aa, Escherichia coli
MRRVISPWASAGYLRPDCRILRNYRRLRVSKRNAVTTFFTNRVTKALGMTLALMMTCQSAMASLAVDQTRYIFRGDKDALTITVTNNDKERTFGGQAWVDNIVEKDTRPTFVVTPSFFKVKPNGQQTLRIIMASDHLPKDKESVYWLNLQDIPPALEGSGIAVALRTKLKLFYRPKALLEGRKGAEEGISLQSRPDGRTMLVNTTPYIFAIGSLLDGNGKKIATDNGTTQKLLMFMPGDEVQVKGNVVKVDSLNDYGELQTWTINKKKPAAPEAAKAEKADTAEQK

SEQ ID NO: 5660 - protein, 373 aa, Escherichia coli; identical to SEQ ID NO: 2969

SEQ ID NO: 5661 - protein, 686 aa, Escherichia coli
MFWRDMTLSVWRKKTTGLKTKKRLLALVLAATLCSSPVWAEEATFTANFKDTDLKSFIETVGANLNKTIIMGPGVQGKVSIRTMTPLNERQYYQLFLNLLEAQGYAVVPMENDVLKVVKSSAAKVEPLPLVGEGSDNYAGDEMVTKVVPVRNVSVRELAPILRQMIDSAGSGNVVNYDPSNVIMLTGRASVVERLTEVIQRVDHAGNRTEEVIPLDNASASEIARVLESLTKNSGENQPATLKSQIVADERTNSVIVSGDPATRDKMRRLIRRLDSEMERSGNSQVFYLKYSKAEDLVDVLKQVSGTLTAAKEEAEGTVGSGREVVSIAASKHSNALIVTAPQDIMQSLQSVIEQLDIRRAQVHVEALIVEVAEGSNINFGVQWASKDAGLMQFANGTQIPIGTLGAAISQAKPQKGSTVISENGATTINPDTNGDLSTLAQLLSGFSGTAVGVVKGDWMALVQAVKNDSSSNVLSTPSITTLDNQEAFFMVGQDVPVLTGSTVGSNNSNPFNTVERKKVGIMLKVTPQINEGNAVQMVIEQEVSKVEGQTSLDVVFGERKLKTTVLANDGELIVLGGLMDDQAGESVAKVPLLGDIPLIGNLFKSTADKKEKRNLMVFIRPTILRDGMAADGVSQRKYNYMRAEQIYRDEQGLSLMPHTAQPVLPAQNQALPPEVRAFLNAGRTR

SEQ ID NO: 5662 - protein, 341 aa, Escherichia coli; identical to SEQ ID NO: 3264

SEQ ID NO: 5663 - protein, 203 aa, Escherichia coli; identical to SEQ ID NO: 2201

SEQ ID NO: 5664 - protein, 774 aa, Escherichia coli; identical to SEQ ID NO: 2066

SEQ ID NO: 5665 - protein, 102 aa, Escherichia coli; identical to SEQ ID NO: 1829

SEQ ID NO: 5666 - protein, 232 aa, Escherichia coli; identical to SEQ ID NO: 2087

SEQ ID NO: 5667 - protein, 274 aa, Escherichia coli
MNKTAIALLALLASSACLAATPWQKITQPVPGSAQSIGSFSNGCIVGADTLPIQSEHYQVMRTDQRRYFGHPDLVMFIQRLSSQVSNLGMGTVLIGDMGMPAGGRFNGGHASHQTGLDVDIFLQLPKTRWTSAQLLRPQALDLVSRDGKHVVPTLWKPEIFSLIKLAAQDKDVTRIFVNPAIKQQLCLDAGTDRDWLRKVRPWFQHRAHMHVRLRCPADSLECEDQPLPPPGDGCGAELQSWFEPPKPGTTKPEKKTPPPLPPSCQALLDEHVI

SEQ ID NO: 5668 - protein, 119 aa, Escherichia coli; identical to SEQ ID NO: 2841

SEQ ID NO: 5669 - protein, 673 aa, Escherichia coli; identical to SEQ ID NO: 2919

SEQ ID NO: 5670 - protein, 690 aa, Escherichia coli
MIVTGNTAADTTDSAAGAGFKTNDIDVGPLGTKSWIETPYSSTTVTKEMIENQQAQSVSEMLKYSPSTQMQARGGMDVGRPQSRGMQGSVVANSRLDGLNIVSTTAFPVEMLERMDVLNSLTGALYGPASPAGQFNFVAKRPTEETLRKVTLGYQSRSAFTGHADLGGHFDENKRFGYRVNLLDQEGEGNVHDSTLRRKLVSVALDWNIQPGTQLQLDASHYEFIQKGYVGSFNYGPNVKLPSAPNPKDKNLALSTAGNDLTTDTISTRLIHYFNDDWSMNAGVGWQQADRAMRSVSSKILNNQGDISRSMKDSTAAGRFRVLSNTAGLNGHIDTGSICHDLSLSTTGYVWSLYSAKGTGSSYSWGTTNMYHPDAIDEQGDGKIRTGGPRYRSSVNTQQSVTLGDTVTFTPQWSAMFYLSQSWLQTKNYDKHGNQTNQVDENGLSPNAALMYKITPNTMAYVSYADSLEQGGTAPTDESVKNAGQTLNPYRSKQYEVGLKSDIGEMNLGAALFRLERPFAYLDTDNVYKEQGNQVNNGLELTAAGNVWQGLNIYSGVTFLDPKLKDTANASTSNKQVVGVPKVQANLLAEYSLPSIPEWVYSANVHYTGKRAANDTNTSYASSYTTWDLGTRYTTKVSNVPTTFRVVVNNVFDKHYWASIFPSGTDGDNGSPSAFIGGGREVRASVTFDF

SEQ ID NO: 5671 - protein, 682 aa, Escherichia coli; identical to SEQ ID NO: 3817

SEQ ID NO: 5672 - protein, 124 aa, Escherichia coli; identical to SEQ ID NO: 2002

SEQ ID NO: 5673 - protein, 276 aa, Escherichia coli
MALSFSGLSSCMIYKFSSMKNITFIFFILLASPLYANGDRLYRADSRPPDEIKRSGGLMPRGHNEYFDRGTQMNINLYDHARGTQTGFVRYDDGYVSTSLSLRSAHLAGQSILSGYSTYYIYVIATAPNMFNVNDVLGVYSPHPYEQEVSALGGIPYSQIYGWYRVNFGVIDERLHRNREYRDRYYRNLNIAPAEDGYRLAGFPPDHQAWREEPWIHHAPQGCGNSSRTITGDTCNEETQNLSTIYLREYQSKVKRQIFSDYQSEVDIYNRIRDEL

SEQ ID NO: 5674 - protein, 700 aa, Escherichia coli
MKIFSVRQTVLPALLVLSPVVFAADEQTMIVSAAPQVVSELDTPAAVSVVDGEEMRLATPRINLSESLTGVPGLQVQNRQNYAQDLQLSIRGFGSRSTYGIRGIRLYVDGIPATMPDGQGQTSNIDLSSVQNVEVLRGPFSALYGNASGGVMNVTTQTGQQPPTIEASSYYGSFGSWRYGLKATGATGDGTQPGDVDYTVATTRFTTHGYRDHSGAQKNLANAKLGVRIDDASKLSLIFNSVDIKADDPGGLTEAEWKANPQQAPRAEQYDMRKTIKQTQAGLRYERSLSAQDDMSVMMYAGERETTQYQSIPMAPQLNPSHAGGVITLQRHYQGIDSRWTHRGELGVPVTFTTGLNYENMSENRKGYNNFRLNRGVPEYGQKGELRRDERNLMWNVDPYLQTQWQLTDKLSLDAGVRYSSVWFDSNDHYVTPGNGDDSGDASYHKWLPAGSLKYAMTDAWNVYLAAGRGFETPTINELSYRADGQSGMNFGLKPSTNDTIEIGSKTRIGDGLLSLALFQTDTDDEIVVDSSSGGRTTYKNAGKTRRQGAELAWDQRFAGDFRVKASWTWLDATYRSNVCNEQDCNGNRMPGIARNMGFASIGYIPEDGWYAGTEARYMGDIMADDENTAKAPSYTLVGLFTGYKYNYHNLTVDLFGRVDNLFDKEYVGSVIVNESNGRYYEPAPGRNYGVGINIAWRFE

SEQ ID NO: 5675 - protein, 221 aa, Escherichia coli; identical to SEQ ID NO: 3141

SEQ ID NO: 5676 - protein, 361 aa, Escherichia coli; identical to SEQ ID NO: 3061

SEQ ID NO: 5677 - protein, 646 aa, Escherichia coli
MRLATPRINLSESLTGVPGLQVQNRQNYAQDLQLSIRGFGSRSTYGIRGIRLYVDGIPATMPDGQGQTSNIDLSSVQNVEVLRGPFSALYGNASGGVMNVTTQTGQQPPTIEASSYYGSFGSWRYGLKATGATGDGTQPGDVDYTVSTTRFTTHGYRDHSGAQKNLANAKLGVRIDEASKLSLIFNSVDIKADDPGGLTKAEWKANPQQAPRAEQYDTRKTIKQTQAGLRYERSLSSRDDMSVMMYAGERETTQYQSIPMAPQLNPSHAGGVITLQRHYQGIDSRWTHRGELGVPVTFTTGLNYENMSENRKGYNNFRLNSGMPEYGQKGELRRDERNLMWNIDPYLQTQWQLSEKLSLDAGVRYSSVWFDSNDHYVTPGNGDDSGDASYHKWLPAGSLKYAMTDAWNIYLAAGRGFETPTINELSYRADGQSGMNLGLKPSTNDTIEIGSKTRIGDGLLSLALFQTDTDDEIVVDSSSGGRTTYKNAGKTRRQGAELAWDQRFAGDFRVNASWTWLDATYRSNVCNEQDCNGNRMPGIARNMGFASIGYVPEDGWYAGTEARYMGDIMADDENTAKAPSYTLVGLFTGYKYNYHNLTVDLFGRVDNLFDKEYVGSVIVNESNGRYYEPSPGRNYGVGMNIAWRFE

SEQ ID NO: 5678 - protein, 230 aa, Escherichia coli; identical to SEQ ID NO: 2580

SEQ ID NO: 5679 - protein, 760 aa, Escherichia coli
MENNRNFPARQFHSLTFFAGLCIGITPVAQALAAEGQTNADDTLVVEASTPSLYAPQQSADPKFSRPVADTTRTMTVISEQVIKDQGATNLTDALKNVPGVGAFFAGENGNSTTGDAIYMRGADTSNSIYIDGIRDIGSVSRDTFNTEQVEVIKGPSGTDYGRSAPTGSINMISKQPRNDSGIDASASIGSAWFRRGTLDVNQVIGDTTAVRLNVMGEKTHDAGRDKVKNERYGVAPSVAFGLGTANRLYLNYLHVTQHNTPDGGIPTIGLPGYSAPSAGTAALNHSGKVDTHNFYGTDSDYDDSTTDTATMRFEHDINDNTTIRNTTRWSRVKQDYLMTAIMGGASNITQPTSDVNSWTWSRTANTKDVSNKILTNQTNLTSTFYTGSIGHDVSTGVEFTRETQTNYGVNPVTLPAVNIYHPDSSIHPGGLTRNGANANGQTDTFAIYAFDTLQITRDFELNGGIRLDNYHTEYDSATACGGSGRGAITCPTGVAKGSPVTTVDTAKSGNLVNWKAGALYHLTENGNVYINYAVSQQPPGGNNFALAQSGSGNSANRTDFKPQKANTSEIGTKWQVLDKRLLLTAALFRTDIENEVEQNDDGTYSQYGKKRVEGYEISVAGNITPAWQVIGGYTQQKATIKNGKDVAQDGSSSLPYTPEHAFTLWSQYQATDDISVGAGARYIGSMHKGSDGAVGTPAFTEGYWVADAKLGYRVNRNLDFQLNVYNLFDTDYVASINKSGYRYHPGEPRTFLLTANMHF

SEQ ID NO: 5680 - protein, 199 aa, Escherichia coli; identical to SEQ ID NO: 3190

SEQ ID NO: 5681 - protein, 505 aa, Escherichia coli
MYKKTTLAVLIALLTGATTVHAQTDISSIESRLAALEQRLKNAESRAQAAEARAKTAELQVQKLAETQQQNQLTTQEVAQRTVQLEQKSAENSGFEFHGYARSGLLMNDAASSSKSGPYLTPAGETGGAVGRLGNEADTYVELNVEHKQTLDNGATTRFKAMLADGQRDYNDWTGGSSNLNIRQAFAELGALPSFTGAFKDSTVWAGKRFDRDNFDIHWLDSDVVFLAGTGGGIYDVKWNETFRSNFSLYGRNFGDLDDIDNNVQNYILTMNHYAGPFQLMVSGLRAKDNDDRKDANGDLIQTDAANTGVHALVGLHNDTFYGLREGTAKTALLYGHGLGAEVKGIGSDGALLSEANTWRFASYGTTPLGSGWYVAPAILAQSSKDRYVKGDSYEWVTFNTRLIKEVTQNFALAFEGSYQYMDLKPKGYQNHNAVNGSFYKLTFAPTLKANDINNFFSRPELRLFATWMDWSSKLDDFASNDAFGSSGFNTGGEWNFGVQMETWF

SEQ ID NO: 5682 - protein, 518 aa, Escherichia coli; identical to SEQ ID NO: 2350

SEQ ID NO: 5683 - protein, 200 aa, Escherichia coli; identical to SEQ ID NO: 1793

SEQ ID NO: 5684 - protein, 208 aa, Escherichia coli; identical to SEQ ID NO: 1949

SEQ ID NO: 5685 - protein, 249 aa, Escherichia coli
MRYLNTKNIIAAGVLLSCMSSIAWGAIIPDRTRIIMNESDKGEALKLTNQSKNLPYLAQTWIEDTKGNKSRDFIVTVPPMVRLNPSEQIQIRMITQEKIAQLPKDRETLFYFNVREIPPKTDKKNVMQVTMQHALKLFWRPKAIELEDDGVMTYEKVEIIRRNDGSIRFNNKMPYHVTLGYIGTNGVTMLPQTQSLMVTPFSYANTQFKNVPSTFQVGYINDFGGLIFYEINCPVVNNICNISVANRDQ

SEQ ID NO: 5686 - protein, 614 aa, Escherichia coli
MIKKYWFLMVYSVTAFSVWAQDTPLDTLVVTANRFQEPLSTVLAPVTIVTREDIDRWQVSSVNDVLRRLPGVAISQHGGEGQLSTIFVRGTNSNHTLVLIDGVRLNLAGVSGDADLSQFPVALVQRIEYIRGPRSAIYGSDAIGGVINIITSRENTGTEISAGWGSNSYQHYDISTHQQLGENTRVTLLGDYTYTRGFDAVAYGSTGMQPQSDRDGFLSKTFYGKLEHNLSDTWSGFVRGYGYNNRTKYDAWYSPGSPLIDTRKLYSQSWDAGLRYAGETLQSQLVSSYSHSKDYNYDPHYGRYDTSANLDDMKQYNLQWTNSVTVGHGNVGAGIDRQKQSTTPGTGYLPKGYDQRNTGIYLTGLQKLGDFTLEGAVRNDDNSQFERHTTWQSSAGWEFIEGYRFIASYGTAFKAPNLGQLYGMYGNPNLAPEKSKQWEGAFEGLTGGVNWRISGYRNDISEMINYNPHTLRYYNDGKVHVKGIEATVNFDTGALTHTVSYDYTDARNALTDKPLERRPKLQVKYQLDWQVFDFDWGITYQYIGSRYDSDYSSWPYKSVKMGGVSLWDVAVAYPVTPHLIVRGKIANLFNKDYETGYGYQAAGREYILSGSYTF

SEQ ID NO: 5687 - protein, 747 aa, Escherichia coli; identical to SEQ ID NO: 2072

SEQ ID NO: 5688 - protein, 407 aa, Escherichia coli
MTERELSIIRALGEEFSAVLADLQRTFEGKIAAQAQTFEEKLASLSVVLQKCVTGDDVRPMLEQMVKEAVSHIPVPRDGRDYDPDVLQKAVNDAVGKIPVPANGKSITPDSVRPMIEQMVKEAVSHIPVPRDGRDYDPDVLQKAVNDAVANIPQPADGKSLTPDDVRPMLEQMVKEAVSHIPVPRDGRDYDPEVLQKAVNDAVANIPQPADGKSITPDDVRPMLEQMVKEAVSHIPVPRDGRDYDPDVLQKAVLDAVSALPAPQDGRDATALEILPAIDDQKSFPRGTYATHQGGLWRAYEKTHGMRGWECLVDGVADIDVSMTGERLFSVVVRQSSGQRTEKTFSLPVMLYRGVFRAGETYHPGDTVTWGGSLWHCNSMTGDKPGEAHSSGWALAAKRGRDAGGGK

SEQ ID NO: 5689 - protein, 351 aa, Escherichia coli; identical to SEQ ID NO: 2519

SEQ ID NO: 5690 - protein, 229 aa, Escherichia coli; identical to SEQ ID NO: 3984

SEQ ID NO: 5691 - protein, 678 aa, Escherichia coli; identical to SEQ ID NO: 2231

SEQ ID NO: 5692 - protein, 654 aa, Escherichia coli; identical to SEQ ID NO: 4042

SEQ ID NO: 5693 - protein, 784 aa, Escherichia coli; identical to SEQ ID NO: 2244

SEQ ID NO: 5694 - protein, 565 aa, Escherichia coli
MKSPAPSRPQKMALIPACIFLCFAALSVQAEETPVTPQPPDILLGPLFNDVQNAKLFPDQKTFADAVPNSDPLMILADYRMQQNQSGFDLRHFVNVNFTLPKEGEKYVPPEGQSLREHIDGLWPVLTRSTENTEKWDSLLPLPEPYVVPGGRFREVYYWDSYFTMLGLAESGHWDKVADMVANFAHEIDTFGHIPNGNRSYYLSRSQPPFFALMVELLAQHEGDAALKQYLPQMQKEYAYWMDGVENLQAGQQEKRVVKLQDGTLLNRYWDDRDTPRPESWVEDIATAKSNPNRPATEIYRDLRSAAASGWDFSSRWMDNPQQLNTLRTTSIVPVDLNSLMFKMEKILARASKAAGDNAMANQYETLANARQKGIEKYLWNDQQGWYADYDLISHKVRNQLTAAALFPLYVNAAAKDRANKMATATKTHLLQPGGLNTTSVKSGQQWDAPNGWAPLQWVATEGLQNYGQKEVAMDISWHFLTNVQHTYDREKKLVEKYDVSTTGTGGGGGEYPLQDGFGWTNGVTLKMLDLICPKEQPCDNVPATRPTVKSATTQPSTKEAQPTP

SEQ ID NO: 5695 - protein, 432 aa, Escherichia coli; identical to SEQ ID NO: 2026

SEQ ID NO: 5696 - protein, 381 aa, Escherichia coli
MTVALSAVAVAVMFAAGAQAAEVYNKDGNKLDLYGRATALHYFSDDKGNDGDQTYARLGFKGETQINDQLTGFGQWEYQFSGNKTESEGSAGNKTRLAFAGLRFADVGTIDYGRNYGIAYDVGSYTDVLPEFGGDGWTQTDNFMTARTSGVLTYRNTDFFGLVDGLNFAAQYQGKNERDDLQKANGDGYGFSASYEFDGFGFVAAYTKSDRTDKQVQGLNGTADVLDPASGKKVGEKAVDSGSVAKGKHAEFWGTGLKYDANNLYLAAVYSETQNMTTFGDQGVADKAQNIEAVVQYQFDFGLRPSLAYLQSRGQDVMVGGVNHGDQDLVKYIDVGATYYFNKNMSTYVDYKINLIDESEFTRKAGVATDNIVAVGMTYQF

SEQ ID NO: 5697 - protein, 760 aa, Escherichia coli
MENNRNFPARQFHSLTFFAGLCIGITPVAQALAAEGQANADDTLVVEASTPSLYAPQKSADPKFSRPVADTTRTMTVISEQVIKDQGATNLTDALKNVPGVGAFFAGENGNSTTGDAIYMRGADTSNSIYIDGIRDIGSVSRDTFNTEQVEVIKGPSGTDYGRSAPTGSINMISKQPRNDSGIDASASIGSAWFRRGTLDVNQVIGDTTAVRLNVMGEKTHDAGRDKVKNERYGVAPSVAFGLGTANRLYLNYLHVTQHNTPDGGIPTIGLPGFSAPSAGTAALNHSGKVDTHNFYGTDSDYDDSTTDTATMRFEHDINDNTTIRNTTRWSRVKQDYLMTAIMGGASNITQPTSDVNSWTWSRTANTKDVSNKILTNQTNLTSTFYTGAIGHDVSTGVEFTRETQTNYGVNPVTLPTVNIYHPDSSIHPGGLTRNGANANGQTDTFAIYAFDTLQITRDFELNGGIRLDNYHTEYDSATACGGSGRGAITCPAGVAKGSPVTTVDTAKSGNLVNWKAGALYHLTENGNVYINYAVSQQPPGGNNFALAQSGSGNSANRTDFKPQKANTSEIGTKWQVLDKRLLLTAALFRTDIENEVEQNDDGTYSQYGKKRVEGYEISVAGNITPAWQMIGGYTQQKATIKNGKDVAQDGSSSLPYTPEHAFTLWSQYQATDDISVGAGARYIGSMHKGSDGAVGTPAFTEGYWVADAKLGYRVNRNLDFQLNVYNLFDTDYVASINKSGYRYHPGEPRTFLLTANMHF

SEQ ID NO: 5698 - protein, 367 aa, Escherichia coli; identical to SEQ ID NO: 2433

SEQ ID NO: 5699 - protein, 432 aa, Escherichia coli; identical to SEQ ID NO: 2026

SEQ ID NO: 5700 - protein, 860 aa, Escherichia coli; identical to SEQ ID NO: 3544

SEQ ID NO: 5701 - protein, 816 aa, Escherichia coli; identical to SEQ ID NO: 3562

SEQ ID NO: 5702 - protein, 863 aa, Escherichia coli; identical to SEQ ID NO: 3959

SEQ ID NO: 5703 - protein, 331 aa, Escherichia coli; identical to SEQ ID NO: 2705

SEQ ID NO: 5704 - protein, 241 aa, Escherichia coli; identical to SEQ ID NO: 3582

SEQ ID NO: 5705 - protein, 200 aa, Escherichia coli; identical to SEQ ID NO: 1788

SEQ ID NO: 5706 - protein, 229 aa, Escherichia coli; identical to SEQ ID NO: 4047

SEQ ID NO: 5707 - protein, 883 aa, Escherichia coli; identical to SEQ ID NO: 2822

SEQ ID NO: 5708 - protein, 614 aa, Escherichia coli; identical to SEQ ID NO: 1883

SEQ ID NO: 5709 - protein, 232 aa, Escherichia coli; identical to SEQ ID NO: 2087

SEQ ID NO: 5710 - protein, 729 aa, Escherichia coli; identical to SEQ ID NO: 2948

SEQ ID NO: 5711 - protein, 539 aa, Escherichia coli; identical to SEQ ID NO: 3050

SEQ ID NO: 5712 - protein, 229 aa, Escherichia coli; identical to SEQ ID NO: 3589

SEQ ID NO: 5713 - protein, 696 aa, Escherichia coli; identical to SEQ ID NO: 4038

SEQ ID NO: 5714 - protein, 650 aa, Escherichia coli; identical to SEQ ID NO: 3057

SEQ ID NO: 5715 - protein, 689 aa, Escherichia coli
MIHATDTATTKDGETITVTADANTATEATDGYQPLSTSTATLTDMPMLDIPQVVNTVSDQVLENQNATTLDEALYNVSNVVQTNTLGGTQDAFVRRGFGANRDGSIMTNGLRTVLPRSFNAATERVEVLKGPASTLYGILDPGGLINVVTKRPEKTFHGSVSATSSSFGGGTGQLDITGPIEGTQLAYRLTGEVQDEDYWRNFGKERSTFIAPSLTWFGDNATVTMLYSHRDYKTPFDRGTIFDLTTKQPVNVDRKIRFDEPFNITDGQSDLAQLNAEYHLNSQWTARFDYSYSQDKYSDNQARVTAYDATTGTLTRRVDATQGSTQRMHSTRADLQGNVDIAGFYNEILGGVSYEYYDLLRTDMIRCKNAKDFNIYNPVYGNTSKCTTVSASDSDQTIKQESYSAYAQDALYLTDNWIAVAGIRYQYYTQYAGKGRPFNVNTDSRDEQWTPKLGLVYKLTPSVSLFANYSQTFMPQSSIASYIGDLPPESSNAYEVGAKFELFDGITADIALFDIHKRNVLYTESIGDETIAKTAGRVRSRGVEVDLAGALTENINIIASYGYTDAKVLEDPDYAGKPLPNVPRHTGSLFLTYDIHNMPGNNTLTFGGGGHGVSRRSATNGADYYLPGYFVADAFAAYKMKLQYPVTLQLNVKNLFDKTYYTSSIATNNLGNQIGDPREVQFTVKMEF

SEQ ID NO: 5716 - protein, 478 aa, Escherichia coli; identical to SEQ ID NO: 2404

SEQ ID NO: 5717 - protein, 237 aa, Escherichia coli; identical to SEQ ID NO: 2816

SEQ ID NO: 5718 - protein, 274 aa, Escherichia coli; identical to SEQ ID NO: 2304

SEQ ID NO: 5719 - protein, 252 aa, Escherichia coli; identical to SEQ ID NO: 3543

SEQ ID NO: 5720 - protein, 368 aa, Escherichia coli; identical to SEQ ID NO: 2370

SEQ ID NO: 5721 - protein, 878 aa, Escherichia coli; identical to SEQ ID NO: 2855

SEQ ID NO: 5722 - protein, 816 aa, Escherichia coli; identical to SEQ ID NO: 4456

SEQ ID NO: 5723 - protein, 266 aa, Escherichia coli; identical to SEQ ID NO: 1892

SEQ ID NO: 5724 - protein, 208 aa, Escherichia coli; identical to SEQ ID NO: 1949

SEQ ID NO: 5725 - protein, 227 aa, Escherichia coli; identical to SEQ ID NO: 3570

SEQ ID NO: 5726 - protein, 230 aa, Escherichia coli; identical to SEQ ID NO: 2995

SEQ ID NO: 5727 - protein, 89 aa, Escherichia coli; identical to SEQ ID NO: 2810

SEQ ID NO: 5728 - protein, 517 aa, Escherichia coli; identical to SEQ ID NO: 2462

SEQ ID NO: 5729 - protein, 243 aa, Escherichia coli; identical to SEQ ID NO: 3561

SEQ ID NO: 5730 - protein, 840 aa, Escherichia coli; identical to SEQ ID NO: 3591

SEQ ID NO: 5731 - protein, 236 aa, Escherichia coli; identical to SEQ ID NO: 3970

SEQ ID NO: 5732 - protein, 656 aa, Escherichia coli; identical to SEQ ID NO: 4901

SEQ ID NO: 5733 - protein, 760 aa, Escherichia coli; identical to SEQ ID NO: 2078

SEQ ID NO: 5734 - protein, 193 aa, Escherichia coli; identical to SEQ ID NO: 2250

SEQ ID NO: 5735 - protein, 998 aa, Escherichia coli; identical to SEQ ID NO: 3056

SEQ ID NO: 5736 - protein, 512 aa, Escherichia coli; identical to SEQ ID NO: 2813

SEQ ID NO: 5737 - protein, 826 aa, Escherichia coli; identical to SEQ ID NO: 3563

SEQ ID NO: 5738 - protein, 627 aa, Escherichia coli; identical to SEQ ID NO: 3529

SEQ ID NO: 5739 - protein, 715 aa, Escherichia coli; identical to SEQ ID NO: 3971

SEQ ID NO: 5740 - protein, 869 aa, Escherichia coli; identical to SEQ ID NO: 2903

SEQ ID NO: 5741 - protein, 446 aa, Escherichia coli; identical to SEQ ID NO: 2180

SEQ ID NO: 5742 - protein, 111 aa, Escherichia coli; identical to SEQ ID NO: 2911

SEQ ID NO: 5743 - protein, 518 aa, Escherichia coli; identical to SEQ ID NO: 2351

SEQ ID NO: 5744 - protein, 660 aa, Escherichia coli; identical to SEQ ID NO: 4092

SEQ ID NO: 5745 - protein, 241 aa, Escherichia coli; identical to SEQ ID NO: 2887

SEQ ID NO: 5746 - protein, 224 aa, Escherichia coli; identical to SEQ ID NO: 3604

SEQ ID NO: 5747 - protein, 747 aa, Escherichia coli; identical to SEQ ID NO: 2954

SEQ ID NO: 5748 - protein, 351 aa, Escherichia coli; identical to SEQ ID NO: 2872

SEQ ID NO: 5749 - protein, 359 aa, Escherichia coli; identical to SEQ ID NO: 2332

SEQ ID NO: 5750 - protein, 213 aa, Escherichia coli; identical to SEQ ID NO: 2232

SEQ ID NO: 5751 - protein, 412 aa, Escherichia coli; identical to SEQ ID NO: 2908

SEQ ID NO: 5752 - protein, 231 aa, Escherichia coli; identical to SEQ ID NO: 2868

SEQ ID NO: 5753 - protein, 224 aa, Escherichia coli; identical to SEQ ID NO: 3578

SEQ ID NO: 5754 - protein, 191 aa, Escherichia coli; identical to SEQ ID NO: 2727

SEQ ID NO: 5755 - protein, 567 aa, Escherichia coli; identical to SEQ ID NO: 3518

SEQ ID NO: 5756 - protein, 700 aa, Escherichia coli; identical to SEQ ID NO: 2926

SEQ ID NO: 5757 - protein, 162 aa, Escherichia coli; identical to SEQ ID NO: 1969

SEQ ID NO: 5758 - protein, 203 aa, Escherichia coli; identical to SEQ ID NO: 2009

SEQ ID NO: 5759 - protein, 746 aa, Escherichia coli; identical to SEQ ID NO: 2949

SEQ ID NO: 5760 - protein, 366 aa, Escherichia coli; identical to SEQ ID NO: 3520

SEQ ID NO: 5761 - protein, 203 aa, Escherichia coli
MKKIAITCALLSSLVASSVWADAASDLKSRLDKVSSFHASFTQKVTDGSGAAVQEGQGDLWVKRPNLFNWHMTQPDESILVSDGKTLWFYNPFVEQATATWLKDATGNTPFMLIARNQSSDWQQYNIKQNGDDFVLTPKASNGNLKQFTINVGRDGTIHQFSAVEQDDQRSSYQLKSQKNGAVDAAKFTFTPPQGVTVDDQRK

SEQ ID NO: 5762 - protein, 678 aa, Escherichia coli; identical to SEQ ID NO: 2902

SEQ ID NO: 5763 - protein, 233 aa, Escherichia coli; identical to SEQ ID NO: 3548

SEQ ID NO: 5764 - protein, 122 aa, Escherichia coli; identical to SEQ ID NO: 2915

SEQ ID NO: 5765 - protein, 828 aa, Escherichia coli; identical to SEQ ID NO: 2381

SEQ ID NO: 5766 - protein, 432 aa, Escherichia coli; identical to SEQ ID NO: 2026

SEQ ID NO: 5767 - protein, 881 aa, Escherichia coli
MPDHSLFRLRILPWCIALAMSGSYSSVWAEDDIQFDSRFLELKGDTKIDLKRFSSQGYVEPGKYNLQVQLNKQPLAEEYDIYWYAGEDDASKSYACLTPELVAQFGLKEDVAKNLQWSHDAKCLKSGQLEGMEIKADLSQSALVISLPQAYLEYTYPDWDPPSRWDDGISGIVADYSINAQTRHEENGGDDSNEISGNGTVGVNLGPWRMRADWQTNYQHTRSNDDDEEFSGDDTQKKWEWSRYYAWRALPSLKAKLALGEDYLNSDIFDGFNYVGGSVSTDDQMLPPNLRGYAPDISGVAHTTAKVTVSQMGRVIYETQVPAGPFRIQDLGDSVSGTLHIRIEEQNGQVQEYDISTASMPYLTRPGQVRYKIMMGRPQEWGHHVEGEFFSGAEASWGIANGWSLYGGALGDENYQSAALGVGRDLSTFGAVAFDVTHSHTKLDKDTAYGKGSLDGNSFRVSYSKDFDQLNSRVTFAGYRFSEENFMTMSEYLDASDSGMVRTGNDKEMYTATYNQNFRDAGVSVYLNYTRHTYWDREEQTNYNIMLSHYFNMGSIRNMSVSLTGYRYEYDNRADKGMYISLSMPWGDNSTVSYNGNYGSGTDSSQVGYFSRVDDATHYQLNVGTSDKHTSVDGYYSHDGSLAQVDLSANYHEGQYTSAGLSLQGGATLTAHGGALHRTQNMGGTRLLIDADGVADVPVEGNGAAVYTNMFGKAVVSDVNNYYRNQAYIDLNKLPENAEATQSVVQATLTEGAIGYRKFTVISGQKAMAVLRLSDGSHPPFGAEVKNDNEQTVGLVDDDGNVYLAGVKPGEHMSVFWSGVAHCDINLPDPLPADLFNGLLLPCQHKGNVAPVTSLAVKLAIQEQTQRVTPTEPPTSISVNQ

SEQ ID NO: 5768 - protein, 832 aa, Escherichia coli
MYKKLKLTTISELIKNIYCSLSVIIIGCASAYAVEFNKDLIEAEDRENVNLSQFETDGQLPVGKYSLSTLINNKRTPIHLDLQWVLIDNLTAVCVTPEQLTLLGFTDEIIEEAQQNLIDGCYPIEKEKQITTYLDKGKMQLSISAPQAWLKYKDANWTPPELWDHGIAGAFLDYNLYASHYAPHQGDNSQNISSYGQAGVNLGAWRLRTDYQYDQSFNNGKSQANNLDFPRIYLFRPIPAINAKLTIGQYDTESSIFDSFHFSGVSLKSDENMLPPDLRGYAPQITGVAQTNAKVTVSQNNRIIYQENVPPGPFSITNLFNTLQGQLDVKVEEEDGRVTQWQVASNSIPYLTRKGQIRYTTAMGKPTSVGGDSLQQPFFWTGEFSWGWLNNVSLYGGSVLTNRDYQSLATGVGFNLNSLGSLSFDVTRSDAQLHNQNKETGYSYRANYSKRFESTGSQLTFAGYRFSDKNFVSMNEYINDTNHYTNYQNEKESYIVTFNQYLESLRLNKYVSLARNTYWDASSNVNYSLSLSRDFDIGPLKNVSTSLTFSRINWEDDNQDQLYLNISIPWGTSRTLSYGMQRNQDNNISHTASWYDSSDRNNSWSVSASGDNDEFKDMEASLRASYQHNTENGRLYLSGTSQRDSYYSLNASWNGSFTATRHGAAFHDYSGSADSRFMIDADGAEDISLNNKRAVTNRYGIGVIPSVSSYITTSLSVDTRNLPENVDIENSVITTTLTEGAIGYAKLDTRKGYQIMGVIRLADGSHPPLGISVKDETSHKELGLVADGGFVYLNGIQDDSKLTLRWGDKSCFIQPPKSSNLTTGTVILPCIS

SEQ ID NO: 5769 - protein, 869 aa, Escherichia coli
MKIPTTTDIPQRYTWCLAGICYSSLAILPSFLSYAESYFNPAFLLENGTSVADLSRFERGNHQPAGVYRVDLWRNDEFIGSQDIVFESTTENTGDKSGGLMPCFNQVLLERISLNSSAFPELAQQQNNKCINLLKAVPDATINFDFAAMRLNITISQIALLSSAHGYIPPEEWDEGIPALLLNYNFTGNRGNGNDSYFFSELSGINIGPWRLRNNGSWNYFRGNGYHSEQWNNIGTWVQRAIIPLKSELVMGDGNTGSDIFDGVGFRGIRLYSSDNMYPDSQQGFAPTVRGIARTAAQLTIRQNGFIIYQSYVSPGAFEITDLHPTSSNGDLDVTIDERDGNQQNYTIPYSTVPILQREGRFKFDLTAGDFRSGNSQQSSPFFFQGTALGGLPQEFTAYGGTQLSANYTAFLLGLGRNLGNWGTVSLDVTHARSQLADDSRHEGDSIRFLYAKSMNTFGTNFQLMGYRYSTQGFYTLDDVAYRRMEGYEYDYDYDGEHRDEPIIVNYHNLRFSRKDRLQLNISQSLNDFGSLYISGTHQKYWNTSDSDTWYQVGYTSSWVGISYSLSFSWNESVGNPDNERIVGLNVSVPFNVLTKRRYTRENALDRAYASFNANRNSNGQNSWLAGVGGTLLEGHNLSYHVSQGDTSNNGYTGSATANWQAAYGTLGVGYNYDRDQHDVNWQLSGGVVGHENGITLSQPLGDTNVLIKAPGAGGVRIENQTGILTDWRGYAVMPYATVYRYNRIALDTNTMGNSIDVEKNISSVVPTQGALVRANFDTRIGVRALITVTQGRKPVPFGSLVRENSTGITSMVGDDGQVYLSGAPLSGELLVQWGDGANSRCIAHYVLPKQSLQQAVTVISAVCTHPGS

SEQ ID NO: 5770 - protein, 753 aa, Escherichia coli
MNVIKLAIGSGILLLSCGAYSQSISEKTNSDKKGAAEFSPLSVSVGKTTSEQEALEKTGATSSRTTDKNLQSLDATMRSMPGTYTQIDPGQGAISVNIRGMSGFGRVNTMVDGITQSFYGTSTSGTTAHGSTNNMAGVLIDPNLLVAVDVTRGDSSGSEGINALAGSANMRTIGVDDVIFNGNTYGLRSRFSVGSNGLGRSGMIALGGKSDAFTDTGSIGVMAAVSGSSVYSNFSNGSGINSKEFGYDKYMKQNPKSQLYKMDIRPDEFNSFELSARTYENKFTRRDITSDDYYIKYHYTPFSELIDFNVTASTSRGNQKYRDGSLYTFYKTSAQNRSDALDINNTSRFTVADNELEFMLGSKLMRTRYDRTIHSAAGDPKANQESIENNPFAPSGQQDISALYTGLKVTRGIWEADFNLNYTRNRITGYKPACDSRVICVPQGSYDIDDKEGGFNPSVQLSAQVTPWLQPFIGYSKSMRAPNIQEMFFSNSGGASMNPFLKPERAETWQAGFNIDTRDLLVEQDALRFKALAYRSRIQNYIYSESYLVCSGGRKCSMAEVIGNDWEGISDEYSDNMYIYVNSASDVIAKGFELEMDYDAGFAFGRLSFSQQQTDQPTSIASTYFGAGDMTELPRKYMTLDTGVRFFDNALTLGTIIKYTGKARRLSPDFEQDEHTGAIIKQDLPQIPTIIDLYGTYEYNRNLTLKLSVQNLMNRDYSEALNKLNMMPGLGDETHPANSARGRTWIFGGDIRF

SEQ ID NO: 5771 - protein, 565 aa, Escherichia coli; identical to SEQ ID NO: 2669

SEQ ID NO: 5772 - protein, 207 aa, Escherichia coli; identical to SEQ ID NO: 2211

SEQ ID NO: 5773 - protein, 161 aa, Escherichia coli; identical to SEQ ID NO: 2582

SEQ ID NO: 5774 - protein, 266 aa, Escherichia coli
MAKSLFRALVALSFFAPLWLNAAPHVITLSPANTELAFAAGITPVGVSSYSDYPPQAQKIEQVSTWQGMNLERIVALKPDLVIAWRGGNAERQVDQLASLGIKVMWVDATSIEQIANALRQLAPWSPQPDKAEQAAQSLLDQYAQLKAQYADKPKKRVFLQFGINPPFTSGKESIQNQVLEVCGGENIFKDSRVPWPQVSREQVLARSPQAIVITGGPDQIPKIKQYWGEQLKIPVIPLTSDWFERASPRIILAAQQLCNALSQVD

SEQ ID NO: 5775 - protein, 213 aa, Escherichia coli; identical to SEQ ID NO: 2232

SEQ ID NO: 5776 - protein, 224 aa, Escherichia coli; identical to SEQ ID NO: 4515

SEQ ID NO: 5777 - protein, 121 aa, Escherichia coli
MNAILSVQGASAPVKKKSFFSKFTRLNMLRLVRAVIPVAVLMMLFPELAMASAGKGTDLMAKGQETVKATFGKDSSIVTWVILAEVLVGAVMYMMTKNVKFLAGFAILSVFIAVGMAVVGL

SEQ ID NO: 5778 - protein, 673 aa, Escherichia coli; identical to SEQ ID NO: 2919

SEQ ID NO: 5779 - protein, 678 aa, Escherichia coli; identical to SEQ ID NO: 2231

SEQ ID NO: 5780 - protein, 231 aa, Escherichia coli
MSKRTFAVILTLLCSFCIGQALAGGIVLQRTRVIYDASRKEAALPVANKGAETPYLLQSWVDNIDGKSRAPFIITPPLFRLEAGDDSSLRIIKTADNLPENKESLFYINVRAIPAKKKSDDVNANELTLVFKTRIKMFYRPAHLKGRVNDAWKSLEFKRSDHSLNIYNPTEYYVVFAGLAVDKIDLTSKIEYIAPGEHKQLPLPASGGKNVKWAAINDYGGSSGTETRPLQ

SEQ ID NO: 5781 - protein, 746 aa, Escherichia coli
MNKKIHSLALLVNLGIYGGAQAQEPTDTPVSHDDTIVVTAAEQNLQAPGVSTITADEIRKNPVARDVSEIIRTMPGVNLTGNSTSGQRGNNRQIDIRGMGPENTLILIDGKPVSSRNSVRQGWRGERDTRGDTSWVPPEMIERIEVLRGPAAARYGNGAAGGVVNIITKKGSGEWHGSWDAYFNAPEHKEEGATKRTNFSLTGPLGDEFSFRLYGNLDKTQADAWDINQGHQSARAGTYATTLPAGREGVINKDINGVVRWDFAPLQSLELEAGYSRQGNLYAGDTQNTNSDAYTRSKYGDETNRLYRQNYSLTWNGGWDNGVTTSNWVQYEHTRNSRIPEGLAGGTEGKFNEKATQDFVDIDLDDVMLHSEVNLPIDFLVNQTLTLGTEWNQQRMKDLSSNTQALTGTNTGGAIDGVSATDRSPYSKAEIFSLFAENNMELTDSTIVTPGLRFDHHSIVGNNWSPALNISQGLGDDFTLKMGIARAYKAPSLYQTNPNYILYSKGQGCYASAGGCYLQGNDDLKAETSINKEIGLEFKRDGWLAGVTWFRNDYRNKIEAGYVAVGQNAVGTDLYQWDNVPKAVVEGLEGSLNVPVSETVMWTNNITYMLKSENKTTGDRLSIIPEYTLNSTLSWQAREDLSMQTTFTWYGKQQPKKYNYKGQPAVGPETKEISPYSIVGLSATWDVTKNVSLTGGVDNLFDKRLWRAGNAQTTGDLAGANYIAGAGAYTYNEPGRTWYMSVNTHF

SEQ ID NO: 5782 - protein, 331 aa, Escherichia coli; identical to SEQ ID NO: 2705

SEQ ID NO: 5783 - protein, 237 aa, Escherichia coli
MRKITQAISAVCLLFALNSSAVALASSPSPLNPGTNVARLAEQAPIHWVSVAQIENSLAGRPPMAVGFDIDDTVLFSSPGFWRGKKTFSPESEDYLKNPVFWEKMNNGWDEFSIPKEVARQLIDMHVRRGDAIFFVTGRSPTKTETVSKTLADNFHIPATSMNPVIFAGDKPGQNTKSQWLQDKNIRIFYGDSDNDITAARDVGARGIRILRASNSTYKPLPQAGAFGEEVIVNSEY

SEQ ID NO: 5784 - protein, 897 aa, Escherichia coli
MKLNIFTKSMIGMGLVCSALPAFAIEAWNNQQGGNKYQVIFDGKIYENAWWVSSTNCPGKAKANDATNPWRLKRTATAAEISQFGNTLSCEKSGSSSSSNSNTPASNTPANSGSATPAQGTVPSNSSVVAWNKQQGGQTWYVVFNGAVYKNAWWVASSNCPGDAKGNDASNPWRYVRAATATEISETSNPQSCTSAPQPAPDVKPAPDVKPAPDVQPAPADKSNDNYAVVAWKGQEGSSTWYVIYNGGIYKNAWWVGAANCPGDAKENDARNPWRYVRAATATEISQYGNPGSCSVKPDNNGGAVTPVDPTPETPVTPTPDNSEPSTPADSVNDYSLQAWSGQEGSEIYHVIFNGNVYKNAWWVGSKDCPRGTSAENSNNPWRLERTATAAELSQYGNPTTCEIDNGGVIVADGFQASKAYSADSIVDYNDAHYKTSVDQDAWGFVPGGDNPWKKYEPAKAWSASTVYVKGDRVVVDGQAYEALFWTQSDNPALVANQNATGSNSRPWKPLGKAQSYSNEELNNAPQFNPETLYASDTLIRFNGVNYISQSKVQKVSPSDSNPWRVFVDWTGTKERVGTPKKAWPKHVYAPYVDFTLNTIPDLAALAKNHNVNHFTLAFVVSKDANTCLPTWGTAYGMQNYAQYSKIKALREAGGDVMLSIGGANNAPLAASCKNVDDLMQHYYDIVDNLNLKVLDFDIEGTWVADQASIERRNLAVKKVQDKWKSEGKDIAIWYTLPILPTGLTPEGMNVLSDAKAKGVELAGVNVMTMDYGNAICQSANTEGQNIHGKCATSAIASLHAQLKGLYGNKSDAEIDAMMGTTPMVGVNDVQGEVFYLSDARLVMQDAQKRNLGMVGIWSIARDLPGGTNLSPEFHGLTKEQAPKYAFSEIFAPFTKQ

SEQ ID NO: 5785 - protein, 806 aa, Escherichia coli
MVAELVSSLFSRRAALAVSAAFASTTGVAGEKLDMSFIRGGAGVNPEVWAALNGSYAPGRYLVDLSLNGKEAGKQILDVTPQDSDELCLTEAWLAKAGIYVSADYFREGYDATRQCYVLTKAPSVKVDFDVSTQSLALSIPQKGLVKMPENVDWDYGTGAFRVNYNANANIGRNNTSTFGSADLKANIGHWVVSSSASASGGDSGDNSATINAFTATRAIRALSADLTVGKTSTGSSLLGSTGTYGVSLSRNNSMKPGNLGYTPVFSGIANGASRVTLTQNGRLLHSEMVPAGPFSITDVPLYTSGDVTMKITGEDGREQTQLFPLSVMAGQLNPGQHEFSVAVGLSDDDSDLKGGVFAASYGYGLDGLTLRTGGVFNRDWQGISAGAVLGLSYLGAVSADGAYAMAEYRDGSRSGNKVQLSWSKQLEMTNTGLRVSWSRQSEEYEDMSSFDPTELWSQSNHGRQPKDEWNAGISQSVGGLFSLSVSGWQRSYYPAQMTGRYRYSDDNGLDTGITGTLSTQIKGVSLNLGWSGSRNSQGENNRSASASISVPFTLFERRYSSSTSVSTSKGGGTGFSTGVSGSLNDRFSYGLGGGRDSGGGVSSYLNASYSGDRAYLNGALNHSQSGGTSGSVSVSGSVLVVPMAKDIMFSRTTGDTVAVVNVKDTPGVKVTFGDGQTDSDGNLVVPLNSYDWNTVTIDAGTLPLSTELTNTSQKVVPTDKAVVWMPFDALKVKRYLLQVKQRDGEFVPGGTWARDSKNTPLGFVANNGVLMINTVDAPGDITLGQCRIPAARLQDTEKLQEITCE

SEQ ID NO: 5786 - protein, 120 aa, Escherichia coli; identical to SEQ ID NO: 2525

SEQ ID NO: 5787 - protein, 236 aa, Escherichia coli
MLSVYNRTQKFKEEARKKIAKYHELRKQRGMSLLEVIIVLGIIGTIAAGVVILAQRAFDSRAVTDLVTNTNTVRVAMKDAYQRDGKYPDFVDPLSLTANTIKTDTNGIPAAQLVQLGKITPDEVRNNISGDFIAIGGALTSNGAQVKKGFAIELNGLSQEQCRSILGQVGNNWEYVAIGTSASGSYAMTATGVDMSVAASTTVLRSLGNNGQTTLTADKILSTCTAQVNSITLGSR

SEQ ID NO: 5788 - protein, 221 aa, Escherichia coli; identical to SEQ ID NO: 5595

SEQ ID NO: 5789 - protein, 121 aa, Escherichia coli
MNAILSVQGASAPVKKKSFFSKFTRLNMLRLVRAVIPVAVLMMLFPELAMASAGKGTDLMAKGQETVKATFGKDSSIVTWVILAEVLVGAVMYMMTKNVKFLAGFAILSVFIAVGMSVAGF

SEQ ID NO: 5790 - protein, 191 aa, Escherichia coli; identical to SEQ ID NO: 2727

SEQ ID NO: 5791 - protein, 511 aa, Escherichia coli; identical to SEQ ID NO: 2457

SEQ ID NO: 5792 - protein, 170 aa, Escherichia coli
MVRLNPNEQIQIRMITQEKIAQLPKDRETLFYFNVREIPPKTDKKNVMQVTMQHALKLFWRPKAIELEDDGVMTYEKVEIIRRNDGSIRFNNKMPYHVTLGYIGTNGVTMLPQTQSLMVLPFSHADTQFKNVPSNFQVGYINDFGGLSFYEINCPTVNNSCNVSVAKRDK

SEQ ID NO: 5793 - protein, 243 aa, Escherichia coli
MTFMKGLPLLLLVASLCSHAALQPDRTRIVFNANDKATSLRVDNRSDKLPYLAYSWLENEKGEKSDDLLVALPPIQRLEPKATTQVRIVKQASTTKLPGDRETLFFYNMREIPPAPEKNSDHAVLQVAIQSRIKVFWRPAALRKKAGEKVELQLQVSQQGNQLTLKNPTAYYLTIAYLGRNEKGVLPGFKTVMVAPFSTVNTNTGSYSGSQFYLGYMDDYGALRMTMLNCSGQCHLQAVEAKK

SEQ ID NO: 5794 - protein, 412 aa, Escherichia coli
MKQWIAALLLMLIPGVQAAKPQKVTLMVDDVPVAQVLQALAEQEKLNLVVSPDVSGTVSLHLTDVPWKQALQTVVKSAGLITRQEGNILSVHSIAWQNNNIARQEAEQARAQANLPQENRSITLQYADAGELAKAGEKLLSAKGSMTVDKRTNRLLLRDNKTALSALEQWVAQMDLPVGQVELSAHIVTINEKSLRELGVKWTLADAQHAGGVGQVTTLGSDLSVATATTHVGFNIGRINGRLLDLELSALEQKQQLDIIASPRLLASHLQPASIKQGSEIPYQVSSGESGATSVEFKEAVLGMEVTPTVLQKGRIRLKLHISQNVPGQVLQQADGEVLAIDKQEIETQVEVKSGETLALGGIFTRKNKSGQDSVPLLGDIPWFGQLFRHDGKEDERRELVVFITPRLVSSE

SEQ ID NO: 5795 - protein, 359 aa, Escherichia coli; identical to SEQ ID NO: 2328

SEQ ID NO: 5796 - protein, 203 aa, Escherichia coli; identical to SEQ ID NO: 2201

SEQ ID NO: 5797 - protein, 368 aa, Escherichia coli
MKVKVLSLLVPALLVAGAANAAEVYNKDGNKLDLYGKVDGLHYFSDNKSEDGDQTYVRLGFKGETQVTDQLTGYGQWEYQIQGNTSEDNKENSWTRVAFAGLKFQDVGSFDYGRNYGVVYDVTSWTDVLPEFGGDTYGSDNFMQQRGNGFATYRNTDFFGLVDGLNFAVQYQGKNGSVSGEGMTNNGRGALRQNGDGVGGSITYDYEGFGIGAAVSSSKRTDAQNTAAYIGNGDRAETYTGGLKYDANNIYLAAQYTQTYNATRVGSLGWANKAQNFEAVAQYQFDFGLRPSVAYLQSKGKNLGVVAGRNYDDEDILKYVDVGATYYFNKNMSTYVDYKINLLDDNQFTRDAGINTDNIVALGLVYQF

SEQ ID NO: 5798 - protein, 246 aa, Escherichia coli
MFFNTKHTTALCFVTCMAFSSSSIADIVISGTRVIYKSDQKSVNVRLENKGNNPLLVQSWLDTGDDNAEPGSITVPFTATPPVSRIDAKRGQTIKLMYTASTSLPKDRESVFWFNVLEVPPKPDAEKVANQSLLQLAFRTRIKLFYRPDGLKGNPSEAPLALKWSWSGSEGKASLRVANPTPYYVSFSSGDLEASGKRYPIDVKMIAPFSDEVMKVTGLNGKANSAKVHFYAINDFGGAIEGNARL

SEQ ID NO: 5799 - protein, 729 aa, Escherichia coli; identical to SEQ ID NO: 3979

SEQ ID NO: 5800 - protein, 200 aa, Escherichia coli; identical to SEQ ID NO: 1793

SEQ ID NO: 5801 - protein, 660 aa, Escherichia coli
MGAFFAGENGNSTTGDAIYMRGADTSNSIYIDGIRDIGSVSRDTFNTEQVEVIKGPSGTDYGRSAPTGSINMISKQPRNDSGIDASASIGSAWFRRGTLDVNQVIGDTTAVRLNVMGEKTHDAGRDKVKNERYGVAPSVAFGLGTANRLYLNYLHVTQHNTPDGGIPTIGLPGYSAPSAGTAALNHSGKVDTHNFYGTDSDYDDSTTDTATMRFEHDINDNTTIRNTTRWSRVKQDYLMTAIMGGASNITQPTSDVNSWTWSRTANTKDVSNKILTNQTNLTSTFYTGSIGHDVSTGVEFTRETQTNYGVNPVTLPAVNIYHPDSSIHPGGLTRNGANANGQTDTFAIYAFDTLQITRDFELNGGIRLDNYHTEYDSATACGGSGRGAITCPTGVAKGSPVTTVDTAKSGNLMNWKAGALYHLTENGNVYINYAVSQQPPGGNNFALAQSGSGNSANRTDFKPQKANTSEIGTKWQVLDKRLLLTAALFRTDIENEVEQNDDGTYSQYGKKRVEGYEISVAGNITPAWQVIGGYTQQKATIKNGKDVAQDGSSSLPYTPEHAFTLWSQYQATDDISVGAGARYIGSMHKGSDGAVGTPAFTEGYWVADAKLGYRVNRNLDFQLNVYNLFDTDYVASINKSGYRYHPGEPRTFLLTANMHF

SEQ ID NO: 5802 - protein, 351 aa, Escherichia coli; identical to SEQ ID NO: 2872

SEQ ID NO: 5803 - protein, 124 aa, Escherichia coli
MNKVKYYVLFTALLSSLCAHGAPQSITELCSEYRNTQIYTINDKILSYTESMAGKREMVIITFKSGATFQVEVPGSQHIDSQKKAIERMKDTLRITYLTETKIDKLCVWNNKTPNSIAAISMEN

SEQ ID NO: 5804 - protein, 72 aa, Escherichia coli; identical to SEQ ID NO: 2164

SEQ ID NO: 5805 - protein, 700 aa, Escherichia coli
MKIFSVRQTVLPALLALSPVVFAADEQTMIVSAAPQVVSELDTPAAVSVVDGEEMRLATPRINLSESLTSVPGLQVQNRQNYAQDLQLSIRGFGSRSTYGIRGIRLYVDGIPATMPDGQGQTSNIDLSSVQNVEVLRGPFSALYGNASGGVMNVTTQTGQQPPTIEASSYYGSFGSWRYGLKATGATGDGTQPGDVDYTVSTTRFTTHGYRDHSGAQKNLANAKLGVRIDDASKLSLIFNSVDIKADDPGGLTKAEWKANPQQAPRAEQYDTRKTIKQTQAGLRYERSLSSRDDMSVMMYAGERETTQYQSIPMAPQLNPSHAGGVITLQRHYQGIDSRWTHRGELGVPVTFTTGLNYENMSENRKGYNNFRLNSGMPEYGQKGELRRDERNLMWNIDPYLQTQWQLSEKLSLDAGVRYSSVWFDSNDHYITPSNGDDSGDASYHKWLPAGSLKYAMTDAWNIYLAAGRGFETPTINELSYRADGQSGMNFGLKPSTNDTIEIGSKTRIGDGLLSLALFQTDTDDEIVVDSSSGGRTTYKNAGKTRRQGAELAWDQRFAGDFRVNASWTWLDATYRSNVCNEQDCNGNRMPGIARNMGFASIGYVPEDGWYAGTEARYMGDIMADDENTAKAPSYTLIGLFTGYKYNYHNLTVDLFGRVDNLFDKEYVGSVIVNESNGRYYEPAPGRNYGVGVNIAWRFE

SEQ ID NO: 5806 - protein, 432 aa, Escherichia coli; identical to SEQ ID NO: 2026

SEQ ID NO: 5807 - protein, 241 aa, Escherichia coli
MTPIKLIFAALSLFPCSNIYANNITTQKFEAILGATRVIYHLDGNGESLRVKNPQDYPILIQSKVMDEGSKDNADFIVTPPLFRLDAKRETDIRIVMVNGLYPKDRESLKTLCVRGIPPKQGDLWANNEKEFVGMKLNVSINTCIKLILRPHNLPKLDINSEGQIEWGIRDGNLVAKNKTPYYFTIVNASFNGKALKTPGTLGPYEQKLYTLPSKISVSGLVKWEIIGDLGESSETKKFNI

SEQ ID NO: 5808 - protein, 230 aa, Escherichia coli
MMTKIKLLMLIIFYLIISASAHAAGGIALGATRIIYPADAKQTAVWIRNSHTNERFLVNSWIENSSGVKEKSFIITPPLFVSEPKSENTLRIIYTGPPLAADRESLFWMNVKTIPSVDKNALNGRNVLQLAILSRMKLFLRLIQLQELPAEAPDTLKFSRSGNYINVHNPSPFYVTLVNLQVGNQKLGNAMAAPRVNSQIPLPSGVQGKLKFQTVNDYGSVTPVREVNLN

SEQ ID NO: 5809 - protein, 111 aa, Escherichia coli; identical to SEQ ID NO: 3153

SEQ ID NO: 5810 - protein, 232 aa, Escherichia coli; identical to SEQ ID NO: 2087

SEQ ID NO: 5811 - protein, 784 aa, Escherichia coli; identical to SEQ ID NO: 2244

SEQ ID NO: 5812 - protein, 362 aa, Escherichia coli
MMKRNILAVIVPALLVAGTANAAEIYNKDGNKVDLYGKAVGLHYFSKDNGVNSYGGNGDKTYARLGFKGETQINSDLTGYGQWEYNFQGNNSEGADAQTGNKTRLAFAGLKYADIGSFDYGRNYGVVYDALGYTDMLPEFGGDTAYSDDFFVGRVGGVATYRNSNFFGLVDGLNFAVQYLGKNERDTARRSNGDGVGGSISYEYEGFGIVGAYGAADRTNLQEAQPLGNGKKAEQWATGLKYDANNIYLAANYGETRNATPITNKFTNTSGFANKTQDVLLVAQYQFDFGLRPSIAYTKSKAKDVEGIGDVDLVNYFEVGATYYFNKNMSTYVDYIINQIDSDNKLGVGSDDTVAVGIVYQF

SEQ ID NO: 5813 - protein, 828 aa, Escherichia coli; identical to SEQ ID NO: 2388

SEQ ID NO: 5814 - protein, 260 aa, Escherichia coli
MSKRNAVTTFFTNQVTKALGMTLALMMSCQSAVASLAADQTRYIFRGDKDALTITVTNNDKERTFGGQAWVDNIVEKDTRPTFVVTPSFFKVKPNGQQTLRIIMASDHLPKDKESVYWLNLQDIPPALEGSGIAVALRTKLKLFYRPKALLEGRKGAEEGISLQSRPDGRTMLVNTTPYIFAIGSLLDGNGKKIAADNETAQKLLMFMPGDEVQVKGNVVKVDSLNDYGELQTWTINQKKSAISSAQKSSDTEGNSSDKK

SEQ ID NO: 5815 - protein, 446 aa, Escherichia coli
MMITLRKLPLAVAVAAGVMSAQAMAVDFHGYARSGIGWTGSGGEQQCFQTTGAQSKYRLGNECETYAELKLGQEVWKEGDKSFYFDTNVAYSVAQQNDWEATDPAFREANVQGKNLIEWLPGSTIWAGKRFYQRHDVHMIDFYYWDISGPGAGLENIDVGFGKLSLAATRSSEAGGSSSFASNNIYDYTNETANDVFDVRLAQMEINPGGTLELGVDYGRANLRDNYRLVDGASKDGWLFTAEHTQSVLKGFNKFVVQYATDSMTSQGKGLSQGSGVAFDNKKFAYNINNNGHMLRILDHGAISMGDNWDMMYVGMYQDINWDNDNGTKWWTVGIRPMYKWTPIMSTVMEIGYDNVESQRTGDKNNQYKITLAQQWQAGDSIWSRPAIRVFATYAKWDEKWGYDYNGDSKVNPNYGKAVPADFNGGSFGRGDSDEWTFGAQMEIWW

SEQ ID NO: 5816 - protein, 614 aa, Escherichia coli
MIKKASLLTACSVTAFSAWAQDTSPDTLVVTANRFEQPRSTVLAPTTVVTRQDIDRWQSTSVNDVLRRLPGVDITQNGGSGQLSSIFIRGTNASHVLVLIDGVRLNLAGVSGSADLSQFPIALVQRVEYIRGPRSAVYGSDAIGGVVNIITTRDEPGTEISAGWGSNSYQNYDVSTQQQLGDKTRVTLLGDYAYTHGYDVVAYGNTGTQAQPDKDGFLSKTLYGALEHNFTDAWSGFVRGYGYDNRTNYDAYYSPGSPLLDTRKLYSQSWDAGLRYNGELIKSQLITSYSHSKDYNYDPHYGRYDSSATLDEMKQYTVQWANNVIVGHGSIGAGVDWQKQTTTPGTGYVENGYDQRNTGIYLTGLQQVGDFTFEGAARSDDNSQFGRHGTWQTSAGWEFIEGYRFIASYGTSYKAPNLGQLYGFYGNPNLDPEKSKQWEGAFEGLTAGVNWRISGYRNDVSDLIDYDDHTLKYYNEGKARIKGVEATANFDTGPLTHTVSYDYVDARNAITDTPLLRRAKQQVKYQLDWQLYDFDWGITYQYLGTRYDKDYSSYPYQTVKMGGVSLWDLAVAYPVTSHLTVRGKIANLFDKDYETVYGYQTAGREYTLSGSYTF

SEQ ID NO: 5817 - protein, 250 aa, Escherichia coli
MFNLTNTAKIVVPALALLATAVSFSSHASVTPDRTRLVFNESDKSISVTLRNNDPKLPYLAQSWIEDAKGNKISSPLAVLPPVQRIDAMMNGQVKVQGLPDINKLPADRESVFYFNVREIPPKSNKPNTLQIALQTRIKLFWRPKALENTSMKSPWQHKVTLIRNGQDFTVNNPTPYYVIISNASAKKGGNPPAGFTPLMMEPKTSAPLNAKMDSVPVLTYINDYGARMPLYFKCTGNNCQVDEEQSRKG

SEQ ID NO: 5818 - protein, 274 aa, Escherichia coli; identical to SEQ ID NO: 2300

SEQ ID NO: 5819 - protein, 233 aa, Escherichia coli; identical to SEQ ID NO: 2006

SEQ ID NO: 5820 - protein, 245 aa, Escherichia coli
MPARHLYFIMTNTWNRLALLIFAVLSLLVAGELQAGVVVGGTRFIFPADRESISILLTNTSQESWLINSKINRPTRWAGGEASTVPAPLLAAPPLILLKPGTTGTLRLLRTESDILPVDRETLFELSIASVPSGKVENQSVKVAMRSVFKLFWRPEGLPGDPLEAYQQLRWTRNSQGVQLTNPTPYYINLIQVSVNGKALSNVGVVPPKSQRQTSWCQAIAPCHVAWRAINDYGGLSAKKEQNLP

SEQ ID NO: 5821 - protein, 478 aa, Escherichia coli; identical to SEQ ID NO: 2404

SEQ ID NO: 5822 - protein, 663 aa, Escherichia coli
MFRLNPFVRVGLCLSAISCAWPVLAVDDDGETMVVTASSVEQNLKDAPASISVITQEDLQRKPVQNLKDVLKEVPGVQLTNEGDNRKGVSIRGLDSSYTLILVDGKRVNSRNAVFRHNDFDLNWIPVDSIERIEVVRGPMSSLYGSDALGGVVNIITKKIGQKWSGTVTVDTTIQEHRDRGDTYNGQFFTSGPLIDGVLGMKAYGSLAKREKDDPQNSTTTDTGETPRIEGFSSRDGNVEFAWTPNQNHDFTAGYGFDRQDRDSDSLDKNRLERQNYSVSHNGRWDYGTSELKYYGEKVENKNPGNSSPITSESNTVDGKYTLPLTAINQFLTVGGEWRHDKLSDAVNLTGGTSSKTSASQYALFVEDEWRIFEPLALTTGVRMDDHETYGEHWSPRAYLVYNATDTVTVKGGWATAFKAPSLLQLSPDWTSNSCRGACKIVGSPDLKPETSESWELGLYYMGEEGWLEGVESSVTVFRNDVKDRISISRTSDVNAAPGYQNFVGFETGANGRRIPVFSYYNVNKARIQGVETELKIPFNDEWKLSLNYTYNDGRDVSNGENKPLSDLPFHTANGTLDWKPLALEDWSFYVSGHYTGQKRADSATAKTPGGYTIWNTGAAWQVTKDVKLRAGVLNLGDKDLSRDDYSYNEDGRRYFMAVDYRF

SEQ ID NO: 5823 - protein, 654 aa, Escherichia coli
MDCVMKGLNKITCCLLAALLMPCAGHAENEQYGANFNNADIRQFVEIVGQHLGKTILIDPSVQGTISVRSNDTFSQQEYYQFFLSILDLYGYSVITLDNGFLRVVRSANVKTSPGMIADSSRPGVGDELVTRIVPLENVPARDLAPLLRQMMDAGSVGNVVHYEPSNVLILTGRASTINKLIEVIKRVDVIGTEKQQIIHLEYASAEDLAEILNQLISESHGKSQMPALLSAKIVADKRTNSLIISGPEKARQRITSLLKSLDVEESEEGNTRVYYLKYAKATNLVEVLTGVSEKLKDEKGNARKPSSSGAMDNVAITADEQTNSLVITADQSVQEKLATVIARLDIRRAQVLVEAIIVEVQDGNGLNLGVQWANKNVGAQQFTNTGLPIFNAAQGVADYKKNGGITSANPAWDMFSAYNGMAAGFFNGDWGVLLTALASNNKNDILATPSIVTLDNKLASFNVGQDVPVLSGSQTTSGDNVFNTVERKTVGTKLKVTPQVNEGDAVLLEIEQEVSSVDSSSNSTLGPTFNTRTIQNAVLVKTGETVVLGGLLDDFSKEQVSKVPLLGDIPLVGQLFRYTSTERAKRNLMVFIRPTIIRDDDVYRSLSKEKYTRYRQEQQQRIDGKSKALVGSEDLPVLDENTFNSHAPAPSSR

SEQ ID NO: 5824 - protein, 162 aa, Escherichia coli; identical to SEQ ID NO: 1973

SEQ ID NO: 5825 - protein, 258 aa, Escherichia coli
MKNITFIFFILLASPLYANGDKLYRADSRPPDEIKRSGGLMPRGHNEYFDRGTQMNINLYDHARGTQTGFVRYDDGYVSTSLSLRSAHLAGQSILSGYSTYYIYVIATAPNMFNVNDVLGVYSPHPYEQEVSALGGIPYSQIYGWYRVNFGVIDERLHRNREYRDRYYRNLNIAPAEDGYRLAGFPPDHQAWREEPWIHHAPQGCGNSSRTITGDTCNEETQNLSTIYLRKYQSKVKRQIFSDYQSEVDIYNRIRDEL

SEQ ID NO: 5826 - protein, 518 aa, Escherichia coli; identical to SEQ ID NO: 2349

SEQ ID NO: 5827 - protein, 430 aa, Escherichia coli; identical to SEQ ID NO: 2617

SEQ ID NO: 5828 - protein, 193 aa, Escherichia coli; identical to SEQ ID NO: 2252

SEQ ID NO: 5829 - protein, 747 aa, Escherichia coli; identical to SEQ ID NO: 4126

SEQ ID NO: 5830 - protein, 551 aa, Escherichia coli; identical to SEQ ID NO: 2446

SEQ ID NO: 5831 - protein, 686 aa, Escherichia coli; identical to SEQ ID NO: 3129

SEQ ID NO: 5832 - protein, 208 aa, Escherichia coli; identical to SEQ ID NO: 1949

SEQ ID NO: 5833 - protein, 883 aa, Escherichia coli
MTAIRAAFKAYRMHQVLIMPRFARLTIALGLATAVFPVDAEYYFNPRFLSNDLAESVDLSAFTKGREAPPGTYRVDIYLNDEFMTSRDITFIADDNNAELIPCLSTDLLVSLGIKKSALLDNKEHSAEKHVPDNSACTPLQDRLADASTEFDVGQQHLSLSVPQIYVGRMARGYVSPDLWEEGINAGLLNYSFNGNSINNRSNHNAGKSNYAYLNLQSGINIGSWRLRDNSTWSYYSGSSNSSDSNKWQHINTSAERDIIPLRSRLTVGDSYTDGDIFDSVNFRGLKINSTEAMLPDSQHGFAPVIHGIARGTAQVSVKQNGYDVYQTTVPPGPFTIDDINSAANGGDLQVTIKEADGSIQTLYVPYSSVPVLQRAGYTRYALAMGEYRSGNNLQSSPKFIQGSLMHGLEGNWTPYGGMQIAEDYQAFNLGIGKDLGLFGAFSFDITQANTTLADGTRHSGQSVKSVYSKSFYQTGTNIQVAGYRYSTQGFYNLSDSAYSRMSGYTVKPPTGDTNEQTQFIDYFNLFYSKRGQEQISISQQLGNYGTTFFSASRQSYWNTSRSDQQISFGLNVPFGDITTSLNYSYSNNIWQNDRDHLLAFTLNVPFSHWMRTDSQSAFRNSNASYSMSNDLKGGMTNLSGVYGTLLPDNNLNYSVQVGNTHGGNTSSGTSGYSSLNYRGAYGNTNVGYSRNGDSSQIYYGMSGGIIAHADGITFGQPLGDTMVLVKAPGADNVKIENQTGIHTDWRGYAILPFATEYRENRVALSANSLADNVELDETVVTVIPTHGAIARATFNAQIGGKVLMTLKYGNKSVPFGAIVTHGENKNGSIVAENGQVYLTGLPQSGKLQVSWGNDKNSNCIVDYKLPEVSPGTLLNQQTAICR

SEQ ID NO: 5834 - protein, 368 aa, Escherichia coli; identical to SEQ ID NO: 3872

SEQ ID NO: 5835 - protein, 838 aa, Escherichia coli; identical to SEQ ID NO: 3764

SEQ ID NO: 5836 - protein, 863 aa, Escherichia coli
MHIRKHRLAGFFVRLVVACAFAAQAPLSSAELYFNPRFLADDPQAVADLSRFENGQELPPGTYRVDIYLNNGYMATRDVTFNTGDSEQGIVPCLTRAQLASMGLNTASVSGMNLLADDACVPLTSMIHDATAHLDVGQQRLNLTIPQAFMSNRARGYIPPELWDPGINAGLLNYNFSGNSVQNRIGGNSHYAYLNLQSGLNIGAWRLRDNTTWSYNSSDSSSGSKNKWQHINTWLERDIIPLRSRLTLGDGYTQGDIFDGINFRGAQLASDDNMLPDSQRGFAPVIHGIARGTAQVTIKQNGYDIYNSTVPPGPFTINDIYAAGNSGDLQVTIKEADGSTQIFTVPYSSVPLLQREGHTRYSITAGEYRSGNAQQEKPRFFQSTLLHGLPAGWTIYGGTQLADRYRAFNFGIGKNMGALGALSVDMTQANSTLPDDSQHDGQSVRFLYNKSLNESGTNIQLVGYRYSTSGYFNFADTTYSRMNGYNIETQDGVIQVKPKFTDYYNLAYNKRGKLQLTVTQQLGRTSTLYLSGSHQTYWGTSNVDEQFQAGLNTAFEDINWTLSYSLTKNAWQKGRDQMLALNVNIPFSHWLRSDSKSQWRHASASYSMSHDLNGRMTNLAGVYGTLLEDNNLSYSVQTGYAGGGDGNNGSTGYATLNYRGGYGNANIGYSHSDDIKQLYYGVSGGVLAHANGVTLGQPLNETVVLVKAPGAKDAKVENQTGVRTDWRGYAVLPYATEYRENRVALDTNTLADNVDLDNAVANVVPTRGAIVRAEFKARVGIKLLMTLTHNNKPLPFGAMVTSESSQSSGIVADNGQVYLSGMPLAGKVQVKWGEEENAHCVANYQLPPESQQQLLTQLSAECR

SEQ ID NO: 5837 - protein, 881 aa, Escherichia coli
MPDHSLFRLRILPWCIALAMSGSYSSVWAEDDIQFDSRFLELKGDTKIDLKRFSSQGYVEPGKYNLQVQLNKQPLAEEYDIYWYAGEDDASKSYACLTPELVAQFGLKEDVANNLQWSHDAKCLKSGQLEGMEIKADLSQSALVISLPQAYLEYTYPDWDPPSRWDDGISGIVADYSINAQTRHEENGGDDSNEISGNGTVGVNLGPWRMRADWQTNYQHTRSNDDDDEFSGDETQKKWEWSRYYAWRALPSLKAKLALGEDYLRSDIFDGFNYVGGSVSTDDQMLPPNLRGYAPDISGVAHTTAKVTVSQMGRVIYETQVPAGPFRIQDLGDSVSGTLHIRIEEQNGQVQEYDISTASMPYLTRPGQVRYKIMMGRPQEWGHHVEGEFFSGAEASWGIANGWSLYGGALGDENYQSAALGVGRDLSTFGAVAFDVTHSHTKLDKDTAYGKGSLDGNSFRVSYSKDFDQLNSRVTFAGYRFSEENFMTMSEYLDASDSGMVRTGNDKEMYTATYNQNFRDAGVSVYLNYTRHTYWDREEQTNYNIMLSHYFNMGSIRNVSISMTGYRYEYDNQADKGMYISLSMPWGDNSTVSYNGNYGSGTDSSQVGYFSRVDDATHYQLNVGTSDKHTSVDGYYSHDGSLAQVDLSANYHEGQYTSAGLSLQGGATLTAHGGALHRTQNMGGTRLLIDADGVADVPVEGNGAAVYTNMFGKAVVSDVNNYYRNQAYIDLNKLPENAEATQSVVQATLTEGAIGYRKFAVISGQKAMAVLRLQDGSHPPFGAEVKNDNEQTVGLVDDDGNVYLAGVKPGEHMSVFWSGVAHCDINLPDPLPADLFNGLLLPCQHKGNVAPVVPDDIKPVIQEQTQQVTPTNPPVSVSANQ

SEQ ID NO: 5838 - protein, 834 aa, Escherichia coli; identical to SEQ ID NO: 3095

SEQ ID NO: 5839 - protein, 869 aa, Escherichia coli
MKIPTTTDIPQRYTWCLAGICYSSLAILPSFLSYAESYFNPAFLLENGTSVADLSRFERGNHQPARVYRVDLWRNDEFIGSQDIVFESTTENTGDKSGGLMPCFNQVLLERIGLNSSAFPELAQQQNNKCINLLKAVPDATINFDFAAMRLNITIPQIALLSSAHGYIPPEEWDEGIPALLLNYNFTGNRGNGNDSYFFSEFSGINIGPWRLRNNGSWNYFRGNGYHSEQWNNIGTWVQRAIIPLKSELVMGDGNTGSDIFDGVGFRGIRLYSSDNMYPDSQQGFAPTVRGIARTAAQLTIRQNGFIIYQSYVSPGAFEITDLHPTSSNGDLDVTIDERDGNQQNYTIPYSTVPILQREGRFKFDLTAGDFRSGNSQQSSPFFFQGTALGGLPQEFTAYGGTQLSANYTAFLLGLGRNLGNWGTVSLDVTHARSQLADDSRHEGDSIRFLYAKSMNTFGTNFQLMGYRYSTQGFYTLDDVAYRRMEGYEYDYDYDGEHRDEPIIVNYHNLRFSRKDRLQLNISQSLNDFGSLYISGTHQKYWNTSDSDTWYQVGYTSSWVGISYSLSFSWNESVGIPDNERIVGLNVSVPFNVLTKRRYTRENALDRAYASFNANRNSNGQNSWLAGVGGTLLEGHNLSYHVSQGDTSNNGYTGSATANWQATYGTLGVGYNYDRDQYDVNWQLSGGVVGHENGITLSQPLGDTNVLIKAPGAGGVRIENQTGILTDWRGYAVMPYATVYRYNRIALDTNTMGNSIDVEKNISSVVPTQGALVRANFDTRIGVRALITVTQGGKPVPFGSLVRENSTGITSMVGDDGQVYLSGAPLSGELLVQWGDGANSRCIAHYVLPKQSLQQAVTVISAVCTHPGS

SEQ ID NO: 5840 - protein, 505 aa, Escherichia coli
MPSFIGGLVVFVSAAFNAQAETWFDPAFFKDDPSMVADLSRFEKGQKITPGVYRVDIVLNQTIVDTRNVNFVEITPEKGIAACLTTESLDAMGVNTDAFPAFKQLDKQACVPLAEIIPDASVTFNVNKLRLEISVPQIAIKSNARGYVPPERWDEGINALLLGYSFSGANSIHSSADSDSGDSYFLNLNSGVNLGPWRLRNNSTWSRSSGQTAEWKNLSSYLQRAVIPLKGELTVGDDYTAGDFFDSVSFRGVQLASDDNMLPDSLKGFAPVVRGIAKSNAQITIKQNGYTIYQTYVSPGAFEISDLYSTSSSGDLLVEIKEADGSVNSYSVPFSSVPLLQRQGRIKYAVTLAKYRTNSNEQQESKFAQATLQWGGPWGTTWYGGGQYAEYYRAAMFGLGFNLGDFGAISFDVTQAKSTLADQSEHKGQSYRFLYAKTLNQLGTNFQLMGYRYSTSGFYTLSDTMYKHMDGYEFNDGDDEDTPMWSRYYNLFYTKRGKLQVNISQ

SEQ ID NO: 5841 - protein, 866 aa, Escherichia coli; identical to SEQ ID NO: 3688

SEQ ID NO: 5842 - protein, 266 aa, Escherichia coli; identical to SEQ ID NO: 1894

SEQ ID NO: 5843 - protein, 826 aa, Escherichia coli; identical to SEQ ID NO: 3772

SEQ ID NO: 5844 - protein, 161 aa, Escherichia coli; identical to SEQ ID NO: 2582

SEQ ID NO: 5845 - protein, 819 aa, Escherichia coli
MDTVNIYRLSFVSCLVVAMPCALAVEFNLNVLDKSMRDRIDISLLKEKGVIAPGEYFVSVAVNNNQISNGQKINWHKNDDKTIPCINDLLVDKFGLKPEVRQSLPLINQCVDFSSRPEMLFNFDQANQQLNITIPQAWLAWHSENWTPPSTWKEGVAGVLMDYNLFASSYRPQDGSSSTNLNAYGTAGINTGAWRLRSDYQLNQTDSDDNHEQSGEISRTYLFRPLPQLGSKLTLGETDFSSNIFDGFSYTGAALASDDRMLPWELRGYAPQISGIAQTNATVTISQSGRVIYQKKVPPGPFIIDDLNQSVQGTLDVKVTEEDGRVNNFQVSAASTPFLTRQGQVRYKLAAGQPRPSMSHQTENETFFSNEVSWGMLSNTSLYGGLLLSGDDYHSAAMGIGQNMLWLGALSFDVTWASSHFDTQQDERGLSYRFNYSKQVDATNSTISLAAYRFSDRHFHSYANYLDHKYNDSDAQDEKQTISLSVGQPITPLNLNLYANLLHQTWWNADASTTANITAGFNVDIGDWRDISISTSFNTTHYEDKDRDNQIYLSISLPFGNGGRVGYDMQNSSHSTTHRMSWNDTLDERNSWGMSAGLQSDRPDNGAQVSGNYQHLSSAGEWDISGTYAANDYSSVSSSWSGSFTATQYGAAFHRRSSTNEPRLMVSTDGVADIPVQGNLDYTNHFGIAVVPLISSYQPSTVAVNMNDLPDGVTVAENVIKETWIEGAIGYKSLASRSGKDVNVIIRNASGQFPPLGADIRQDDSGISVGMVGEEGHAWLSGVAENQKFTVVWGDSQHCSLHLPEHMEDTANRLILPCH

SEQ ID NO: 5846 - protein, 207 aa, Escherichia coli; identical to SEQ ID NO: 2211

SEQ ID NO: 5847 - protein, 203 aa, Escherichia coli; identical to SEQ ID NO: 2201

SEQ ID NO: 5848 - protein, 200 aa, Escherichia coli; identical to SEQ ID NO: 1784

SEQ ID NO: 5849 - protein, 367 aa, Escherichia coli; identical to SEQ ID NO: 3016

SEQ ID NO: 5850 - protein, 216 aa, Escherichia coli; identical to SEQ ID NO: 3112

SEQ ID NO: 5851 - protein, 351 aa, Escherichia coli; identical to SEQ ID NO: 2872

SEQ ID NO: 5852 - protein, 430 aa, Escherichia coli; identical to SEQ ID NO: 2617

SEQ ID NO: 5853 - protein, 240 aa, Escherichia coli; identical to SEQ ID NO: 3920

SEQ ID NO: 5854 - protein, 386 aa, Escherichia coli; identical to SEQ ID NO: 3072

SEQ ID NO: 5855 - protein, 170 aa, Escherichia coli [sequence omitted]

SEQ ID NO: 5856 - protein, 210 aa, Escherichia coli; identical to SEQ ID NO: 3228

SEQ ID NO: 5857 - protein, 729 aa, Escherichia coli; identical to SEQ ID NO: 3052

SEQ ID NO: 5858 - protein, 230 aa, Escherichia coli; identical to SEQ ID NO: 3019

SEQ ID NO: 5859 - protein, 518 aa, Escherichia coli
MKKLKINYLFIGILALLLAVALWPSIPWFGKADNRIAAIQARGELRVSTIHTPLTYNEINGKPFGLDYELAKQFADYLGVKLKVTVRQNISQLFDDLDNGNADLLAAGLVYNSERVKNYQPGPTYYSVSQQLVYKVGQYRPRTLGNLTAEQLTVAPGHVVVNDLQTLKETKFPELSWKVDDKKGSAELMEDVIEGKLDYTIADSVAISLFQRVHPELAVALDITDEQPVTWFSPLDGDDTLSAALLDFFNEMNEDGTLARIEEKYLGHGDDFDYVDTRTFLRAVDAVLPQLKPLFEKYAEEIDWRLLAAIAYQESHWDAQATSPTGVRGMMMLTKNTAQSLGITDRTDAEQSISGGVRYLQDMMSKVPESVPENERIWFALAAYNMGYAHMLDARALTAKTKGNPDSWADVKQRLPLLSQKPYYSKLTYGYARGHEAYAYVENIRKYQISLVGYLQEKEKQATEAAMQLAQDYPAVSPTELGKEKFPFLSFLSQSSSNYLTHSPSLLFSRKGSEEKQN

SEQ ID NO: 5860 - protein, 686 aa, Escherichia coli
MFWRDITLSVWRKKTTGLKTKKRLLPLVLAAALCSSPVQAEEATFTANFKDTDLKSFIETVGANLNKTIIMGPGVQGKVSIRTMTPLNERQYYQLFLNLLEAQGYAVVPMENDVLKVVKSSAAKVEPLPLVGEGSDNYAGDEMVTKVVPVRNVSVRELAPILRQMIDSAGSGNVVNYDPSNVIMLTGRASVVERLTEVIQRVDHAGNRTEEVIPLDNASASEIARVLESLTKNSGENQPATLKSQIVADERTNSVIVSGDPATRDKMRRLIRRLDSEMERSGNSQVFYLKYSKAEDLVDVLKQVSGTLTAAKEEAEGTVGSGREVVSIAASKHSNALIVTAPQDIMQSLQSVIEQLDIRRAQVHVEALIVEVAEGSNINFGVQWASKDAGLMQFANGTQIPIGTLGAAISQAKPQKGSTVISENGATTINPDTNGDLSTLAQLLSGFSGTAVGVVKGDWMALVQAVKNDSSSNVLSTPSITTLDNQEAFFMVGQDVPVLTGSTVGSNNSNPFNTVERKKVGIMLKVTPQINEGNAVQMVIEQEVSKVEGQTSLDVVFGERKLKTTVLANDGELIVLGGLMDDQAGESVAKVPLLGDIPLIGNLFKSTADKKEKRNLMVFIRPTILRDGMAADGVSQRKYNYMRAEQIYRDEQGLSLMPHTAQPVLPAQNQALPPEVRAFLNAGRTR

SEQ ID NO: 5861 - protein, 128 aa, Escherichia coli
MDRETLFELSIASVPSGKVENQSVKVAIRSVFKLFWRPEGLPGDPLEAYQQLRWTWNSQGVQLTNPTPYYINLIQVSVNGKALSNAGVVPPKSQRQTSWCQAIAPCHVAWRAINDYGGLSAKKEQNLP

SEQ ID NO: 5862 - protein, 231 aa, Escherichia coli; identical to SEQ ID NO: 3055

SEQ ID NO: 5863 - protein, 365 aa, Escherichia coli
MALSAVAASVLMAMSAQAAEIYNKDGNKLDLYGKVNAEHYFSSSASDDGDKTYARLGFKGETQINDQLTGFGQWEYEFKGNRTESEGSDKDKTRLAFAGLRFADYGSIDYGRNYGVAYDIGAWTDVLPEFGGDTWTQTDVFMTQRATGVATYRNNDFFGLVDGLNFALQYQGKNDSAAKVNNWKGRDVVESNGDGFGLSATYDYEGFGVGATYAKSDRTDGQVSYAKKDPLNASGKTAEVWATGLKYDANNIYLAATYSETQNMTVFGDDFIANKAKNFEAVAQYQFDFGLRPSIAYLHSRGENIGAFGSQDLVEYIDLGATYYFNKNMSAFVDYKINLIDESEFTKRSEVATDNIVAVGMTYQF

SEQ ID NO: 5864 - protein, 111 aa, Escherichia coli; identical to SEQ ID NO: 3096

SEQ ID NO: 5865 - protein, 614 aa, Escherichia coli; identical to SEQ ID NO: 1884

SEQ ID NO: 5866 - protein, 331 aa, Escherichia coli; identical to SEQ ID NO: 2700

SEQ ID NO: 5867 - protein, 224 aa, Escherichia coli; identical to SEQ ID NO: 3035

SEQ ID NO: 5868 - protein, 227 aa, Escherichia coli
MSAQASVTPDRTRLIFNESDKSISVTLRNNDPKLPYLAQSWIEDEKGNKISSPLTVLPPVQRIDSMMNGQVKVQGMPDINKLPADRESLFYFNVREIPPKSNKANTLQIALQTRIKLFWRPKALENVSMKNPWQYKVTLTRNGQEFTVNNPTPYYVIFSNASTQKNGNPAAGFSPIVMSPKTSAPLNVKMGSVPVLTYVNDYGARMPLFFTCNGNSCQVDEEQSRKG

SEQ ID NO: 5869 - protein, 446 aa, Escherichia coli; identical to SEQ ID NO: 2176

SEQ ID NO: 5870 - protein, 82 aa, Escherichia coli
MFSGIANGASRVTLTQNGRLLHSEMVPAGPFSITDVPLYTSVDVTMKITGEDGREQTQLFPLSVMAGQLNPTTRVQRGSRFV

SEQ ID NO: 5871 - protein, 747 aa, Escherichia coli; identical to SEQ ID NO: 2072

SEQ ID NO: 5872 - protein, 162 aa, Escherichia coli; identical to SEQ ID NO: 1965

SEQ ID NO: 5873 - protein, 746 aa, Escherichia coli; identical to SEQ ID NO: 4389

SEQ ID NO: 5874 - protein, 198 aa, Escherichia coli; identical to SEQ ID NO: 3645

SEQ ID NO: 5875 - protein, 565 aa, Escherichia coli
MKSPAPSRPQKMALIPACIFLCFAALSVQAEETPVTPQPPDILLGPLFNDVQNAKLFPDQKTFADAVPNSDPLMILADYRMQQNQSGFDLRHFVNVNFTLPKEGEKYVPPEGQSLREHIDGLWPVLTRSTENTEKWDSLLPLPEPYVVPGGRFREVYYWDSYFTMLGLAESGHWDKVADMVANFAHEIDTYGHIPNGNRSYYLSRSQPPFFALMVELLAQHEGDAALKQYLPQMQKEYAYWMDGVENLQAGQQEKRVVKLQDGTLLNRYWDDRDTPRPESWVEDIATAKSNPNRPATEIYRDLRSAAASGWDFSSRWMDNPQQLNTLRTTSIVPVDLNSLMFKMEKILARASKAAGDNAMANQYETLANARQKGIEKYLWNDQQGWYADYDLKSHKVRNQLTAAALFPLYVNAAAKDRANKMATATKTHLLQPGGLNTTSVKSGQQWDAPNGWAPLQWVATEGLQNYGQKEVAMDISWHFLTNVQHTYDREKKLVEKYDVSTTGTGGGGGEYPLQDGFGWTNGVTLKMLDLICPKEQPCDNVPATRPTVKSTTTQPSTKEAQPTP

SEQ ID NO: 5876 - protein, 784 aa, Escherichia coli; identical to SEQ ID NO: 2244

SEQ ID NO: 5877 - protein, 367 aa, Escherichia coli
MRGEDIVIPGVATVVERLLNNGKALSNRQAKNDPMPPFNITQKVSEDSNDFSFSSVTNSSILEDVSLIAYPETNSILVKGNDQQIQIIRDIITQLDVAKRHIELSLWIIDIDKSELNNLGVNWQGTASFGDSFGASFNMSSSASISTLDGNKFIASVMALNQKKKANVVSRPVILTQENIPAIFDNNRTFYVSLVGERNSSLEHVTYGTLINVIPRFSSRGQIEMSLTIEDGTGNSQSNYNYNNENTSVLPEVGRTKISTIARVPQGKSLLIGGYTHETNSNEIVSIPFLSSIPVIGNVFKYKTSNISNIVRVFLIQPREIKESSYYNTAEYKSLISEREIQKTTQIIPSETTLLEDEKSLVSYLNY

SEQ ID NO: 5878 - protein, 998 aa, Escherichia coli; identical to SEQ ID NO: 2953

SEQ ID NO: 5879 - protein, 360 aa, Escherichia coli; identical to SEQ ID NO: 3354

SEQ ID NO: 5880 - protein, 760 aa, Escherichia coli
MENNRNFPARQFHSLTFFAGLCIGITPVAQALAAEGQTNADDTLVVEASTPSLYAPQQSADPKFSRPVADTTRTMTVISEQVIKDQGATNLTDALKNVPGVGAFFAGENGNSTTGDAIYMRGADTSNSIYIDGIRDIGSVSRDTFNTEQVEVIKGPSGTDYGRSAPTGSINMISKQPRNDSGIDASASIGSAWFRRGTLDVNQVIGDTTAVRLNVMGEKTHDAGRDKVKNERYGVAPSVAFGLGTANRLYLNYLHVTQHNTPDGGIPTIGLPGYSAPSAGTAALNHSGKVDTHNFYGTDSDYDDSTTDTATMRFEHDINDNTTIRNTTRWSRVKQDYLMTAIMGGASNITQPTSDVNSWTWSRTANTKDVSNKILTNQTNLTSTFYTGSIGHDVSTGVEFTRETQTNYGVNPVTLPAVNIYHPDSSIHPGGLTRNGANANGQTDTFAIYAFDTLQITRDFELNGGIRLDNYHTEYDSATACGGSGRGAITCPAGVAKGSPVTTVDTAKSGNLVNWKAGALYHLTENGNVYINYAVSQQPPGGNNFALAQSGSGNSANRTDFKPQKANTSEIGTKWQVLDKRLLLTAALFRTDIENEVEQNDDGTYSQYGKKRVEGYEISVAGNITPAWQVIGGYTQQKATIKNGKDVAQDGSSSLPYTPEHAFTLWSQYQATDDISVGAGARYIGSMHKGSDGAVGTPAFTEGYWVADAKLGYRVNRNLDFQLNVYNLFDTDYVASINKSGYRYHPGEPRTFLLTANMHF

SEQ ID NO: 5881 - protein, 121 aa, Escherichia coli; identical to SEQ ID NO: 2522

SEQ ID NO: 5882 - protein, 539 aa, Escherichia coli
MAAVCGTSGIASLFSQAAFAADSDIADGQTQRFDFSILQSMAHDLAQTAWRGAPRPLPDTLATMTPQAYNSIQYDAEKSLWHNVENRQLDAQFFHMGMGFRRRVRMFSVDPATHLAREIHFRPELFKYNDAGVDTKQLEGQSDLGFAGFRVFKAPELARRDVVSFLGASYFRAVDDTYQYGLSARGLAIDTYTDSKEEFPDFTAFWFDTVKPGATTFTVYALLDSASITGAYKFTIHCEKSQVIMDVENHLYARKDIKQLGIAPMTSMFSCGTNERRMCDTIHPQIHDSDRLSMWRGNGEWICRPLNNPQKLQFNAYTDNNPKGFGLLQLDRDFSHYQDIMGWYNKRPSLWVEPRNKWGKGTIGLMEIPTTGETLDNIVCFWQPEKAVKAGDEFAFQYRLYWSAQPPVHCPLARVMATRTGMGGFPEGWAPGEHYPEKWARRFAVDFVGGDLKAAAPKGIEPVITLSSGEAKQIEILYIEPIDGYRIQFDWYPTSDSTDPVDMRMYLRCQGDAISETWLYQYFPPAPDKRQYADDRVMS

SEQ ID NO: 5883 - protein, 361 aa, Escherichia coli
MKRNILAVIVPALLVAGTANAAEIYNKDGNKVDLYGKAVGLHYFSKGNGENSYGGNGDMTYARLGFKGETQINSDLTGYGQWEYNFQGNNSEGADAQTGNKTRLAFAGLKYADVGSFDYGRNYGVVYDALGYTDMLPEFGGDTAYSDDFFVGRVGGVATYRNSNFFGLVDGLNFAVQYLGKNERDTARRSNGDGVGGSISYEYEGFGIVGAYGAADRTNLQEAQPLGNGKKAEQWATGLKYDANNIYLAANYGETRNATPITNKFTNTSGFANKTQDVLLVAQYQFDFGLRPSIAYTKSKAKDVEGIGDVDLVNYFEVGATYYFNKNMSTYVDYIINQIDSDNKLGVGSGDTVAVGIVYQF

SEQ ID NO: 5884 - protein, 646 aa, Escherichia coli
MRLATPRINLSESLTGVPGLQVQNRQNYAQDLQLSIRGFGSRSTYGIRGICLYVDGIPATMPDGQGQTSNIDLSSVQNVEVLRGPFSALYGNASGGVMNVTTQTGQQPPTIEASSYYGSFGSWRYGLKATGATGDGTQPGDVDYTVSTTRFTTHGYRDHSGAQKNLANAKLGVRIDEASKLSLIFNSVDIKADDPGGLTKAEWKANPQQAPRAEQYDTRKTIKQTQAGLRYERSLSAQDDMSVMMYAGERETTQYQSIPMAPQLNPSHAGGVITLQRHYQGIDSRWTHRGELGVPVTFTTGLNYENMSENRKGYNNFRLNSGMPEYGQKGELRRDERNLMWNIDPYLQTQWQLSEKLSLDAGVRYSSVWFDSNDHYVTPGNGDDSGDASYHKWLPAGSLKYAMTDAWNIYLAAGRGFETPTINELSYRADGQSGMNFGLKPSTNDTIEIGSKTRIGDGLLSLALFQTDTDDEIVVDSSSGGRTTYKNAGKTRRQGAELAWDQRFAGDFRVNASWTWLDATYRSNVCNEQDCNGNRMPGIARNMGFASIGYVPEDGWYAGTEARYMGDIMADDENTAKAPSYTLVGLFTGYKYNYHNLTVDLFGRVDNLFDKEYVGSVIVNESNGRYYEPSPGRNYGVGMNIAWRFE

SEQ ID NO: 5885 - protein, 191 aa, Escherichia coli; identical to SEQ ID NO: 2727

SEQ ID NO: 5886 - protein, 505 aa, Escherichia coli; identical to SEQ ID NO: 3922

SEQ ID NO: 5887 - protein, 174 aa, Escherichia coli
MHNVSTTTTGFPLAKILASTELGDNTIQAANDAANKLFSLAIADLTANKNINTTNAHSTSNILIPELKAPKSLNASSQLTLLIGNLIQILGEKSLTALTNKITAWKSQQQARQQKNLEFSDKINTLLSETEGLTRDYEKQINKLKNADSKIKDLENKINQIQTRLSELDPDSPE

SEQ ID NO: 5888 - protein, 678 aa, Escherichia coli
MVPSTFSRLKAARCLPVVLAALIFAGCGTHTPDQSTAYMQGTAQADSAFYLQQMQQSSDDTRINWQLLAIRALVKEGKTGQAVELFNQLPQELNDSQRREKTLLAVEIKLAQKDFAGAQNLLAKITPADLEQNQQARYWQAKIDASQGRPSIDLLRALIAQEPLLGAKEKQQNIDATWQALSSMTQEQANTLVINADENILQGWLDLQRVWFDNRNDPDMMKAGIADWQKRYPNNPGAKMLPTQLVNVKAFKPASTNKIALLLPLNGQAAVFGRTIQQGFEAAKNIGTQPVAAQVAAAPAADVAEQPQPQTVDGVASPAQASVSDLTGEQPAAQPAPVSTPAATTTAVSAPANPSAELKIYDTSSQPLSQILSQVQQDGASIVVGPLLKNNVEELLKSNTPLNVLALNQPENIENRVNICYFALSPEDEARDAARHIRDQGKQAPLVLIPRSSLGDRVANAFAQEWQKLGGGTVLQQKFGSTSELRAGVNGGSGIALTGTPITPRATTDSGMTTNNPTLQTTPTDDQFTNNGGRVDAVYIVATPGEIAFIKPMIAMRNGSQSGATLYASSRSAQGSAGPDFRLEMEGLQYSEIPMLAGGNLPLMQQALSAVNNDYSLARMYAMGVDAWSLANHFSQMRQVQGFEINGNTGSLTANPDCVINRKLSWLQYQQGQVVPAS

SEQ ID NO: 5889 - protein, 231 aa, Escherichia coli
MSSIAWGAIIPDRTRIIMNESDKGEALKLTNQSKNLPYLAQTWIEDTKGNKSRDFIVTVPPMVRLNPSEQIQIRMISQEKIAQLPNDRETLFYFNVRETPPKTDKKNVMQVTMQHALKLFWRPKAIELEDDGVMSYEKVEIIRRNDGSIRFNNKMPYHVTLGYIGTNGITMLPQTQSLMVTPYSHADTQFKNVPSAFQVGYINDFGGLSFYEINCPTVNNSCNVSVAKRDK

SEQ ID NO: 5890 - protein, 193 aa, Escherichia coli; identical to SEQ ID NO: 2246

SEQ ID NO: 5891 - protein, 232 aa, Escherichia coli; identical to SEQ ID NO: 2087

SEQ ID NO: 5892 - protein, 236 aa, Escherichia coli; identical to SEQ ID NO: 3286

SEQ ID NO: 5893 - protein, 118 aa, Escherichia coli [sequence omitted]

SEQ ID NO: 5894 - protein, 828 aa, Escherichia coli
MKLSRRSFMKANAVAAAAAAAGLSVPGVARAVVGQQEAIKWDKAPCRFCGTGCGVLVGTQQGRVVACQGDPDAPVNRGLNCIKGYFLPKIMYGKDRLTQPLLRMKNGKYDKEGEFTPITWDQAFDVMEEKFKTALKEKGPESIGMFGSGQWTIWEGYAASKLFKAGFRSNNIDPNARHCMASAVVGFMRTFGMDEPMGCYDDIEQADAFVLWGANMAEMHPILWSRITNRRLSNQNVTVAVLSTYQHRSFELADNGIIFTPQSDLVILNYIANYIIQNNAINQDFFSKHVNLRKGATDIGYGLRPTHPLEKAAKNPGSDASEPMSFEDYKAFVAEYTLEKTAEMTGVPKDQLEQLAQLYADPNKKVISYWTMGFNQHTRGVWANNLVYNLHLLTGKISQPGCGPFSLTGQPSACGTAREVGTFAHRLPADMVVTNEKHRDICEKKWNIPSGTIPAKIGLHAVAQDRALKDGKLNVYWTMCTNNMQAGPNINEERMPGWRDPRNFIIVSDPYPTVSALAADLILPTAMWVEKEGAYGNAERRTQFWRQQVQAPGEAKSDLWQLVQFSRRFKTEEVWPEELLAKKPELRGKTLYEVLYATPEVSKYPVSELAEDQLNDESRELGFYLQKGLFEEYAWFGRGHGHDLAPFDDYHKARGLRWPVVNGKETQWRYSEGNDPYVKAGEGYKFYGKPDGKAVIFALPFEPAAEAPDEEYDLWLSTGRVLEHWHTGSMTRRVPELHRAFPEAVLFIHPLDAKARDLRRGDKVKVVSRRGEVISIVETRGRNRPPQGLVYMPFFDAAQLVNKLTLDATDPLSKETDFKKCAVKLEKV

SEQ ID NO: 5895 - protein, 221 aa, Escherichia coli; identical to SEQ ID NO: 3141

SEQ ID NO: 5896 - protein, 631 aa, Escherichia coli
MVVTASSVEQNLKDAPASISIITQEDLQRKPVQNLKDVLKEVPGVQLTNEGDNRKGVSIRGLDSSYTLILVDGKRVNSRNAVFRHNDFDLNWIPVDSIERIEVVRGPMSSLYGSDALGGVVNIITKKIGQKWSGTVTVDTTIQEHRDRGDTYNGQFFTSGPLIDGVLGMKAYGSLAKREKDDPQNSTTTDTGETPRIEGFSSRDGNVEFAWTPNQNHDFTAGYGFDRQDRDSDSLDKNRLERQNYSVSHNGRWDYGTSELKYYGEKVENKNPGNSSPITSESNAVDGKYTLPLTAINQFLTVGGEWRHDKLSDAVNLTGGTSSKTSASQYALFVEDEWRIFEPLALTTGVRMDDHETYGEHWSPRAYLVYNATDTVTVKGGWATAFKAPSLLQLSPDWTSNSCRGACKIVGSPDLKPETSESWELGLYYMGEEGWLEGVESSVTVFRNDVKDRISISRTSDVNAAPGYQNFVGFETGANGRRIPVFSYYNVNKARIQGVETELKIPFNDEWKLSINYTYNDGRDVSNGENKPLSDLPFHTANGTLDWKPLALEDWSFYVSGHYTGQKRADSATAKTPGGYTIWNTGAAWQVTKDVKLRAGVLNLGDKDLSRDDYSYNEDGRRYFMAVDYRF

SEQ ID NO: 5897 - protein, 432 aa, Escherichia coli; identical to SEQ ID NO: 2026

SEQ ID NO: 5898 - protein, 224 aa, Escherichia coli; identical to SEQ ID NO: 3165

SEQ ID NO: 5899 - protein, 208 aa, Escherichia coli; identical to SEQ ID NO: 1949

SEQ ID NO: 5900 - protein, 237 aa, Escherichia coli; identical to SEQ ID NO: 3022

SEQ ID NO: 5901 - protein, 274 aa, Escherichia coli; identical to SEQ ID NO: 3160

SEQ ID NO: 5902 - protein, 230 aa, Escherichia coli; identical to SEQ ID NO: 3348

SEQ ID NO: 5903 - protein, 771 aa, Escherichia coli
MVLTGSGMLCTTANAEEYYFDPIMLETTKSGMQTTDLSRFSKKYAQLPGTYQVDIWLNKKKVSQKKITFTANAEQLLQPQFTVEQLRELGIKVDEIPALAEKDDDSVINSLEQIIPGTAAEFDFNHQRLNLSIPQIALYRDARGYVSPSRWDDGIPTLFTNYSFTGSDNRYRQGNRSQRQYLNMQNGANFGPWRLRNYSTWTRNDQTSSWNTISSYLQRDIKALKSQLLLGESATSGSIFSSYTFTGVQLASDDNMLPNSQRGFAPTVRGIANSSAIVTIRQNGYVIYQSNVPAGAFEINDLYPSSNSGDLEVTIEESDGTQRRFIQPYSSLPMMQRPGHLKYSATAGRYRADANSDSKEPEFAEATAIYGLNNTFTLYSGLLGSEDYYALGIGIGGTLGALGALSMDINRADTQFDNQHSFHGYQWRTQYIKDIPETNTNIAVSYYRYTNDGYFSFDEANTRNWDYNSRQKSEIQFNISQTIFDGVSLYASGSQQDYWGNNEKNRNISVGVSGQQWGIGYSLNYQYSRYTDQNNDRALSLNLSIPLERWLPRSRVSYQMTSQKDRPTQHEMRLDGSLLDDGRLSYSLEQSLDDDNNHNSSVNASYRSPYGTFSAGYSYGNDSSQYNYGVTGGVVIHPHGVTLSQYLGNAFALIDANGASGVRIQNYPGIATDPFGYAVVPYLTTYQENRLSVDTTQLPDNVDLEQTTQFVVPNRGAMVAARFNANIGYRVLVTVSDRNGKPLPFGALASNDETGQQSIVDEGGILYLSGI

SEQ ID NO: 5904 - protein, 883 aa, Escherichia coli
MTAIRAAFKAYRMHQVLIMPRFARLTIALGLATAVFPVDAEYYFNPRFLSNDLAESVDLSAFTKGREAPPGTYRVDIYLNDEFMTSRDITFIADDNNAELIPCLSTDLLVSLGIKKSALLDNKEHSAEKHVPDNSACTPLQDRLADASTEFDVGQQHLSLSVPQIYVGRMARGYVSPDLWEEGINAGLLNYSFNGNSINNRSNHNAGKSNYAYLNLQSGINIGSWRLRDNSTWSYNSGSSNSSDSNKWQHINTSAERDIIPLRSRLTVGDSYTDGDIFDSVNFRGLKINSTEAMLPDSQHGFAPVIHGIARGTAQVSVKQNGYDVYQTTVPPGPFTIDDINSATNGGDLQVTIKEADGSIQTLYVPYSSVPVLQRAGYTRYALAMGEYRSGNNLQSSPKFIQGSLMHGLEGNWTPYGGMQIAEDYQAFNLGIGKDLGLFGAFSFDITQANTTLADGTRHSGQSVKSVYSKSFYQTGTNIQVAGYRYSTQGFYNLSDSAYSRMSGYTVKPPTGDTNEQTQFIDYFNLFYSKRGQEQISISQQLGNYGTTFFSASRQSYWNTSRSDQQISFGLNVPFGDITTSLNYSYSNNIWQNDRDHLLAFTLNVPFSHWMRTDSQSAFRNSNASYSMSNDLKGGMTNLSGVYGTLLPDNNLNYSVQVGNTHGGNTSSGTSGYSSLNYRGAYGNTNVGYSRNGDSSQIYYGMSGGIIAHADGITFGQPLGDTMVLVKAPGADNVKIENQTGIHTDWRGYAILPFATEYRENRVALNANSLADNVELDETVVTVIPTHGAIARATFNAQIGGKVLMTLKYGNKSVPFGAIVTHGENKNGSIVAENGQVYLTGLPQSGKLQVSWGNDKNSNCIVDYKLPEVSPGTLLNQQTAICR

SEQ ID NO: 5905 - protein, 410 aa, Escherichia coli
MAACTLLYTGNTEARTYSFDASMLKGGGKGVDLTLFEEGAQLPGIYPVDIILNGSRVDSRDMAFRTEKDAEGKTYLKTCLTREMLARYGVMTEEYPELFHGDDGKEADACAELSVIPQATETYQFASQQLLLSIPQVALRPPLRGIAPEALWDDGIPAFLLNWQANTSRSEYRGYGKSVTDNYWVTLEPGINLGPWRVRNLTTWNRSSGQPGQWESAYIRAERGINSLRSRLTLGEDYTPSDIFDSVPFRGVMLGSDESMVPYNQREFAPVVRGIARTQARIEVRQNGYLIDSRTVAPGAFALTDLPLTGSGGDLQVTVQESDGTAQVLTVPYTTPAIALREGYMKYSIAGGEYRSSDDAVEHSPLGQMSVMYGLPWGLTAFGGGTDVIALSVSGSGAGMVNGQTGGGVG

SEQ ID NO: 5906 - protein, 266 aa, Escherichia coli; identical to SEQ ID NO: 1894

SEQ ID NO: 5907 - protein, 851 aa, Escherichia coli
MPSFIGGLVVFVSAAFNAQAETWFDPAFFKDDPSMVADLSRFEKGQKITPGVYRVDIVLNQTIVDTRNVNFVEITPEKGIAACLTTESLDAMGVNTDAFPAFKQLDKQACVPLAEIIPDASVTFNVNKLRLEISVPQIAIKSNARGYVPPERWDEGINALLLGYSFSGANSIHSSADSDSGDSYFLNLNSGVNLGPWRLRNNSTWSRSSGQTAEWKNLSSYLQRAVIPLKGELTVCDDYTAGDFFDSVSFRGVQLASDDNMLPDSLKGFAPVVRGIAKSNAQITIKQNGYTIYQTYVSPGAFEISDLYSTSSSGDLLVEIKEADGSVNSYSVPFSSVPLLQRQGRIKYAVTLAKYRTNSNEQQESKFAQATLQWGGPWGTTWYGGGQYAEYYRAAMFGLGFNLGDFGAISFDATQAKSTLADQSEHKGQSYRFLYAKTLNQLGTNFQLMGYRYSTSGFYTLSDTMYKHMDGYEFNDGDDEDTPMWSRYYNLFYTKRGKLQVNISQQLGEYGSFYLSGSQQTYWHTDQQDRLLQFGYNTQIKDLSLGVSWNYSKSRGQPDADQVFALNFSLPLNLLLPRSNDSYTRKKNYAWMTSNTSIDNEGHITQNLGLTETLLDDGNLSYSVQQGYNSEGKTANGSASMDYKGAFADARVGYNYSDNGSQQQLNYALSGSLVAHSQGITLGQSLGETNVLIAAPGAENTRVANSTGLKTDWRGYTVVPYATSYRENRIALDAASLKRNVDLENAVVNVVPTKGALVLAEFNAHAGARVLMKTSKQGIPLRFGAIATLDGIQTNSGIIDDDGSLYMSGLPAQGAITVRWGEAPDQICHISYQLTEQQINSAITRMDAICR

SEQ ID NO: 5908 - protein, 856 aa, Escherichia coli
MAGFFVRLFVACAFAAQAPLSSAELYFNPRFLADDPQAVADLSRFENGQELPPGTYRVDIYLNNGYMATRDVTFNTGDSEQGIVPCLTRAQLASMGLNTASVSGMNLLADDACVPLTSMIHDATAHLDVGQQRLNLTIPQAFMSNRARGYIPPELWDPGINAGLLNYNFSGNSVQNRIGGNSHYAYLNLQSGLNIGAWRLRDNTTWSYNRSDRSSGSKNKWQHINTWLERDIIPLRSRLTLGDGYTQGDIFDGINFRGAQLASDDNMLPDSQRGFAPVIHGIARGTAQVTIKQNGYDIYNSTVPPGPFTINDIYAAGNSGDLQVTIKEADGSTQIFTVPYSSVPLLQREGHTRYSITAGEYRSGNAQQEKPRFFQSTLLHGLPAGWTIYGGTQLADRYRAFNFGIGKNMGALGALSVDMTQANSTLPDDSQHDGQSVRFLYNKSLNESGTNIQLVGYRYSTSGYFNFADTTYSRMNGYNIETQDGVIQVKPKFTDYYNLAYNKRGKLQLTVTQQLGRTSTLYLSGSHQTYWGTSNVDEQFQAGLNTAFEDINWTLSYSLTKNAWQKGRDQMLALNVNIPFSHWLRSDSKSQWRHASASYSMSHDLNGRMTNLAGVYGTLLEDNNLSYSVQTGYAGGGDGNSGSTGYATLNYRGGYGNANIGYSHSDDIKQLYYGVSGGVLAHANGVTLGQPLNETVVLVKAPGAKDAKVENQTGVRTDWRGYAVLPYATEYRENRVALDTNTLADNVDLDNAVANVVPTRGAIVRAEFKARVGIKLLMTLTHNNKPLPFGAMVTSESSQSSGIVADNGQVYLSGMPLAGKVQVKWGEEENAHCVANYQLPPESQQQLLTQLSAECR

SEQ ID NO: 5909 - protein, 161 aa, Escherichia coli; identical to SEQ ID NO: 2582

SEQ ID NO: 5910 - protein, 603 aa, Escherichia coli
MYKKLKLTTISELIKNIYCSLSVLIIGCASAYAVEFNKDLIEAEDRENVNLSQFETDGQLPVGKYSLNALINNKRTPIHLDLQWVLIDNQTAVCLTPEQLTLLGFTDEIIEEAQQNLIDGCYPIEKEKQITTYLDKGKMQLSISAPQAWLKYKDANWTPPELWDHGIAGAFLDYNLYASHYAPHQGDNSQNISSYGQAGVNLGAWRLRTDYQYDQSFNNGKSQANNLDFPRIYLFRPIPAINAKLTIGQYDTESSIFDSFHFSGVSLKSDENMLPPDLRGYAPQITGVAQTNAKVTVSQNNRIIYQENVPPGPFAITNLFNTLQGQLDVKVEEEDGQVTQWQVASNSIPYLTRKGQIRYTTAMGKPTSVGGDSLQQPFFWTGEFSWGWLNNVSLYGGSVLTNRDYQSLAAGVGFNLNSLGSLSFDVTRSDAQLHNQDKETGYSYRANYSKRFESTGSQLTFAGYRFSDKNFVTMNEYINDTNHYTNYQDEKESYIVTFNQYLESLRLNTYVSLARNTYWDASSNVNYSLSLSRDFDIGPLKNVSTSLTFSRINWEEDNQDQLYLNISIPWGTSRTLSYGMQRNQDNKISHTASWYDSSDRNNS

SEQ ID NO: 5911 - protein, 735 aa, Escherichia coli
MVRLMGLTAESLDKVVYWHDGQCADFHGLPGVDIRPDTGAGVLRINMPQAWLEYSDATWLPPSRWDDGIPGLMLDYNLNGTVSRNYQGGDSHQFSYNGTVGGNLGPWRLRADYQGSQEQSRYNGEKTTNRNFTWSRFYLFRAIPRWRANLTLGENNINSDIFRSWSYTGASLESDDRMLPPRLRGYAPQITGIAETNARVVVSQQGRVLYDSMVPAGPFSIQDLDSSVRGRLDVEVIEQNGRKKTFQVDTASVPYLTRPGQVRYKLVSGRSRGYGHETEGPVFATGEASWGLSNQWSLYGGAVLAGDYNALAAGAGWDLGVPGTLSADITQSVARIEGERTFQGKSWRLSYSKRFDNADADITFAGYRFSERNYMTMEQYLNARYRNDYSSREKEMYTVTLNKNVADWNTSFNLQYSRQTYWDIRKTDYYTVSVNRYFNVFGLQGVAVGLSASRSKYLGRDNDSAYLRISVPLGTGTASYSGSMSNDRYVNMAGYTDTFNDGLDSYSLNAGLNSGGGLTSQRQINAYYSHRSPLANLSANIASLQKGYTSFGVSASGGATITGKGAALHAGGMSGGTRLLVDTDGVGGVPVDGGQVVTNRWGTGVVTDISSYYRNITSVDLKRLPDDVEATRSVVESALTEGAIGYRKFSVLKGKRLFAILRLADGSQPPFGASVTSEKGRELGMVADEGLAWLSGVTPGETLSVNWDEKIQCQVNVPETAISDQQLLLPCTPQK

SEQ ID NO: 5912 - protein, 219 aa, Escherichia coli; identical to SEQ ID NO: 3328

SEQ ID NO: 5913 - protein, 862 aa, Escherichia coli
MSGSYSSVWAEDDIQFDSRFLELKGDTKIDLKRFSSQGYVEPGKYNLQVQLNKQPLAEEYDIYWYAGEDDASKSYACLTPELVAQFGLKEDVAKNLQWSHDAKCLKSGQLEGMEIKADLSQSALVISLPQAYLEYTYPDWDPPSRWDDGISGIVADYSINAQTRHEENGGDDSNEISGNGTVGVNLGPWRMRADWQTNYQHTRSNDDDEEFSGDDTQKKWEWSRYYAWRALPSLKAKLALGEDYLNSDIFDGFNYVGGSVSTDDQMLPPNLRGYAPDISGVAHTTAKVTVSQMGRVIYETQVPAGPFRLQDLGDSVSGTLHIRIEEQNGQVQEYDISTASMPYLTRPGQVRYKIMMGRPQEWGHHVEGEFFSGAEASWGIANGWSLYGGALGDENYQSAALGVGRDLSTFGAVAFDVTHSHTKLDKDTAYGKGSLDGNSFRVSYSKDFDQLNSRVTFAGYRFSEENFMTMSEYLDASDSGMVRTGNDKEMYTATYNQNFRDAGVSVYLNYTRHTYWDREEQTNYNIMLSHYFNMGSIRNMSVSLTGYRYEYDNRADKGMYISLSMPWGDNSTVSYNGNYGSGTDSSQVGYFSRVDDATHYQLNVGTSDKHTSVDGYYSHDGSLAQVDLSANYHEGQYTSAGLSLQGGATLTAHGGALHRTQNMGGTRLLIDADGVADVPVEGNGAAVYTNMFGKAVVSDVNNYYRNQAYIDLNKLPENAEATQSVVQATLTEGAIGYRKFAVISGQKAMAVLRLQDGSHPPFGAEVKNDNEQTVGLVDDDGNVYLAGVKPGEHMSVFWSGVAHCDINLPDPLPADLFNGLLLPCQHKGNVAPVVPDDIKPVIQEQTQQVTPTNPPVSVSANQ

SEQ ID NO: 5914 - protein, 765 aa, Escherichia coli
MQFHINSPDINNEKAVLLARDETLGNCLNLTEIIPQASVRYDVNEQRLDIDVPQAWVMKNYQNYVDPSLWENGINAAMLSYNLNGYHSETPGRRNDSIYAAFNGGMNLGAWRLRASGNYNWMTDSGSNYDFKNRYIQRDIASLRSQLILGESYTTGETFDSVSIRGIRLYSDSRMLPPTLASFAPIIHGVANTNAKVTITQGGYKIYETTVPPGAFVIDDLSPSGYGSDLIVTVEESDGSKRTFSQPFSSVVQMLRPGVGRWDISGGQVLKDDIQDEPNLFQASYYYGLNNYLTGYTGIQITDNNYTAGLLGLGLNTSVGAFSFDVTHSNVRIPDDKTYQGQSYRVSWNKLFEETSTSLNIAAYRYSTQNYLGLNDALTLIDEVKHPEQDLEPKSMRNYSRMKNQVTVSINQPLKFEKKDYGSFYLSGSWSDYWASGQNRSNYSIGYSNSASWGSYSVSAQRSWNEDGDTDDSVYLSFTIPIEKLLDTEQRTSGFQSIDTQMSSDFKGNNQLNVSSSGYSDNARLSYSVNTGYTMNKASKDLSYVGGYASYESPWGTLAGSVSANSDNSRQVSLSTDGGFVLHSGGLTFSNDSFSDSDTLAVVQAPGAQGARINYGNSTIDRWGYGVTSALSPYHENRIALDINDLENDVELKSTSAVAVPRQGSVVFADFETVQGQSAIMNITRSDGKNIPFAADIYDEQGNVIGNVGQGGQAFVRGIEQQGNISIKWLEESKPVSCLAHYQQSSEAEKIAQSIILNGIRCQIE

SEQ ID NO: 5915 - protein, 831 aa, Escherichia coli
MQELPMLRMTPLASAIVALLLGIEAYAAEETFDTHFMIGGMKDQQVANIRLDDNQPLPGQYDIDIYVNKQWRGKYEIIVKDNPQETCLSREVIKRLGINSDNFASGKQCLTFEQLVQGGSYTWDIGVFRLDFSVPQAWGEELESGYVPPENWERGINAFYTSYYVSQYYSDYKASGNSKSTYVRFNSGLNLLGWQLHSDASFSKTNNNPGVWKSNTLYLERGFAQLLGTLRVGDMYTSSDIFDSVRFRGVRLFRDMQMLPNSKQNFTPRVQGIAQSNALVTIEQNGFVVYQKEVPPGPFAITDLQLAGGGADLDVSVKEADGSVTTYLVPYAAVPNMLQPGVSKYDFAAGRSHIEGASKHSDFVQAGYQYGFNNLLTLYGGSMVANNYYAFTLGTGWNTRIGAISVDATKSHSKQDNGDVFDGQSYQIAYNKFVSQTSTRFGLAAWRYSSRDYRTFNDHVWANNKDNYRRDENDVYDIADYYQNDFGRKNSFSANMSQSLPEGWGSVSLSTLWRDYWGRSGSSKDYQLSYSNNLRRISYTLAASQAYDENHHEEKRFNIFISIPFDWGDDVSTPRRQIYMSNSTTFDDQGFASNNTGLSGTVGSRDQFNYGVNLSHQHQGNETTAGANLTWNAPVATVNGSYSQSSTYRQAGASVSGGIVAWSGGVNLANRLSETFAVMNAPGIKDAYVNGQKYRTTNRNGVVVYDGMTPYRENHLMLDVSQSDSEAELRGNRKIAAPYRGAVVLVNFDTDQRKPWFIKALRADGQPLTFGYEVNDIHGHNIGVVGQGSQLFIRTNEIPPSVNVAIDKQQGLSCTITFGKEIDESRNYICQ

SEQ ID NO: 5916 - protein, 819 aa, Escherichia coli
MLSLAGVPVYAVDFNTDVLDAADRQNIDFSRFSRAGYIMPGQYQMEIRVNGQDISPSAFQIAFLEPPFSDSDNEKPLPEPCLTPEIVSRMGLTEASQEKVTYWNNGQCADFRQLSGVEIRPNPAEGMLYINMPQAWLEYSDASWLPPSRWDNGIPGLLFDYNINGTVNKPHQGKQSQSLNYNGTAGANFGAWRLRADYQGNLNHTTGSAQGTDSQFTWSRFYMYRAIPRWRANLTLGENYINSEIFSSWRYTGASLESDDRMLPPKLRGYAPQVSGIADTNARVVISQQGRILYDSTVPAGPFTIQDLDSSVRGRLDVEVIEQDGRKKTFQVDTAYVPYLTRPGQVRYKLVSGRSRTYEHTMEGPVFAAGEASWGISNTWSLYGGSIVAGDYNALAVGLGRDLSKFGTVSADVTQSVARIPGYDTKQGKSWRLSYSKRFDEVNTDITFAGYRFSERNYMTMDQYLNARYRNDFTGREKELYTVTLNKNFEDWKASVNLQYSHQTYWDRRTSDYYTLSVNRYFDAFSFKNIALGISASRSKYLNRDNDSAFVRLSVPWGTGTASYSGSMSNDRYTNTVGYSDTLNNGLSSYSLNAGVNSGGGQPSQRQMSAYYNHNGSLTNLSASFSAVENGYSSFGMSASGGATVTMKGAALHAGGMNGGTRLLVDTDGVGGVPVDGGRVYTNRWGIGVVTDVSSYYRNTTSVDLNKLPEDMEATRSVVESVLTEGAIGYREFEVLKGSRLFAVLRMSDNSYPPFGASVTNAKGRELGMVADSGLAWLSGVNPGETLNVGWDGRTQCVVDIPAHPDPAQQLLLPCRQVK

SEQ ID NO: 5917 - protein, 207 aa, Escherichia coli
MPLPDFRLIRLLPLAALVLTACSVTTPKGPGKSPDSPQWRQHQQDVRNLNQYQTRGAFAYISDQQKVYARFFWQQTGQDRYRLLLTNPLGSTELELNAQPGNVQLVDNKGQRYTADDAEEMIGKLTGMPIPLNSLRQWILGLPGDATDYKLDDQYRLNEITYSQNGKNWKVVYGGYDTKTQPAMPANMELTDGGQRIKLKMDNWIVK

SEQ ID NO: 5918 - protein, 794 aa, Escherichia coli
MKLNIFTKSMIGMGLVCSALPALAMEAWNNQQGGNKYQVIFDGKIYENAWWVASSNCPGDAKSNDASNPWRYVRAATATEISETSNPQSCTSAPQPSPDVKPAPDVKPAPDVQPAPADKSNDNYAVVAWKGQEGSSTWYVIYNGGIYKNAWWVGAANCPGDAKENDASNPWRYVRAATATEISQYGNPGSCSVKPDNNGGAVTPVDPTPETPVTPTPDNNEPSTPADSGNDYSLQTWSGQEGSEIYHVIFNGNVYKNAWWVGSKDCPRGTSAENSNNPWRLVRTATAAELSQYGNPTTCEIDNGGVIVADGFQASKAYSADSIVDYNDAHYKTSVDQDAWGFVPGGDNPWKKYEPAKAWSASTVYVKGDRVVVDGQAYEALFWTQSDNPALVANQNATGSNSRPWKPLGKAQSYSNEELNNAPQFNPETLYASDTLIRFNGVNYISQSKVQKVSPSDSNPWRVFVDWTGTKERVGTPKKAWPKHVYAPYVDFTLNTIPDLAALAKNHNVNHFTLAFVVSKDANTCLPTWGTAYGMQNYAQYSKIKALREAGGDVMLSIGGANNAPLAASCKNVDDLMQHYYDIVDNLNLKVLDFDIEGTWVADQASIERRNLAVKKVQDKWKSEGKDIAIWYTLPILPTGLTPEGMNVLSDAKAKGVELAGVNVMTMDYGNAICQSANTEGQNIHGKCATSAIANLHSQLKGLHPNKSDAEIDAMMGTTPMVGVNDVQGEVFYLSDARLVMQDAQKRNLGMVGIWSIARDLPGGTNLSPEFHGLTKEQAPKYAFSEIFAPFTKQ

SEQ ID NO: 5919 - protein, 368 aa, Escherichia coli
MNKTITALAIMMASFAANASVLPETPVPFKSGTGAIDNDTVYIGLGSTGTAWYKLDTQAKDKKWTALAAFPGGPRDQATSAFIDGNLYVFGGIGKNSEGLTQVFNDVHKYNPKTNSWVKLMSHAPMGMAGHVTFVHNGKAYVTGGVNQNIFNGYFEDLNEAGKDSTAIDKINAHYFDKKAEDYFFNKFLLSFDPSTQQWSYAGESPWYGTAGAAVVNKGDKTWLINGEAKPGLRTDAVFELDFTGNNLKWNKLAPVSSPDGVAGGFAGISNDSLIFAGGAGFKGSRENYQNGKNYAHEGLKKSYSTDIHLWHNGKWDKSGELSQGRAYGVSLPWNNSLLIIGGETAGGKAVTDSVLISVKDNKVTVQN

SEQ ID NO: 5920 - protein, 819 aa, Escherichia coli
MDTVNIYRLSFVSCLVVAMPCALAVEFNLNVLDKSMRDRIDISLLKEKGVIAPGEYFVSVAVNNNQISNGQKINWHKNDDKTIPCINDLLVDKFGLKPEVRQSLPLINQCVDFSSRPEMLFNFDQANQQLNITIPQAWLAWHSENWTPPSTWKEGVAGVLMDYNLFASSYRPQDGSSSTNLNAYGTTGINAGAWRLRSDYQLNQTDSDDNHEQSGGISRTYLFRPLPQLGSKLTLGETDFSSNIFDGFSYTGAALASDERMLPWELRGYAPQISGIAQTNATVTISQSGRVIYQKKVPPGPFIIDDLNQSVQGTLDVKVTEEDGRVNNFQVSAASTPFLTRQGQVRYKLAAGQPRPSMSHQTENETFFSNEVSWGMLSNTSLYGGLLLSGDDYHSAAMGIGQNMLWLGALSFDVTWASSHFDTQQDERGLSYRFNYSKQVDATNSTISLAAYRFSDRHFHSYANYLDHKYNDSDAQDEKQTISLSVGQPITPLNLNLYANLLHQTWWNADASTTANITAGFNVDIGDWRDISISTSFNTTHYEDKDRDNQIYLSISLPFGNGGRVGYDMQNSSHSTTHRMSWNDTLDERNSWGMSAGLQSDRPDNGAQVSGNYQHLSSAGEWDISGTYAANDYSSVSSSWSGSFTATQYGAAFHRRSSTNEPRLMVSTDGVADIPVQGNLDYTNHFGIAVVPLISSYQPSTVAVNMNDLPDGVTVAENVIKETWIEGAIGYKSLASRSGKDVNVIIRNASGQFPPLGADIRQDDSGISVGMVGEEGHAWLSGVAENQKFTVVWGDSQHCSLHLPEHMEDTANRLILPCH

SEQ ID NO: 5921 - protein, 820 aa, Escherichia coli
MKIPTTTDIPQRYTWCLAGICYSSLAILPSFLSYAESYFNPAFLLENGTSVADLSRFERGNHQPARVYRVDLWRNDEFIGSQDIVFESTTENTGDKSGGLMPCFNQVLLERIGLNSSAFPELAQQQNNKCINLLKAVPDATINFDFAAMRLNITIPQIALLSSAHGYIPPEEWDEGIPALLLNYNFTGNRGNGNDSYFFSEFSGINIGPWRLRNNGSWNYFRGNGYHSEQWNNIGTWVQRAIIPLKSELVMGDGNTGSDIFDGVGFRGVRLYSSDNMYPDSQQGFAPTVRGIARTAAQLTIRQNGFIIYQSYVSPGAFEITDLHPTSSNGDLDVTIDERDGNQQNYTIPYSTVPILQREGRFKFDLTAGDFRSGNSQQSSPFFFQGTALGGLPQEFTAYGGTQLSANYTAFLLGLGRNLGNWGAVSLDVTHARSQLADDSRHEGDSIRFLYAKSMNTFGTNFQLMGYRYSTQGFYTLDDVAYRRMEGYEYDYDYDGEHRDEPIIVNYHNLRFSRKDRLQLNISQSLNDFGSLYISGTHQKYWNTSDSDTWYQVGYTSSWVGISYSLSFSWNESVGIPDNERIVGLNVSVPFNVLTKRRYTRENALDRAYASFNANRNSNGQNSWLAGVGGTLLEGHNLSYHVSQGDTSNNGYTGSATANWQAAYATLGVGYNYDRDQHDVNWQLSGGVVGHENGITLSQPFGDTNVLIKAPGAGGVRIENQTGILTDWRGYAVMPYATVYRYNRIALDTNTMGNSIDVEKNISSVVPTQGALVRANFDTRIGVRALITVTQGGKPVPFGSLVRENSIGITSMWVMTGKFI

SEQ ID NO: 5922 - protein, 237 aa, Escherichia coli; identical to SEQ ID NO: 3022

SEQ ID NO: 5923 - protein, 231 aa, Escherichia coli
MSKRTFAVIITLLCSFCIGQALAGGIVLQRTRVIYDASRKEAALPVANKGAETPYLLQSWVDNIDGTSRAPFIITPPLFRLEAGDDSSLRIIKTADNLPENKESLFYINVRAIPAKKKSDNVNANELTLVFKTRIKMFYRPAHLKGRVNDAWKSLEFKRSDHSLNIYNPTEYYVVFAGLAVDKTDLTSKIEYIAPGEHKQLPLPASGGKNVKWAAINDYGGSSGTETRPLQ

SEQ ID NO: 5924 - protein, 224 aa, Escherichia coli; identical to SEQ ID NO: 4306

SEQ ID NO: 5925 - protein, 250 aa, Escherichia coli; identical to SEQ ID NO: 3048

SEQ ID NO: 5926 - protein, 245 aa, Escherichia coli; identical to SEQ ID NO: 3410

SEQ ID NO: 5927 - protein, 733 aa, Escherichia coli; identical to SEQ ID NO: 5314

SEQ ID NO: 5928 - protein, 122 aa, Escherichia coli; identical to SEQ ID NO: 2915

SEQ ID NO: 5929 - protein, 169 aa, Escherichia coli; identical to SEQ ID NO: 3373

SEQ ID NO: 5930 - protein, 828 aa, Escherichia coli; identical to SEQ ID NO: 2388

SEQ ID NO: 5931 - protein, 236 aa, Escherichia coli
MTNTWNRLALLIFAVLSLLVAGELQAGVVVGGTRFIFPADRESISILLTNTSQESWLINSKINRPTRWAGGEASTVPAPLLAAPPLILLKPGTTGTLRLLRTESDILPVDRETLFELSIASVPSGKVENQSVKVAIRSVFKLFWRPEGLPGDPLEAYQQLRWTWNSQGVQLTNPTPYYINLIQVSVNGKALSNAGVVPPKSQRQTSWCHAIAPCHVAWRAINDYGGLSAKKEQNLP

SEQ ID NO: 5932 - protein, 191 aa, Escherichia coli; identical to SEQ ID NO: 2727

SEQ ID NO: 5933 - protein, 784 aa, Escherichia coli
MKKRIPTLLATMIATALYSQQGLAADLASQCMLGVPSYDRPLVQGDTNDLPVTINADHAKGDYPDDAVFTGSVDIMQGNSRLQADEVQLHQKEAPGQPEPVRTVDALGNVHYDDNQVILKGPKGWANLNTKDTNVWEGDYQMVGRQGRGKADLMKQRGENRYTILDNGSFTSCLPGSDTWSVVGSEIIHDREEQVAEIWNARFKVGPVPIFYSPYLQLPVGDKRRSGFLIPNAKYTTTNYFEFYLPYYWNIAPNMDATITPHYMHRRGNIMWENEFRYLSQAGAGLMELDYLPSDKVYEDEHPNDDSSRRWLFYWNHSGVMDQVWRFNVDYTKVSDPSYFNDFDNKYGSSTDGYATQKFSVGYAVQNFNATVSTKQFQVFSEQNTSSYSAEPQLDVNYYQNDVGPFDTRIYGQAVHFVNTRDDMPEATRVHLEPTINLPLSNNWGSINTEAKLLATHYQQTNLDWYNSRNTTKLDESVNRVMPQFKVDGKMVFERDMEMLAPGYTQTLEPRAQYLYVPYRDQSDIYNYDSSLLQSDYSGLFRDRTYGGLDRIASANQVTTGVTSRIYDDAAVERFNISVGQIYYFTESRTGDDNITWENDDKTGSLVWAGDTYWRISERWGLRGGIQYDTRLDNVATSNSSIEYRRDEDRLVQLNYRYASPEYIQATLPKYYSTAEQYKNGISQVGAVASWPIADRWSIVGAYYYDTNANKQADSMLGVQYSSCCYAIRVGYERKLNGWDNDKQHAVYDNAIGFNIELRGLSSNYGLGTQEMLRSNILPYQNSL

SEQ ID NO: 5934 - protein, 650 aa, Escherichia coli
MKGLNKITCCLLAALLMPCAGHAENEQYGANFNNADIRQFVEIVGQHLGKTILIDPSVQGTISVRSNDTFSQQEYYQFFLSILDLYGYSVITLDNGFLKVVRSANVKTSPGMIADSSRPGVGDELVTRIVPLENVPARDLAPLLRQMMDAGSVGNVVHYEPSNVLILTGRASTINKLIEVIKRVDVIGTEKQQIIHLEYASAEDLAEILNQLISESHGKSQMPALLSAKIVADKRTNSLIISGPEKARQRITSLLKSLDVEESEEGNTRVYYLKYAKATNLVEVLTGVSEKLKDEKGNARKPSSSGAMDNVAITADEQTNSLVITADQSVQEKLATVIARLDIRHAQVLVEAIIVEVQDGNGLNLGVQWANKNVGAQQFTNTGLPIFNAAQGVADYKKNGGITSANPAWDMFSAYNGMAAGFFNGDWGVLLTALASNNKNDILATPSIVTLDNKLASFNVGQDVPVLSGSQTTSGDNVFNTVERKTVGTKLKVTPQVNEGDAVLLEIEQEVSSVDSSSNSTLGPTFNTRTIQNAVLVKTGETVVLGGLLDDFSKEQVSKVPLLGDIPLVGQLFRYTSTERAKRNLMVFIRPTIIRDDDVYHSLSKEKYTRYRQEQQQRIDGKSKALVGSEDLPVLDENTFNSHAPAPSSR

SEQ ID NO: 5935 - protein, 243 aa, Escherichia coli; identical to SEQ ID NO: 2910

SEQ ID NO: 5936 - protein, 213 aa, Escherichia coli; identical to SEQ ID NO: 2232

SEQ ID NO: 5937 - protein, 686 aa, Escherichia coli; identical to SEQ ID NO: 3129

SEQ ID NO: 5938 - protein, 682 aa, Escherichia coli
MKNKYIIAPGIAVMCSAVISSGYASSDKKEDTLVVTASGFTQQLRNAPASVSVITSEQLQKKPVSDLVDAVKDVEGISITGGNEKPDISIRGLSGDYTLILVDGRRQSGRESRPNGSGGFEAGFIPPVEAIERIEVIRGPMSSLYGSDAIGGVINIITKPVNNQTWDGVLGLGGIIQEHGKFGNSTTNDFYLSGPLIKDKLGLQLYGGMNYRKEDSISQGTPAKDNKNITATLQFTPTESQKFVFEYGKNNQVHTLTPGESLDAWTMRGNLKQPNSKRETHNSRSHWVAAWNAQGEILHPEIAVYQEKVIREVKSGKKDKYNHWDLNYESRKPEITNTIIDAKVTAFLPENVLTIGGQFQHAELRDDSATGKKTTETQSVSIKQKAVFIENEYAATDSLALTGGLRLDNHEIYGSYWNPRLYAVYNLTDNLTLKGGIAKAFRAPSIREVSPGFGTLTQGGASIMYGNRDLKPETSVTEEIGIIYSNDSGFSASATLFNTDFKNKLTSYDIGTKDPVTGLNTFIYDNVGEANIRGVELATQIPVYDKWHVSANYTFTDSRRKSDDESLNGKSLKGEPLERTPRHAANAKLEWDYTQDITFYSSLNYTGKQIWAAQRNGAKVPRVRNGFTSMDIGLNYQILPDTLINFAVLNVTDRKSEDIDTIDGNWQVDEGRRYWANVRVSF

SEQ ID NO: 5939 - protein, 663 aa, Escherichia coli
MFRLNPFVRVGLCLSAISCAWPVLAVDDDGETMVVTASSVEQNLKDAPASISVITQEDLQRKPVQNLKDVLKEVPGVQLTNEGDNRKGVSIRGLDSSYTLILVDGKRVNSRNAVFRHNDFDLNWIPVDSIERIEVVRGPMSSLYGSDALGGVVNIITKKIGQKWSGTVTVDTTIQEHRDRGDTYNGQFFTSGPLIDGVLGMKAYGSLAKREKDDPQNSTTTDTGETPRIEGFSSRDGNVEFAWTPNQNHDFTAGYGFDRQDRDSDSLDKNRLERQNYSVSHNGRWDYGTSELKYYGEKVENKNPGNSSPITSESNTVDGKYTLPLTAINQFLTVGGEWRHDKLSDAVNLTGGTSSKTSASQYALFVEDEWRIFEPLALTTGVRMDDHETYGEHWSPRAYLVYNATDTVTVKGGWATAFKAPSLLQLSPDWTSNSCRGACKIVGSPDLKPETSESWELGLYYMGEEGWLEGVESSVTVFRNDVKDRISISRTSDVNAAPGYQNFVGFETGANGRRIPVFSYYNVNKARIQGVETELKIPFNDEWKLSFNYTYNDGRDVSNGENKPLSDLPFHTANGTLDWKPLALEDWSFYVSGHYTGQKRADSATAKTPGGYTIWNTGAAWQVTKDVKLRAGVLNLGDKDLSRDDYSYNEDGRRYFMAVDYRF

SEQ ID NO: 5940 - protein, 729 aa, Escherichia coli; identical to SEQ ID NO: 3979

SEQ ID NO: 5941 - protein, 244 aa, Escherichia coli; identical to SEQ ID NO: 2964

SEQ ID NO: 5942 - protein, 478 aa, Escherichia coli
MTRIKINARRIFSLLIPFFFFTSVHAEQTAAPPKPVTVEAKNETFAPQHPDQYLSWKATSEQSERVDALAEDPRLVILWAGYPFSRDYNKPRGHAFAVTDVRETLRTGAPKNAEDGPLPMACWSCKSPDVARLIQKDGEDGYFHGKWARGGPEIVNNLGCADCHNTASPEFAKGKPELTLSRPYAARAMEAIGKPFEKAGRFDQQSMVCGQCHVEYYFDGKNKAVKFPWDDGMKVENMEQYYDKIAFSDWTNSLSKTPMLKAQHPEYETWTAGIHGKNNVTCIDCHMPKVQNAEGKLYTDHKIGNPFDNFAQTCANCHTQDKAALQKVVAERKQSINDLKIKVEDQLVHAHFEAKAALDAGATEAEMKPIQDDIRHAQWRWDLAIASHGIHMHAPEEGLRMLGTAMDKAADARTKLARLLATKGITHEIQIPDISTKEKAQQAIGLNMEQIKAEKQDFIKTVIPQWEEQARKNGLLSQ

SEQ ID NO: 5943 - protein, 353 aa, Escherichia coli; identical to SEQ ID NO: 4626

SEQ ID NO: 5944 - protein, 673 aa, Escherichia coli; identical to SEQ ID NO: 2919

SEQ ID NO: 5945 - protein, 733 aa, Escherichia coli
MMISKKYTLWALNPLLLTMMAPAVAQQTDDETFVVSANRSNRTVAEMAQTTWVIENAELEQQIQGGKELKDALAQLIPGLDVSSRSRTNYGMNVRGRPLVVLVDGVRLNSSRTDSRQLDSIDPFNIDHIEVISGATSLYGGGSTGGLINIVTKKGQPETMMEFEAGTKSGFSSSKDHDERIAGAVSGGNEHISGRLSVAYQKFGGWFDGNGDATLLDNTQTGLQYSDRLDIMGTGTLNIDESRQLQLITQYYKSQGDDDYGLNLGKGFSAIRGTSTPFVSNGLNSDRIPGTERHLISLQYSDSAFLGQELVGQVYYRDESLRFYPFPTVNANKQVTAFSSSQQDTDQYGMKLTLNSKPMDGWQITWGLDADHERFTSNQMFFDLAQASASGGLNNKKIYTTGRYPSYDITNLAVFLQSGYDINNLFTLNGGVRYQYTENKIDDFIGYAQQRQIAAGKATSADAIPGGSVDYDNFLFNAGLLMHITERQQAWLNFSQGVELPDPGKYYGRGIYGAAVNGHLPLTKSVNVSDSKLEGVKVDSYELGWRFTGNNLRTQIAAYYSISDKSVVANKDLTISVVDDKRRIYGVEGAVDYLIPDTDWSTGVNFNVLKTESKVNGTWQKYDVKTASPSKATAYIGWAPDPWSLRVQSTTSFDVSDAQGYKVDGYTTVDLLGSYQLPVGTLSFSIENLFDRDYTTVWGQRAPLYYSPGYGPASLYDYKGRGRTFGLNYSVLF

SEQ ID NO: 5946 - protein, 360 aa, Escherichia coli; identical to SEQ ID NO: 3354

SEQ ID NO: 5947 - protein, 517 aa, Escherichia coli; identical to SEQ ID NO: 2462

SEQ ID NO: 5948 - protein, 121 aa, Escherichia coli; identical to SEQ ID NO: 2522

SEQ ID NO: 5949 - protein, 235 aa, Escherichia coli; identical to SEQ ID NO: 4365

SEQ ID NO: 5950 - protein, 233 aa, Escherichia coli; identical to SEQ ID NO: 3276

SEQ ID NO: 5951 - protein, 746 aa, Escherichia coli; identical to SEQ ID NO: 4389

SEQ ID NO: 5952 - protein, 204 aa, Escherichia coli; identical to SEQ ID NO: 2957

SEQ ID NO: 5953 - protein, 367 aa, Escherichia coli; identical to SEQ ID NO: 4285

SEQ ID NO: 5954 - protein, 230 aa, Escherichia coli; identical to SEQ ID NO: 3348

SEQ ID NO: 5955 - protein, 111 aa, Escherichia coli; identical to SEQ ID NO: 3096

SEQ ID NO: 5956 - protein, 386 aa, Escherichia coli; identical to SEQ ID NO: 3094

SEQ ID NO: 5957 - protein, 241 aa, Escherichia coli
MSNKNVNVRKSQEITFCLLAGILIFMAMMVAGRAEAGVALGATRVIYPAGQKQVQLAVTNNDENSTYLIQSWVENADGVKDGRFIVTPPLFAMKGKKENTLRILDATNNQLPQDRESLFWMNVKAIPSMDKSKLTENTLQLAIISRIKLYYRPAKLALPPDQAAEKLRFRRSANSLTLINPTPYYLTVTELNAGARVLENALVPPMGESTVKLPSDAGSNITYRTINDYGALTPKMTGVME

SEQ ID NO: 5958 - protein, 722 aa, Escherichia coli
MRINKILWSLTVLLVGLNSQVSVAKSSDDDNDETLVVEATAEQVLKQQPGVSVITSEDIKKTPPVNDLSDIIRKMPGVNLTGNSASGTRGNNRQIDIRGMGPENTLILIDGVPVTSRNSVRYSWRGERDTRGDTNWVPPEQVERIEVIRGPAAARYGSGAAGGVVNIITKRPTNDWHGSLSLYTNQPESSDEGATRRANFSLSGPLAGNALTTRLYGNLNKTDADSWDINSPVGTKNAAGHEGVRNKDINGVVSWKLNPQQILDFEAGYSRQGNIYAGDTQNSSSSAVTESLAKSGKETNRLYRQNYGITHNGIWDWGQSRFGVYYEKTNNTRMNEGLSGGGEGRILAGEKFTTNRLSSWRTSGELNIPLNVMVDQTLTVGAEWNRDKLDDPSSTSLTVNDSDISGSAADRSSKNHSQISALYIEDNIEPVPGTNIIPGVRFDYLSDSGGNFSPSLNLSQELGDYFKVKAGVARTFKAPNLYQSSEGYLLYSKGNGCPKDITSGGCYLIGNKDLDPEISVNKEIGLEFTWEDYHASVTYFRNDYQNKIVAGDNVIGQTASGAYILKWQNGGKALVDGIEASMSFPLVKDRLNWNTNATWMITSEQKDTGNPLSVIPKYTINNSLNWTITQAFSASVNWTLYGRQKPRTHAETRSEDTGGLSGKELGAYSLVGTNFNYDINKNLRLNVGVSNILNKQIFRSSEGANTYNEPGRAYYAGVTASF

SEQ ID NO: 5959 - protein, 365 aa, Escherichia coli; identical to SEQ ID NO: 3084

SEQ ID NO: 5960 - protein, 432 aa, Escherichia coli; identical to SEQ ID NO: 2026

SEQ ID NO: 5961 - protein, 729 aa, Escherichia coli
MARSKTAQPKHSLRKIAVVVATAVSGMSVYAQAAVEPKEDTITVTAAPAPQESAWGPAATIAAKHSATATKTDTPIEKTPQSISVVTNEEMQMHQFQSVKEALGYTPGVTVSSRGASNTYDFVIIRGFSSVGLNQNNYLDGLKLQGNFYNDAVIDPYMLERVELMRGPTSVLYGKSNPGGIISMVSKRPTTEPLKEIQFKMGTDNLFQTGFDFSDALDDNGEFSYRLTGLARSTNEQQKNSESQRYTIAPSFSWRPDDKTNFTFLSYFQNEPETGYYGWLPKEGTVEPLPNGKRLPTDFNEGASNNTYSRNQKMVGYSFEHGFNDTFTVRQNLRFSEMKTSQKSVYGTGIANDGHTLNRGTVVDNERLQNFSVDTQLESKFATGEVEHTLLTGVDFMRMRNDINASFGSAPSIDLYNKYHPEYFAFGNAEPYQMNESKQTGIYVQDQAEWNKWVFTLGGRYDWSKQATTVRENSYTPTEGYIERNDHQFTWRGGVNYLFDNGISPYFSYSQSFEPSAFDLWSNPRVSYKPSKGEQYEAGVKYVPNDMPVVVTGAVYQLTKTNNLTADPTNPLAQVPAGEIRARGVELEAKAALNANINLTASYTYTDAEYTKDTNLKGKTPEQVPEHMASLWGDYTFNEGPLSGLTLGTGGRFIGSSYGDPANTFKVGSAAVMDAVVKYDLARFGMAGSSLAVNVNNLLDREYVASCFQTYGCFWGAERQVVATATFRF

SEQ ID NO: 5962 - protein, 252 aa, Escherichia coli; identical to SEQ ID NO: 3400

SEQ ID NO: 5963 - protein, 331 aa, Escherichia coli
MKKPVVIGLAVVVLAAVVAGGYWWYQSRQDNGLTLYGNVDIRTVNLSFRVGGRVESLAVDEGDAIKAGQVLGELDHKPYEIALMQAKAGVSVAQAQYDLILAGYRDEEIAQAAAAVKQAQAAYDYAQNFYNRQQGLWKSRTISANDLENARSSRDQAQATLKSAQDKLRQYRSGNREQDIAQAKASLEQAQAQLAQAELNLQDSTLIAPSDGTLLTRAVEPGTVLNEGGTVFTVSLTRPVWVRAYVDERNLDQAQPGRKVLLYTDGRPDKPYHGQIGFVSPTAEFTPKTVETPDLRTDLVYRLRIVVTDADDALRQGMPVTVQFGNEAGHE

SEQ ID NO: 5964 - protein, 146 aa, Escherichia coli
MVQLTVPTCKKLNGKKAEQWATGLKYDANNIYLAANYGETRNATPITNKFTNTSGFANKTQDVLLVAQYQFDFGLRPSIAYTKSKAKDVEGIGDVDLVNYFEVGATYYFNKNMSTYVDYIINQIDSDNKLGVGSDDTVAVGIVYQF

SEQ ID NO: 5965 - protein, 446 aa, Escherichia coli; identical to SEQ ID NO: 2176

SEQ ID NO: 5966 - protein, 774 aa, Escherichia coli
MTPLRVFRKTTPLVNAIRLSLLPLAGLSFSAFAAQVNIAPGSLDKALNQYAAHSGFTLSVDASLTRGKQSNGLHGDYDVESGLQQLLDGSGLQVKPLGNNSWTLEPAPAPKEDALTVVGDWLGDARENDVFEHAGARDVIRREDFAKTGATTMREVLNRIPGVSAPENNGTGSHDLAMNFGIRGLNPRLASRSTVLMDGIPVPFAPYGQPQLSLAPVSLGNMDAIDVVRGGGAVRYGPQSVGGVVNFVTRAIPQDFGIEAGVEGQLSPTSSQNNPKETHNLMVGGTADNGFGTALLYSGTRGSDWREHSATRIDDLMLKSKYAPDEVHTFNSLLQYYDGEADMPGGLSRADYDADRWQSTRPYDRFWGRRKLASLGYQFQPDSQHKFNIQGFYTQTLRSGYLEQGKRITLSPRNYWVRGIEPRYSQIFMIGPSAHEVGVGYRYLNESTHEMRYYTATSSGQLPSGSSPYDRDTRSGTEAHAWYLDDKIDIGNWTITPGMRFEHIESYQNNAITGTHEEVSYNAPLPALNVLYHLTDSWNLYANTEGSFGTVQYSQIGKAVQSGNVEPEKARTWELGTRYDDGALTAEMGLFLINFNNQYDSNQTNDTVTARGKTRHTGLETQARYDLGTLTPTLDNVSIYASYAYVNAEIREKGDTYGNLVPFSPKHKGTLGVDYKPGNWTFNLNSDFQSSQFADNANTVKESADGSTGRIPGFMLWGARVAYDFGPQMADLNLAFGVKNIFDQDYFIRSYNDNNKGIYAGQPRTLYMQGSLKF

SEQ ID NO: 5967 - protein, 230 aa, Escherichia coli; identical to SEQ ID NO: 3019

SEQ ID NO: 5968 - protein, 239 aa, Escherichia coli
MAAIPWRPFNLRGIKMKGLLSLLIFSMVLPAHAGIVIYGTRIIYPAENKEVMVQLMNQGNRSSLLQAWIDDGDTSLPPEKIQVPFMLTPPVAKIGANSGQQVKIKIMPNKLPTNKESIFYLNVLDIPPNSPEQEGKNALKSAMQNRIKLFYRPAGIAPVNKATFKKLLVNRSGNGLVIKNDSANWVTISDVKANNVKVNYETIMIAPLESQSVNVKSNNANNWYLTIIDDHGNYISDKI

SEQ ID NO: 5969 - protein, 554 aa, Escherichia coli
MALIPACIFLCFAALSVQAEETPVTPQPPDILLGPLFNDVQNAKLFPDQKTFADAVPNSDPLMILADYRMQQNQSGFDLRHFVNVNFTLPKEGEKYVPPEGQSLREHIDGLWPVLTRSTENTEKWDSLLPLPEPYVVPGGRFREVYYWDSYFTMLGLAESGHWDKVADMVANFAHEIDTYGHIPNGNRSYYLSRSQPPFFALMVELLAQHEGDAALKQYLPQMQKEYAYWMDGVENLQAGQQEKRVVKLQDGTLLNRYWDDRDTPRPESWVEDIATAKSNPNRPATEIYRDLRSAAASGWDFSSRWMDNPHQLNTLRTTSIVPVDLNSLMFKMEKILARASKAAGDNAMANQYETLANARQKGIEKYMWNDQQGWYADYDLKSYKVRNQLTAAALFPLYVNAAAKDRANKMATATKTHLLQPGGLNTTSVKSGQQWDAPNGWAPLQWVATEGLQNYGQKEVAMDISWHFLTNVQHTYDREKKLVEKYDVSTTGTGGGGGEYPLQDGFGWTNGVTLKMLDLICPKEQPCDNVPATRPTVKSATTQPSTKEAQPTP

SEQ ID NO: 5970 - protein, 208 aa, Escherichia coli; identical to SEQ ID NO: 1949

SEQ ID NO: 5971 - protein, 267 aa, Escherichia coli
MTLYTPAIVCISRQKNVKKQRAENMQKMKPALKKTLMAVACLSAVPAAQAAVSLDRTRAIFNGDEKSMTLNIANDNKQLPYLAQAWVENEKKEKITTGPIIATPPVQRLEPGSKSMVRLTSTPDISRLPQDRESLFYFSLREIPPKSDKANVLQIALQTKIKLFYRPESIKAKPNAVWQDQLVLNKTSGGYRIDNPTPYYVTVIGIGGSEKQAREGEFDAVMLAPKSTQMVKSGTYNTPYLSYINDYGGRPVLQFSCGGSRCTAVKK

SEQ ID NO: 5972 - protein, 255 aa, Escherichia coli
MKIRHLAALVGILAGLPASGVMAAGNQESTKTTSKVFSLHLGTTRVIYNLDSSGASLTVMNDLDYPMLVQSEVLAENQKDPAPFVVTPPLFRLDALQSSRLRIVRTGGGFPEDRESLQWLCVKGIPPKHDDRWAEEKGADKKKADKATLQVNLSVSSCVKLFVRPPAVKGRPEDAGGKVEWTKSGNKLKGNNPTPFYINISELSVGGKEVKEHRYISPYSSYEYEIPSGASGKVSWTVITDYGGKSKPFESELKS

SEQ ID NO: 5973 - protein, 431 aa, Escherichia coli; identical to SEQ ID NO: 3408

SEQ ID NO: 5974 - protein, 518 aa, Escherichia coli; identical to SEQ ID NO: 2349

SEQ ID NO: 5975 - protein, 700 aa, Escherichia coli
MKIFSVRQTVLPALLVLSPVVFAADEQTMIVSAAPQVVSELDTPAAVSVVDGEEMRLATPRINLSESLTSVPGLQVQNRQNYAQDLQLSIRGFGSRSTYGIRGIRLYVDGIPATMPDGQGQTSNIDLSSVQNVEVLRGPFSALYGNASGGVMNVTTQTGQQPPTIEASSYYGSFGSWRYGLKATGATGDGTQPGDVDYTVSTTRFTTHGYRDHSGAQKNLANAKLGVRIDEASKLSLIFNSVDIKADDPGGLTKAEWKANPQQAPRAEQYDTRKTIKQTQAGLRYERSLSAQDDMSVMMYAGERETTQYQSIPMAPQLNPSHAGGVITLQRHYQGIDSRWTHRGELGVPVTFTTGLNYENMSENRKGYNNFRLNSGMPEYGQKGELRRDERNLMWNIDPYLQTQWQLSEKLSLDAGVRYSSVWFDSNDHYVTPGNGDDSGDASYHKWLPAGSLKYAMTDAWNIYLAAGRGFETPTINELSYRADGQSGMNLGLKPSTNDTIEIGSKTRIGDGLLSLALFQTDTDDEIVVDSSSGGRTTYKNAGKTRRQGAELAWDQRFAGDFRVNASWTWLDATYRSNVCNEQDCNGNRMPGIARNMGFASIGYVPEDGWYAGTEARYMGDIMADDENTAKAPSYTLVGLFTGYKYNYHNLTVDLFGRVDNLFDKEYVGSVIVNESNGRYYEPSPGRNYGVGMNIAWRFE

SEQ ID NO: 5976 - protein, 567 aa, Escherichia coli; identical to SEQ ID NO: 3518

SEQ ID NO: 5977 - protein, 241 aa, Escherichia coli; identical to SEQ ID NO: 3582

SEQ ID NO: 5978 - protein, 512 aa, Escherichia coli; identical to SEQ ID NO: 2813

SEQ ID NO: 5979 - protein, 760 aa, Escherichia coli
RTPIHLDLQWVLIDNQTAVCLTPEQLTLLGFTDEIIEVAQQNLIDGCYPIEKEKQITTYLDKGKMQLSISAPQAWLKYKDANWTPPELWDHGIAGAFLDYNLYASHYAPHQGDNSQNISSYGQAGVNLGAWRLRTDYQYDQSFNNGKSQANNLDFPRIYLFRPIPAINAKLTIGQYDTESSIFDSFHFSGVSLKSDENMLPPDLRGYAPQITGVAQTNAKVTVSQNNRIIYQENVPPGPFAITNLFNTLQGQLDVKVEEEDGQVTQWQVASNSIPYLTRKGQIRYTTAMGKPTSVGGDSLQQPFFWTGEFSWGWLNNVSLYGGSVLTNRDYQSLAAGVGFNLNSLGSLSFDVTRSDAQLHNQDKETGYSYRANYSKRFESTGSQLTFAGYRFSDKNFVTMNEYINDTNHYTNYQNEKESYIVTFNQYLESLRLNTYVSLARNTYWDASSNVNYSLSLSRDFDIGPLKNVSTSLTFSRINWEEDNQDQLYLNISIPWGTSRTLSYGMQRNQDNKISHTASWYDSSDRNNSWSVSASGDNDEFKDMKASLRASYQHNTENGRLYLSGTSQRDSYYSLNASWNGSFTATRHGAAFHDYSGSADSRFMIDADGAEDIPLNNKRAVTNRYGIGVIPSVSSYITTSLSVDTRNLPENVDIENSVITTTLTEGAIGYAKLDTRKGYQIMGVIRLADGSHPPLGISVKDKTSHKELGLVADGGFVYLNGIQDDSKLTLRWGDKSCFIQPPNSSNLTTGTVILPCISQN

SEQ ID NO: 5980 - protein, 760 aa, Escherichia coli
MENNRNFPARQFHSLTFFAGLCIGITPVAQALAAEGQTNADDTLVVEASTPSLYAPQQSADPKFSRPVADTTRTMTVISEQVIKDQGATNLTDALKNVPGVGAFFAGENGNSTTGDAIYMRGADTSNSIYIDGIRDIGSVSRDTFNTEQVEVIKGPSGTDYGRSAPTGSINMISKQPRNDSGIDASASIGSAWFRRGTLDVNQVIGDTTAVRLNVMGEKTHDAGRDKVKNERYGVAPSIAFGLGTANRLYLNYLHVTQHNTPDGGIPTIGLPGYSAPSAGTAALNHSGKVDTHNFYGTDSDYDDSTTDTATMRFEHDINDNTTIRNTTRWSRVKQDYLMTAIMGGASNITQPTSDVNSWTWSRTANTKDVSNKILTNQTNLTSTFYTGSIGHDVTTGVEFTRETQTNYGVNPVTLPAVNIYHPDSSIHPGGLTRNGANANGQTDTFAIYAFDTLQITRDFELNGGIRLDNYHTEYDSATACGGSGRGAITCPTGVAKGSPVTTVDTAKSGNLVNWKAGALYHLTENGNVYINYAVSQQPPGGNNFALAQSGSGNSANRTDFKPQKANTSEIGTKWQVLDKRLLLTAALFRTDIENEVEQNDDGTYSQYGKKRVEGYEISVAGNITPAWQVIGGYTQQKATIKNGKDVAQDGSSSLPYTPEHAFTLWSQYQATDDISVGAGARYIGSMHKGSDGAVGTPAFTEGYWVADAKLGYRVNRNLDFQLNVYNLFDTDYVASINKSGYRYHPGEPRTFLLTANMHF

SEQ ID NO: 5981 - protein, 368 aa, Escherichia coli; identical to SEQ ID NO: 3872

SEQ ID NO: 5982 - protein, 746 aa, Escherichia coli; identical to SEQ ID NO: 2949

SEQ ID NO: 5983 - protein, 209 aa, Escherichia coli; identical to SEQ ID NO: 3547

SEQ ID NO: 5984 - protein, 366 aa, Escherichia coli; identical to SEQ ID NO: 3520

SEQ ID NO: 5985 - protein, 229 aa, Escherichia coli; identical to SEQ ID NO: 3589

SEQ ID NO: 5986 - protein, 187 aa, Escherichia coli
MNQSKNASLIQAWIDDGNTTIAPEKIQVTFILTPPVSRVAGGSGQQLKIRKMPNNLPHNKESLFYLNVLDIPPNNPQNAGKNKIKLALQNRIKLLWRPSGIAPVDKKSLSQLNIKKKNNAISINNETANWITVTTIKAQNVKVNNESILLPPFSHNDITLKNNHASEYELTVVDDYGNNIHSKIAAR

SEQ ID NO: 5987 - protein, 203 aa, Escherichia coli; identical to SEQ ID NO: 2201

SEQ ID NO: 5988 - protein, 840 aa, Escherichia coli; identical to SEQ ID NO: 3591

SEQ ID NO: 5989 - protein, 236 aa, Escherichia coli; identical to SEQ ID NO: 3970

SEQ ID NO: 5990 - protein, 329 aa, Escherichia coli
GGDETQKKWEWSRYYAWRALPSLKAKLALGEDYLRSDIFDGFNYVGGSVSTDDQMLPPNLRGYAPDISGVAHTTAKVTVSQMGRVIYETQVPAGPFRIQDLGDSVSGTLHIRIEEQNGQVQEYDISTASMPYLTRPGQVRYKIMMGRPQEWGHHVEGEFFSGAEASWGIANGWSLYGGALGDENYQSAALGVGRDLSTFGAVAFDVTHSHTKLDKDTAYGKGSLDGNSFRVSYSKDFDQLNSRVTFAGYRFSEENFMTMSEYLDASDSGMVRTGNDKEMYTATYNQNFRDAGVSVYLNYTRHTYWDREEQTNYNIMLSHYFNMGSIRNV

SEQ ID NO: 5991 - protein, 669 aa, Escherichia coli; identical to SEQ ID NO: 3677

SEQ ID NO: 5992 - protein, 446 aa, Escherichia coli; identical to SEQ ID NO: 2180

SEQ ID NO: 5993 - protein, 118 aa, Escherichia coli [sequence omitted]

SEQ ID NO: 5994 - protein, 700 aa, Escherichia coli; identical to SEQ ID NO: 2926

SEQ ID NO: 5995 - protein, 860 aa, Escherichia coli; identical to SEQ ID NO: 3544

SEQ ID NO: 5996 - protein, 713 aa, Escherichia coli
MAKFTPSFSGIKGRALFSLLFAAPMIHATDTATTKDGETITVTADANTATEATDGYQPLSTSTATLTDMPMLDIPQVVNTVSDQVLENQNATTLDEALYNVSNVVQTNTLGGTQDAFVRRGFGANRDGSIMTNGLRTVLPRSFNAATERVEVLKGPASTLYGILDPGGLINVVTKRPEKTFHGSVSATSSSFGGGTGQLDITGPIEGTQLAYRLTGEVQDEDYWRNFGKERSTFIAPSLTWFGDNATVTMLYSHRDYKTPFDRGTIFDLTTKQPVNVDRKIRFDEPFNITDGQSDLAQLNAEYHLNSQWTARFDYSYSQDKYSDNQARVTAYDATTGTLTRRVDATQGSTQRMHSTRADLQGNVDIAGFYNEILGGVSYEYYDLLRTDMIRCKNAKDFNIYNPVYGNTSKCTTVSASDSDQTIKQESYSAYAQDALYLTDNWIAVAGIRYQYYTQYAGKGRPFNVNTDSRDEQWTPKLGLVYKLTPSVSLFANYSQTFMPQSSIASYIGDLPPESSNAYEVGAKFELFDGITADIALFDIHKRNVLYTESIGDETIAKTAGRVRSRGVEVDLAGALTENINIIASYGYTDAKVLEDPDYAGKPLPNVPRHTGSLFLTYDIHNMPGNNTLTFGGGGHCVSRRSATNGADYYLPGYFVADAFAAYKMKLQYPVTLQLNVKNLFDKTYYTSSIATNNLGNQIGDPREVQFTVKMEF

SEQ ID NO: 5997 - protein, 241 aa, Escherichia coli; identical to SEQ ID NO: 3582

SEQ ID NO: 5998 - protein, 223 aa, Escherichia coli
MMLIIFYLIISASVHAAGGIALGATRIIYPADAKQTAVWIRNSHTNERFLVNSWIENSSGVKEKSFIITPPLFVSEPKSENTLRIIYTGPPLAADRESLFWMNVKTIPSVDKNALNGRNVLQLAILSRMKLFLRPIQLQELPAEAPDTLKFSRSGNYINVHNPSPFYVTLVNLQVGSQKLGNAMAAPRVNSQIPLPSGVQGKLKFQTVNDYGSVTPVREVNLN

SEQ ID NO: 5999 - protein, 998 aa, Escherichia coli; identical to SEQ ID NO: 2918

SEQ ID NO: 6000 - protein, 252 aa, Escherichia coli; identical to SEQ ID NO: 3543

SEQ ID NO: 6001 - protein, 432 aa, Escherichia coli; identical to SEQ ID NO: 2026

SEQ ID NO: 6002 - protein, 108 aa, Escherichia coli; identical to SEQ ID NO: 3602

SEQ ID NO: 6003 - protein, 203 aa, Escherichia coli; identical to SEQ ID NO: 2009

SEQ ID NO: 6004 - protein, 170 aa, Escherichia coli; identical to SEQ ID NO: 2565

SEQ ID NO: 6005 - protein, 161 aa, Escherichia coli; identical to SEQ ID NO: 2582

SEQ ID NO: 6006 - protein, 774 aa, Escherichia coli
MTPLRVFRKTTPLVNAIRLSLLPLASLSFSAFAAQVNIAPGSLDKALNQYAAHSGITLSVDASLTRGKQSNGLHGDYDVESGLQQLLDGSGLQVKPLGNNSWTLEPAPAPKEDALTVVGDWLGDARENDVFEHAGARDVIRSEDFAKTGATTMREVLNRIPGVSAPENNGTGSHDLAMNFGIRGLNPRLASRSTVLMDGIPVPFAPYGQPQLSLAPVSLGNMDAIDVVRGGGSVRYGPQSVGGVVNFVTRAIPQNFGIEAGVEGQLSPTSSQNNPKETHNLMVGGTADNGFGTALLYSGTRGSDWREHSATRIDDLMLKSKYAPDEVHTFNSLLQYYDGEADMPGGLSRADYDADRWQSTRPYDRFWGRRKLASLGYQFQPDSQHKFNIQGFYTQTLRSGYLEQGKRITLSPRNYWVRGIEPRYSQIFMIGPSAHEVGVGYRYVNESTHEMRYYTATSSGQLPSGSSPYDRDTRSGTEAHAWYLDDKIDIGNWTITPGMRFEHIESYQNNAITGSHEEVSYNAPLPALNVLYHLTDSWNLYANTEGSFGTVQYSQIGKAVQSGNVEPEKARTWELGTRYDDGALTAEMGLFLINFNNQYDSNQTNDTVTARGKTRHTGLETQARYDLGTLTPTLDNVSIYASYAYVNAEIREKGDTYGNLVPFSPKHKGTLGVDYKPGNWTFNLNSDFQSSQFADNANTVKESADGSTGRIPGFMLWGARVAYDFGPQMADLNLAFGVKNIFNQDYFIRSYDDNNKGIYAGQPRTLYMQGSLKF

SEQ ID NO: 6007 - protein, 324 aa, Escherichia coli; identical to SEQ ID NO: 3579

SEQ ID NO: 6008 - protein, 656 aa, Escherichia coli; identical to SEQ ID NO: 4901

SEQ ID NO: 6009 - protein, 678 aa, Escherichia coli; identical to SEQ ID NO: 2902

SEQ ID NO: 6010 - protein, 713 aa, Escherichia coli; identical to SEQ ID NO: 3523

SEQ ID NO: 6011 - protein, 840 aa, Escherichia coli; identical to SEQ ID NO: 3591

SEQ ID NO: 6012 - protein, 361 aa, Escherichia coli; identical to SEQ ID NO: 3601

SEQ ID NO: 6013 - protein, 246 aa, Escherichia coli; identical to SEQ ID NO: 3021

SEQ ID NO: 6014 - protein, 219 aa, Escherichia coli
MSFFILPVHAGVVIYGTRIIYPEKNREVLVQLMNQSKNASLIQAWIDDGNTTIAPEKIQVTFILTPPVSRVAGGSGQQLKIRKMPNNLPHNKESLFYLNVLDIPPNNPQNAGKNKIKLALQNRIKLLWRPSGIAPVDKKSLSQLNIKKKNNAISINNETANWITVTTIKAQNVKVNNESILLPPFSHNDITLKNNHASEYELTVVDDYGNNIHSKIAAR

SEQ ID NO: 6015 - protein, 998 aa, Escherichia coli; identical to SEQ ID NO: 3056

SEQ ID NO: 6016 - protein, 663 aa, Escherichia coli; identical to SEQ ID NO: 3453

SEQ ID NO: 6017 - protein, 266 aa, Escherichia coli; identical to SEQ ID NO: 1892

SEQ ID NO: 6018 - protein, 170 aa, Escherichia coli; identical to SEQ ID NO: 2565

SEQ ID NO: 6019 - protein, 432 aa, Escherichia coli; identical to SEQ ID NO: 2026

SEQ ID NO: 6020 - protein, 102 aa, Escherichia coli; identical to SEQ ID NO: 1825

SEQ ID NO: 6021 - protein, 747 aa, Escherichia coli; identical to SEQ ID NO: 2072

SEQ ID NO: 6022 - protein, 729 aa, Escherichia coli; identical to SEQ ID NO: 2948

SEQ ID NO: 6023 - protein, 650 aa, Escherichia coli; identical to SEQ ID NO: 3057

SEQ ID NO: 6024 - protein, 232 aa, Escherichia coli; identical to SEQ ID NO: 2087

SEQ ID NO: 6025 - protein, 252 aa, Escherichia coli; identical to SEQ ID NO: 3543

SEQ ID NO: 6026 - protein, 162 aa, Escherichia coli; identical to SEQ ID NO: 1965

SEQ ID NO: 6027 - protein, 338 aa, Escherichia coli
TNTGGAIDGVSATDRSPYSKAEIFSLFAENNMELTDSTIVTPGLRFDHHSIVGNNWSPALNISQGLGDDFTLKMGIARAYKAPSLYQTNPNYILYSKGQGCYASAGGCYLQGNDDLKAETSINKEIGLEFKRDGWLAGVTWFRNDYRNKIEAGYVAVGQNAVGTDLYQWDNVPKAVVEGLEGSLNVPVSETVMWTNNITYMLKSENKTTGDRLSIIPEYTLNSTLSWQAREDLSMQTTFTWYGKQQPKKYNYKGQPAVGPETKEISPYSIVGLSATWDVTKNVSLTGGVDNLFDKRLWRAGNAQTTGDLAGANYIAGAGAYTYNEPGRTWYMSVNTHF

SEQ ID NO: 6028 - protein, 89 aa, Escherichia coli; identical to SEQ ID NO: 2833

SEQ ID NO: 6029 - protein, 430 aa, Escherichia coli; identical to SEQ ID NO: 2617

SEQ ID NO: 6030 - protein, 224 aa, Escherichia coli
MIFTLLCSFCIGQALAGGIVLQRTRVIYDASRKEAALPVANKGAETPYLLQSWVDNIDGTSRAPFIITPPLIRLEAGDDSSLRIIKTADNLPENKESLFYINVRAIPAKKKSDDVNANELTLVFKTRIKMFYRPAHLKGRVSDAWKSLEFKRSDHSLNIYNPTEYYVVFAGLAVDKADLTSKIEYIAPGEHKQLPLPASGGKNVKWAAINDYGGSSGTETRPLQ

SEQ ID NO: 6031 - protein, 869 aa, Escherichia coli; identical to SEQ ID NO: 2903

SEQ ID NO: 6032 - protein, 170 aa, Escherichia coli [sequence omitted]

SEQ ID NO: 6033 - protein, 784 aa, Escherichia coli; identical to SEQ ID NO: 2244

SEQ ID NO: 6034 - protein, 138 aa, Escherichia coli
LAYLGNGDRAETYTGGLKYDANNIYLAAQYTQTYNATRVGSLGWANKAQNFEAVAQYQFDFGLRPSVAYLQSKGKNLGRNYDDEDILKYVDVGATYYFNKNMSTYVDYKINLLDDNQFTRDAGINTDNIVALGLVYQF

SEQ ID NO: 6035 - protein, 169 aa, Escherichia coli
WAGGEVSTVPAPLLAAPPLILLKPGTTGTLRLLRTESDILPVDRETLFELSIASVPSGKVENQSVKVAMRSVFKLFWRPEGLPGDPLEAYQQLRWTRNSQGVQLTNPTPYYINLIQVSVNGKALSNAGVVPPKSQRQTSWCQAIAPCHVAWRAINDYGGLSAKKEQNLP

SEQ ID NO: 6036 - protein, 539 aa, Escherichia coli; identical to SEQ ID NO: 3050

SEQ ID NO: 6037 - protein, 89 aa, Escherichia coli; identical to SEQ ID NO: 2810

SEQ ID NO: 6038 - protein, 233 aa, Escherichia coli; identical to SEQ ID NO: 3276

SEQ ID NO: 6039 - protein, 871 aa, Escherichia coli; identical to SEQ ID NO: 3519

SEQ ID NO: 6040 - protein, 869 aa, Escherichia coli; identical to SEQ ID NO: 2903

SEQ ID NO: 6041 - protein, 274 aa, Escherichia coli; identical to SEQ ID NO: 2304

SEQ ID NO: 6042 - protein, 224 aa, Escherichia coli; identical to SEQ ID NO: 3578

SEQ ID NO: 6043 - protein, 656 aa, Escherichia coli; identical to SEQ ID NO: 4901

SEQ ID NO: 6044 - protein, 162 aa, Escherichia coli; identical to SEQ ID NO: 1969

SEQ ID NO: 6045 - protein, 760 aa, Escherichia coli; identical to SEQ ID NO: 2078

SEQ ID NO: 6046 - protein, 660 aa, Escherichia coli; identical to SEQ ID NO: 4092

SEQ ID NO: 6047 - protein, 359 aa, Escherichia coli; identical to SEQ ID NO: 2332

SEQ ID NO: 6048 - protein, 241 aa, Escherichia coli; identical to SEQ ID NO: 2887

SEQ ID NO: 6049 - protein, 118 aa, Escherichia coli [sequence omitted]

SEQ ID NO: 6050 - protein, 111 aa, Escherichia coli; identical to SEQ ID NO: 2911

SEQ ID NO: 6051 - protein, 232 aa, Escherichia coli; identical to SEQ ID NO: 2087

SEQ ID NO: 6052 - protein, 406 aa, Escherichia coli
MITLRKLPLAVAVAAGVMSAQAMAVDFHGYARSGIGWTGSGGEQQCFQTTGAQSKYRLGNECETYAELKLGQEVWKEGDKSFYFDTNVAYSVAQQNDWEATDPAFREANVQGKNLIEWLPGSTIWAGKRFYQRHDVHMIDFYYWDISGPGAGLENIDVGFGKLSLAATRSSEAGGSSSFASNNIYDYTNETANDVFDVRLAQMEINPGGTLELGVDYGRANLRDNYRLVDGASKDGWLFTAEHTQSVLKGFNKFVVQYATDSMTSQGKGLSQGSGVAFDNEKFAYNINNNGHMLRILDHGAISMGDNWDMMYVGMYQDINWDNDNGTKWWTVGIRPMYKWTPIMSTVMEIGYDNVESQRTGDKNNQYKITLAQQWQAGDSIWSRPAIRVFATYAKWDEKWGYDYNG

SEQ ID NO: 6053 - protein, 368 aa, Escherichia coli; identical to SEQ ID NO: 2370

SEQ ID NO: 6054 - protein, 208 aa, Escherichia coli; identical to SEQ ID NO: 1949

SEQ ID NO: 6055 - protein, 330 aa, Escherichia coli
MASENPDEAGRYSMDVEYGQYSVILLVEGFPPSHAGTITVYEDSQPGTLNDFLGAMSEDDVRPEALRRFELMVEEAARHAEEAKKNAGEAETSARNAGISASQAEESAANADTSAGDASESARQAAESAAAAKQSEEASSSSASAAAQKASESSQSAAEAELSRKTAESAAGNAARDATTATEKARESAGSAQSAEQSRIAAEEAVNRIPTVVGPPGPKGEPGPAGPQGPKGDKGERGDTGPVGATGERGPAGDAGPAGPQGPKGDRGERGETGLTGNAGPQGPKGDTGAAGPAGPQGPKGETGAAGPVGATGPQGPKGDPGETQIRFRL

SEQ ID NO: 6056 - protein, 203 aa, Escherichia coli; identical to SEQ ID NO: 2009

SEQ ID NO: 6057 - protein, 518 aa, Escherichia coli; identical to SEQ ID NO: 2351

SEQ ID NO: 6058 - protein, 838 aa, Escherichia coli
MPQRHHQGHKRTPKQLALIIKRCLPMVLTGSGMLCTTANAEEYYFDPIMLETTKSGMQTTDLSRFSKKYAQLPGTYQVDIWLNKKKVSQKKITFTANAEQLLQPQFTVEQLRELGIKVDEIPALAEKDDDSVINSLEQIIPGTAAEFDFNHQRLNLSIPQIALYRDARGYVSPSRWDDGIPTLFTNYSFTGSDNRYRQGNRSQRQYLNMQNGANFGPWRLRNYSTWTRNDQASSWNTISSYLQRDIKALKSQLLLGESATSGSIFSSYNFTGVQLASDDNMLPNSQRGFAPTVRGIANSSAIVTIRQNGYVIYQSNVPAGAFEINDLYPSSNSGDLEVTIEESDGTQRRFIQPYSSLPMMQRPGHLKYSATAGRYRADANSDSKEPEFAEATAIYGLNNTFTLYGGLLGSEDYYALGIGIGGTLGALGALSMDINRADTQFDNQHSFHGYQWRTQYIKDIPETNTNIAVSYYRYTNDGYFSFDEANTRNWDYNSRQKSEIQFNISQTIFDGVSLYASGSQQDYWGNNEKNRNISVGVSGQQWGIGYSLNYQYSRYTDQNNDRALSLNLSIPLEHWLPRSRVSYQMTSQKDRPTQHEMRLDGSLLDDGRLSYSLEQSLDDDNNHNSSVNASYRSPYGTFSAGYSYGNDSSQYNYGVTGGVVIHPHGVTLSQYLGNAFALIDANGASGVRIQNYPGIATDPFGYAVVPYLTTYQENRLSVDTTQLPDNVDLEQTTQFVVPNRGAMVAARFNANIGYRVLVTVSDRNGKPLPFGALASNDDTGQQSIVDEGGILYLSGISSKSQSWTVRWGNQADQQCQFAFSTPDSEPTTSVLQGTAQCH

SEQ ID NO: 6059 - protein, 274 aa, Escherichia coli; identical to SEQ ID NO: 2300

SEQ ID NO: 6060 - protein, 351 aa, Escherichia coli; identical to SEQ ID NO: 2872

SEQ ID NO: 6061 - protein, 118 aa, Escherichia coli [sequence omitted]

SEQ ID NO: 6062 - protein, 798 aa, Escherichia coli
MDLWRNDEFIGSQDIVFESTTENTGDKSGGLMPCFNQVLLERIGLNSSAFPELAQQQNNKCINLLKAVPDATINFDFAAMRLNITIPQITLLSSAHGYIPPEEWDEGIPALLLNYNFTGNRGNGNDSYFFSELSGINIGPWRLRNNGSWNYFRGNGYHSEQWNNIGTWVQRAIIPLKSELVMGDGNTGSDIFDGVGFRGVRLYSSDNMYPDSQQGFAPTVRGIARTAAQLTIRQNGFIIYQSYVSPGAFEITDLHPTSSNGDLDVTIDERDGNQQNYTIPYSTVPILQREGRFKFDLTAGDFRSGNSQQSSPFFFQGTALGGLPQEFTAYGGTQLSANYTAFLLGLGRNLGNWGAVSLDVTHARSQLADDSRHEGDSIRFLYAKSMNTFGTNFQLMGYRYSTQGFYTLDDVAYRRMEGYEYDYDGEHRDEPIIVNYHNLRFSRKDRLQLNISQSLNDFGSLYISGTHQKYWNTSDSDTWYQVGYTSSWVGISYSLSFSWNESVGIPDNERIVGLNVSVPFNVLTKRRYTRENALDRAYASFNANRNSNGQNSWLAGVGGTLLEGHNLSYHVSQGDTSNNGYTGSATANWQATYGTLGVGYNYDRDQHDVNWQLSGGVVGHENGITLSQPLGDTNVLIKAPGAGGVRIENQTGILTDWRGYAVMPYATVYRYNRIALDTNTMGNSIDVEKNISSVVPTQGALVRANFDTRIGVRALITVTQGGKPVPFGSLVRENSTGITSMVGDDGQVYLSGAPLSGELLVQWGDGANSRCIAHYVLPKQSLQQAVTVISAVCTHPGS

SEQ ID NO: 6063 - protein, 856 aa, Escherichia coli; identical to SEQ ID NO: 3551

SEQ ID NO: 6064 - protein, 193 aa, Escherichia coli; identical to SEQ ID NO: 2250

SEQ ID NO: 6065 - protein, 367 aa, Escherichia coli; identical to SEQ ID NO: 2431

SEQ ID NO: 6066 - protein, 366 aa, Escherichia coli
MKLKIVAVVVTGLLAANVAHAAEVYNKDGNKLDLYGKVTALRYFTDDKRDDGDKTYARLGFKGETQINDQMIGFGHWEYDFKGYNDEANGSRDNKTRLAYAGLKISEFGSLDYGRNYGVGYDIGSWTDMLPEFGGDTWSQKDVFMTYRTTGVATYRNYDFFGLIEGLNFAAQYQGKNERTDNSHLYGADYTRANGDGFGISSTYVYDGFGIGAVYTKSDRTNAQERAAANPLNASGKNAELWATGIKYDANNIYFAANYAETLNMTTYGDGYISNKAQNFEVVAQYQFDFGLRPSLAYLKSKGIDLGRYGDQDMIEYIDVGATYFFNKNMSTYVDYKINLIDESDFTRAVDIRTDNIVATGITYQF

SEQ ID NO: 6067 - protein, 478 aa, Escherichia coli; identical to SEQ ID NO: 2404

SEQ ID NO: 6068 - protein, 331 aa, Escherichia coli; identical to SEQ ID NO: 2705

SEQ ID NO: 6069 - protein, 826 aa, Escherichia coli; identical to SEQ ID NO: 3563

SEQ ID NO: 6070 - protein, 412 aa, Escherichia coli; identical to SEQ ID NO: 3323

SEQ ID NO: 6071 - protein, 191 aa, Escherichia coli; identical to SEQ ID NO: 2727

SEQ ID NO: 6072 - protein, 203 aa, Escherichia coli; identical to SEQ ID NO: 2201

SEQ ID NO: 6073 - protein, 370 aa, Escherichia coli; identical to SEQ ID NO: 3599

SEQ ID NO: 6074 - protein, 191 aa, Escherichia coli; identical to SEQ ID NO: 2727

SEQ ID NO: 6075 - protein, 203 aa, Escherichia coli; identical to SEQ ID NO: 2009

SEQ ID NO: 6076 - protein, 478 aa, Escherichia coli; identical to SEQ ID NO: 2404

SEQ ID NO: 6077 - protein, 826 aa, Escherichia coli; identical to SEQ ID NO: 3563

SEQ ID NO: 6078 - protein, 230 aa, Escherichia coli
MMTKIKLLMLIIFYLIISASAHAAGGIALGATRIIYPADAQQTAVWIRNSHTNERFLVNSWIENSSGVKEKSFIITPPLFVSEPKSENTLRIIYTGPPLAADRESLFWMNVKTIPSVDKNALNGRNVLQLAILSRMKLFLRPIQLQELPAEAPDTLKFSRSGNYINVHNPSPFYVTLVNLQVGSQKLGNAMAAPRVNSQIPLPSGVQGKLKFQTVNDYGSVTPVREVNLN

SEQ ID NO: 6079 - protein, 359 aa, Escherichia coli; identical to SEQ ID NO: 2328

SEQ ID NO: 6080 - protein, 478 aa, Escherichia coli; identical to SEQ ID NO: 2404

SEQ ID NO: 6081 - protein, 243 aa, Escherichia coli
MSRKSCLIRLFKTTVSCKLFTAIILSVFLGQPALTYAGVVIGGTRVVYLSNNADKSISVFSKEEKIPYLIQAWVDPFNKEDKSKAPFTVIPPVSRLEPAQEKILRIIHTKGVSLPDDRESVFWLNIKNIPPSASNKATNSLEIAVKTRIKLFWRPANIRLIPEDAAPKVKWRREGRNLIAENPNPIHISVMDVIVDGHDVPLNMIRPFETLTLPLPANSAGGQMTWRFINDYGAVSDPIKMTL

SEQ ID NO: 6082 - protein, 863 aa, Escherichia coli; identical to SEQ ID NO: 3946

SEQ ID NO: 6083 - protein, 207 aa, Escherichia coli; identical to SEQ ID NO: 2211

SEQ ID NO: 6084 - protein, 629 aa, Escherichia coli
MTVTATGNARSSFEAPMMVSVIDTSAPENQTATSATDLLRHVPGITLDGTGRTNGQDVNMRGYDHRGVLVLVDGVRQGTDTGHLNGTFLDPALIKRVEIVRGPSALLYGSGALGGVISYDTVDAKDLLQEGQSSGFRVFGTGGTGDHSLGLGASAFGRTENLDGIVAWSSRDRGDLRQSNGETAPNDESINNMLAKGTWQIDSAQSLSGLVRYYNNDAREPKNPQTVGASESSNPMVDRSTIQRDAQLSYKLAPQGNDWLNADAKIYWSEVRINAQNTGSSGEYREQITKGARLENRSTLFADSFASHLLTYGGEYYRQEQHPGGATTGFPQAKIDFSSGWLQDEITLRDLPITLLGGTRYDSYRGSSDGYKDVDADKWSSRAGMTINPTNWLMLFGSYAQAFRAPTMGEMYNDSKHFSIGRFYTNYWVPNPNLRPETNETQEYGFGLRFDDLMLSNDALEFKASYFDTKAKDYISTTVDFAAATTMSYNVPNAKIWGWDVMTKYTTDLFSLDVAYNRTRGKDTDTGEYISSINPDTVTSTLNIPIAHSGFSVGWVGTFADRSTHISSSYSKQPGYGVNDFYVSYQGQQALKGMTTTLVLGNAFDKEYWSPQGIPQDGRNGKIFVSYQW

SEQ ID NO: 6085 - protein, 432 aa, Escherichia coli; identical to SEQ ID NO: 2026

SEQ ID NO: 6086 - protein, 274 aa, Escherichia coli; identical to SEQ ID NO: 2304

SEQ ID NO: 6087 - protein, 229 aa, Escherichia coli; identical to SEQ ID NO: 3589

SEQ ID NO: 6088 - protein, 600 aa, Escherichia coli
MLRMTPLASAIVALLLGIEAYAAEETFDTHFMIGGMKDQQVANIRLDDNQPLPGQYDIDIYVNKQWRGKYEIIVKDNPQETCLSIEVIKRLGINSDNFASGKQCLTFEQLVQGGSYTWDIGVFRLDFSVLQAWVEELESGYVPPENWERGINAFYTSYYVSQYYSDYKASGNSKSTYVRFNSGLNLLGWQLHSDASFSKTNNNPGVWKSNTLYLERGFAQLLGTLRVGDMYTSSDIFDSVRFSGVRLFRDMQMLPNSKQNFTPRVQGIAQSNALVTIEQNGFVVYQKEVPPGPFAITDLQLAGGGADLDVSVKEADGSVTTYLVPYAAVPNMLQPGVSKYDFAAGRSHIEGASKQSDFVQAGYQYGFNNLLTLYGGSMVANNYYAFTLGTGWNTRFGAISVDATKSHSKQDNGDVFDGQSYQIAYNKFVSQTSTRFGLAAWRYSSRDYRTFNDHVWANNKDNYRRDENDVYDIADYYQNDFGRKNSFSANMSQSLPEGWGSVSLSTLWRDYWGRSGSSKDYQLSYSNNWRRISYILAASQAYDENHHEEKRFNIFISIPFDWGDDVTTPRRQIYMSNSTTFDDQGFASNNTGLSGTVGSR

SEQ ID NO: 6089 - protein, 747 aa, Escherichia coli
MARSKTAQPKHSLRKIAVVVATAVSGMSVYAQAAVELKEDTITVTAAPAPQESAWGPAATIAARQSATGTKTDTPIQKVPQSISVVTAEEMALHQPKSVKEALSYTPGVSVGTRGASNTYDHLIIRGFAAEGQSQNNYLNGLKLQGNFYNDAVIDPYMLERAEIMRGPVSVLYGKSSPGGLLNMVSKRPTTEPLKEVQFKAGTDSLFQTGFDFSDALDDDGVYSYRLTGLARSANAQQKGSEEQRYAIAPAFTWRPDDKTNFTFLSYFQNEPETGYYGWLPKEGTVEPLPNGKRLPTDFNEGAKNNTYSRNEKMVGYSFDHEFNDTFTVRQNLRFAENKTSQNSVYGYGVCSDPANAYSKQCAALAPADKGHYLARKYVVDDEKLQNFSVDTQLQSKFATGDIDHTLLTGVDFMRMRNDINAWFGYDDSVPLLDLYNPVNTDFDFNAKDPANSGPYRILNKQKQTGVYVQDQAQWDKVLVTLGGRYDWADQESLNRVAGTTDKRDDKQFTWRGGVNYLFDNGVTPYFSYSESFEPSSQVGKDGNIFAPSKGKQYEVGVKYVPEDRPIVVTGAVYNLTKTNNLMADPEGSFFSVEGGEIRARGVEIEAKAALSASVNVVGSYTYTDAEYTTDTTYKGNTPAQVPKHMASLWADYTFFDGPLSGLTLGTGGRYTGSSYGDPANSFKVGSYTVVDALVRYDLARVGMAGSNVALHVNNLFDREYVASCFNTYGCFWGAERQVVATATFRF

SEQ ID NO: 6090 - protein, 760 aa, Escherichia coli; identical to SEQ ID NO: 2078

SEQ ID NO: 6091 - protein, 331 aa, Escherichia coli; identical to SEQ ID NO: 2705

SEQ ID NO: 6092 - protein, 810 aa, Escherichia coli
MPSFIGGLVVFVSAAFNAQAETWFDPAFFKDDPSMVADLSRFEKGQKITPGVYRVDIVLNQTIVDTRNVNFVEITPEKGIAACLTTESLDAMGVNTDAFPAFKQLDKQACVPLAEIIPDASVTFNVNKLRLEISVPQIAIKSNARGYVPPERWDEGINALLLGYSFSGANSIHSSADSDSGDSYFLNLNSGVNLGPWRLRNNSTWSRSSGQTAEWKNLSSYLQRAVIPLKGELTVGDDYTAGDFFDSVSFRGVQLASDDNMLPDSLKGFAPVVRGIAKSNAQITIKQNGYTIYQTYVSPGAFEISDLYSTSSSGDLLVEIKEADGSVNSYSVPFSSVPLLQRQGRIKYAVTLAKYRTNSNEQQESKFAQATLQWGGPWGTTWYGGGQYAEYYRAAMFGLGFNLGDFGAISFDVTQAKSTLADQSEHKGQSYRFLYAKTLNQLGTNFQLMGYRYSTSGFYTLSDTMYKHMDGYEFNDGDDEDTPMWSRYYNLFYTKRGKLQVNISQQLGEYGSFYLSGSQQTYWHTDQQDRLLQFGYNTQIKDLSLGVSWNYSKSRGQPDADQVFALNFSLPLNLLLPRSNDSYTRKKNYAWMTSNTSIDNEGHITQNLGLTETLLDDGNLSYSVQQGYNSEGKTANGSASMDYKGAFADARVGYNYSDNGSQQQLNYALSGSLVAHSQGITLGQSLGETNVLIAAPGAENTRVANSTGLKTDWRGYTVVPYATSYRENRIALDAASLKRNVDLENAVVNVVPTKGALVLAEFNAHAGARVLMKTSKQGIPLRFGAIATLDGIQTNSGIIDDDGSLYMSGL

SEQ ID NO: 6093 - protein, 224 aa, Escherichia coli
MKGLLSLLIFSMVLPAHAGIVIYGTRIIYPAENKEVMVQLMNQGNRSSLLQAWIDDGDTSLPPEKIQVPFMLTPPVAKIGANSGQQVKIKIMPNKLPTNKESIFYLNVLDIPPNSPEQEGKNALKFAMQNRIKLFYRPAGIAPVNKATFKKLLVNRSGNGLVIKNDSANWVTISDVKVNNVKVNYETIMIAPLESQSVNVKSNNANNWYLTIIDDHGNYISDKI

SEQ ID NO: 6094 - protein, 200 aa, Escherichia coli; identical to SEQ ID NO: 1784

SEQ ID NO: 6095 - protein, 570 aa, Escherichia coli
QLGSKLTLGETDFSSNIFDGFSYTGAALASDDRMLPWELRGYAPQISGIAQTNATVTISQSGRVIYQKKVPPGPFIIDDLNQSVQGTLDVKVTEEDGRVNNFQVSAASTPFLTRQGQVRYKLAAGQPRPSMSHQTENETFFSNEVSWGMLSNTSLYGGLLLSGDDYHSAAIGIGQNMLWLGALSFDVTWASSHFDTQQDERGLSYRFNYSKQVDATNSTISLAAYRFSDRHFHSYANYLDHKYNDSDAQDEKQTISLSVGQPITPLNLNLYANLLHQTWWNADASTTANITAGFNVDIGDWRDISISTSFNTTHYEDKDRDNQIYLSISLPFGNGGRVGYDMQNSSHSTTHRMSWNDTLDERNSWGMSAGLQSDRPDNGAQVSGNYQHLSSAGEWDISGTYAANDYSSVSSSWSGSFTATQYGAAFHRRSSTNEPRLMVSTDGVADIPVQGNLDYTNHFGIAVVPLISSYQPSTVAVNMNDLPDGVTVAENVIKETWIEGAIGYKSLASRSGKDVNVIIRNASGQFPPLGADIRQDDSGISVGMVGEEGHAWLSGVAENQKFTVVWGELT

SEQ ID NO: 6096 - protein, 336 aa, Escherichia coli
TGGAIDGVSATDRSPYSKAEIFSLFAENNMELTDSTIVTPGLRFDHHSIVGNNWSPALNISQGLGDDFTLKMGIARAYKAPSLYQTNPNYILYSKGQGCYASAGGCYLQGNDDLKAETSINKEIGLEFKRDGWLAGVTWFRNDYRNKIEAGYVAVGQNAVGTDLYQWDNVPKAVVEGLEGSLNVPVSETVMWTNNITYMLKSENKTTGDRLSIIPEYTLNSTLSWQAREDLSMQTTFTWYGKQQPKKYNYKGQPAVGPETKEISPYSIVGLSATWDVTKNVSLTGGVDNLFDKRLWRAGNAQTTGDLAGANYIAGAGAYTYNEPGRTWYMSVNTHF

SEQ ID NO: 6097 - protein, 351 aa, Escherichia coli
MKKSTLALVVMGIVASASVQAAEIYNKDGNKLDVYGKVKAMHYMSDNDSKDGDQSYIRFGFKGETQINDQLTGYGRWEAEFAGNKAESDTAQQKTRLAFAGLKYKDLGSFDYGRNLGALYDVEAWTDMFPEFGGDSSAQTDNFMTKRASGLATYRNTDFFGVIDGLNLTLQYQGKNENRDVKKQNGDGFGTSLTYDFGGSDFAISGAYTNSDRTNEQNLQSRGTGKRAEAWATGLKYDANNIYLATFYSETRKMTPITGGFANKTQNFEAVAQYQFDFGLRPSLGYVLSKGKDIEGIGGEDLVNYIDVGATYYFNKNMSAFVDYKINQLDSDNKLNINNDDIVAIGMTYQF

SEQ ID NO: 6098 - protein, 614 aa, Escherichia coli; identical to SEQ ID NO: 1884

SEQ ID NO: 6099 - protein, 266 aa, Escherichia coli; identical to SEQ ID NO: 1894

SEQ ID NO: 6100 - protein, 102 aa, Escherichia coli; identical to SEQ ID NO: 1836

SEQ ID NO: 6101 - protein, 362 aa, Escherichia coli; identical to SEQ ID NO: 2434

SEQ ID NO: 6102 - protein, 511 aa, Escherichia coli; identical to SEQ ID NO: 2457

SEQ ID NO: 6103 - protein, 203 aa, Escherichia coli; identical to SEQ ID NO: 2201

SEQ ID NO: 6104 - protein, 231 aa, Escherichia coli; identical to SEQ ID NO: 3055

SEQ ID NO: 6105 - protein, 838 aa, Escherichia coli
MPQRHHQGHKRTPKQLALIIKRCLPMVLTGSGMLCTTANAEEYYFDPIMLETTKSGMQTTDLSRFSKKYAQLPGTYQVDIWLNKKKVSQKKITFTANAEQLLQPQFTVEQLRELGIKVDEIPALAEKDDDSVINSLEQIIPGTAAEFDFNHQRLNLSIPQIALYRDAKGYVSPSRWDDGIPTLFTNYSFTGSDNRYRQGNRSQRQYLNMQNGANFGPWRLRNYSTWTRNDQASSWNTISSYLQRDIKALKSQLLLGESATSGSIFSSYTFTGVQLASDDNMLPNSQRGFAPTVRGIANSSAIVTIRQNGYVIYQSNVPAGAFEINDLYPSSNSGDLEVTIEESDGTQRRFIQPYSSLPMMQRPGHLKYSATAGRYRADANSDSKEPEFAEATAIYGLNNTFTLYGGLLGSEDYYALGIGIGGTLGALGALSMDINRADTQFDNRHSFHGYQWRTQYIKDIPETNTNIAVSYYRYTNDGYFSFDEANTRNWDYNSRQKSEIQFNISQTIFDGVSLYASGSQQDYWGNNDKNRNISVGVSGQQWGIGYSLNYQYSRYTDQNNDRALSLNLSIPLERWLPRSRVSYQMTSQKDRPTQHEMRLDGSLLDDGRLSYSLEQSLDDDNNHNSSLNASYRSPYGTFSAGYSYGNDSSQYNYGVTGGVVIHPHGVTLSQYLGNAFALIDANGASGVRIQNYPGIATDPFGYAVVPYLTTYQENRLSVDTTQLPDNVDLEQTTQFVVPNRGAMVAARFNANIGYRVLVTVSDRNGKPLPFGALASNDETGQQSIVDEGGILYLSGISSKSQSWTVRWGNQADQQCQFAFSTPDSEPTTSVLQGTAQCH

SEQ ID NO: 6106 - protein, 207 aa, Escherichia coli; identical to SEQ ID NO: 2211

SEQ ID NO: 6107 - protein, 551 aa, Escherichia coli; identical to SEQ ID NO: 2446

SEQ ID NO: 6108 - protein, 729 aa, Escherichia coli
MLSTQFNRDNQYQAITKPSLLAGCIALALLPSAAFAAPATEETVIVEGSATAPDDGENDYSVTSTSAGTKMQMTQRDIPQSVTIVSQQRMEDQQLQTLGEVMENTQGISKSQADSDRALYYSRGFQIDNYMVDGIPTYFESRWNLGDALSDMALFERVEVVRGATGLMTGTGNPSAAINMVRKHATSREFKGDVSAEYGSWNKERYVADLQSPLTEDGKIRARIVGGYQNNDSWLDRYNSEKTFFSGIVDADLGDLTTLSAGYEYQRIDVNSPTWGGLPRWNTDGSSNSYDRARSTAPDWAYNDKEINKVFMTLKQRFADTWQATLNATHSEVEFDSKMMYVDAYVNKADGMLVGPYSNYGPGFDYVGGTGWNSGKRKVDALDLFADGSYELFGRQHNLMFGGSYSKQNNRYFSSWANIFPDEIGSFYNFNGNFPQTDWSPQSLAQDDTTHMKSLYAATRVTLADPLHLILGARYTNWRVDTLTYSMEKNHTTPYAGLVFDINDNWSTYASYTSIFQPQNDRDSSGKYLAPITGNNYELGLKSDWMNSRLTTTLAIFRIEQDNVAQSTGTPIPGSNGETAYKAVDGTVSKGVEFELNGAITDNWQLTFGATRYIAEDNEGNAVNPNLPRTTVKMFTSYRLPVMPELTVGGGVNWQNRVYTDTVTPYGTFRAEQGSYALVDLFTRYQVTKNFSLQGNVNNLFDKTYDTNVEGSIVYGAPRNFSITGTYQF

SEQ ID NO: 6109 - protein, 213 aa, Escherichia coli; identical to SEQ ID NO: 2232

SEQ ID NO: 6110 - protein, 430 aa, Escherichia coli; identical to SEQ ID NO: 2617

SEQ ID NO: 6111 - protein, 700 aa, Escherichia coli; identical to SEQ ID NO: 3128

SEQ ID NO: 6112 - protein, 746 aa, Escherichia coli; identical to SEQ ID NO: 2949

SEQ ID NO: 6113 - protein, 209 aa, Escherichia coli
MKGLLSLLISSMIFPVHAGMVIFGTRIIYPAEQKEVMVQLMNQGNRSSLMQAWIDDGDTSLPPEKIQVPFMLTPPVVKVAANSGQQIKIKIMPNKLPSNKESIFYLNVLDIPPNSPEDEGKNALKFAMQNRIKLFYRPAGIAPVNKTTFKKLRVSRSGNNVVIKNDSPNWVTISDVKANNVKVNYETIMIAPQESQNVSEKIIMRMAGN

SEQ ID NO: 6114 - protein, 331 aa, Escherichia coli; identical to SEQ ID NO: 2705

SEQ ID NO: 6115 - protein, 162 aa, Escherichia coli; identical to SEQ ID NO: 1969

SEQ ID NO: 6116 - protein, 367 aa, Escherichia coli; identical to SEQ ID NO: 2431

SEQ ID NO: 6117 - protein, 241 aa, Escherichia coli; identical to SEQ ID NO: 2887

SEQ ID NO: 6118 - protein, 860 aa, Escherichia coli
MSGSYVNAWAENEIQFDSRFLELKGDTKIDLKRFSSQGYVEPGKYNLQVQLNKQPLTEEYDIYWYASENDASKTYACLTPELVAQFGLKEDVAKNLQWIHDGKCLKPGQLEGIDIKADLSQSALVISLPQAYLEYTDINWDPPSRWDDGISGLIADYSITAQTRHEENGGDDSNEISGNGTVGVNLGAWRLRADWQTDYLHSKSNDDDVINGDDTQKNWEWSRYYAWRALPSLKAKLGLGEDYLNSDIFDGFNYVGGSISTDDQMLPPNLRGYAPDISGVAHTTAKVTVSQLGRVIYETQVPAGPFRIQDLGDSVSGTLHIRIEEQNGQVQEYDINTASMPFLTRPGQVRYKLMMGRPQEWGHHVEGGFFSGGEASWGIANGWSLYGGALADEHYQSAALGVGRDLSVFGAVAFDITHSHTRLDKETAYGKGSLDGNSFRLSYSKDFDELNSRVTFAGYRFSEENFMTMSEYLDASDSEMVRTGNDKEMYTATYNQNFRDAGVSVYLNYTRHTYWDRDEQTNYNVMLSHYFNLGSIRNMSISMTGYRYEYDNQADKGVYISLSMPWGDSSTISYNGNYGSGSDSSQVGYFSRVDDATHYQLNVGTSDNHSSVDGYYSHDGSLAQVDLSANYHEGQYTSAGISLQGGATLTAQGGALHRTQNMGGTRLLIDADGVAGVPVEGNGAAVYTNMFGKAVVADVNNYYRNQAYIDLNNLPENAEATQSVVQGTLTEGAIGYRKFSVISGQKAMAVLRLQDGSYPPFGAEVKNDSAQNVGLVDDDGNVYLAGVKPGEHMIVSWGGVAHCDIHLPDPLPADLFNGLLLPCQQTGAISPSMPHEIKPVIQEQTQQVMPTEAPVSVSAN

SEQ ID NO: 6119 - protein, 361 aa, Escherichia coli; identical to SEQ ID NO: 3601

SEQ ID NO: 6120 - protein, 170 aa, Escherichia coli; identical to SEQ ID NO: 5004

SEQ ID NO: 6121 - protein, 627 aa, Escherichia coli; identical to SEQ ID NO: 3529

SEQ ID NO: 6122 - protein, 224 aa, Escherichia coli; identical to SEQ ID NO: 6030

SEQ ID NO: 6123 - protein, 700 aa, Escherichia coli; identical to SEQ ID NO: 2926

SEQ ID NO: 6124 - protein, 539 aa, Escherichia coli; identical to SEQ ID NO: 3050

SEQ ID NO: 6125 - protein, 816 aa, Escherichia coli; identical to SEQ ID NO: 4456

SEQ ID NO: 6126 - protein, 784 aa, Escherichia coli; identical to SEQ ID NO: 2240

SEQ ID NO: 6127 - protein, 386 aa, Escherichia coli; identical to SEQ ID NO: 3600

SEQ ID NO: 6128 - protein, 209 aa, Escherichia coli; identical to SEQ ID NO: 3547

SEQ ID NO: 6129 - protein, 233 aa, Escherichia coli; identical to SEQ ID NO: 3548

SEQ ID NO: 6130 - protein, 747 aa, Escherichia coli; identical to SEQ ID NO: 2954

SEQ ID NO: 6131 - protein, 266 aa, Escherichia coli; identical to SEQ ID NO: 1892

SEQ ID NO: 6132 - protein, 161 aa, Escherichia coli; identical to SEQ ID NO: 2582

SEQ ID NO: 6133 - protein, 232 aa, Escherichia coli; identical to SEQ ID NO: 2087

SEQ ID NO: 6134 - protein, 567 aa, Escherichia coli; identical to SEQ ID NO: 3518

SEQ ID NO: 6135 - protein, 351 aa, Escherichia coli
MKKSTLALVVMGIVASASVQAAEIYNKDGNKLDVYGKVKAMHYMSDNDSKDGDQSYIRFGFKGETQINDQLTGYGRWEAEFAGNKAESDTAQQKTRLAFAGLKYKDLGSFDYGRNLGALYDVEAWTDMFPEFGGDSSAQTDNFMTKRASGLATYRNTDFFGVIDGLNLTLQYQGKNENRDVKKQNGDGFGTSLTYDFGSSDFAISGAYTNSDRTNEQNLQSRGTGKRAEAWATGLKYDANNIYLATFYSETRKMTPITGGFANKTQNFEAVAQYQFDFGLRPSLGYVLSKGKDIEGIGDEDLVNYIDVGATYYFNKNMSAFVDYKINQLDSDNKLNINNDDIVAVGMTYQF

SEQ ID NO: 6136 - protein, 191 aa, Escherichia coli; identical to SEQ ID NO: 2996

SEQ ID NO: 6137 - protein, 838 aa, Escherichia coli; identical to SEQ ID NO: 2916

SEQ ID NO: 6138 - protein, 715 aa, Escherichia coli; identical to SEQ ID NO: 3971

SEQ ID NO: 6139 - protein, 89 aa, Escherichia coli; identical to SEQ ID NO: 2812

SEQ ID NO: 6140 - protein, 208 aa, Escherichia coli; identical to SEQ ID NO: 1949

SEQ ID NO: 6141 - protein, 236 aa, Escherichia coli; identical to SEQ ID NO: 3970

SEQ ID NO: 6142 - protein, 193 aa, Escherichia coli; identical to SEQ ID NO: 2250

SEQ ID NO: 6143 - protein, 224 aa, Escherichia coli; identical to SEQ ID NO: 3604

SEQ ID NO: 6144 - protein, 237 aa, Escherichia coli; identical to SEQ ID NO: 2816

SEQ ID NO: 6145 - protein, 243 aa, Escherichia coli; identical to SEQ ID NO: 3561

SEQ ID NO: 6146 - protein, 816 aa, Escherichia coli; identical to SEQ ID NO: 3562

SEQ ID NO: 6147 - protein, 430 aa, Escherichia coli; identical to SEQ ID NO: 2617

SEQ ID NO: 6148 - protein, 637 aa, Escherichia coli
MLAVDDDGETMVVTASSVEQNLKDAPASISVITQEDLQRKPVQNLKDVLKEVPGVQLTNEGDNRKGVSIRGLDSSYTLILVDGKRVNSRNAVFRHNDFDLNWIPVDSIERIEVVRGPMSSLYGSDALGGVVNIITKKIGQKWSGTVTVDTTIQEHRDRGDTYNGQFFTSGPLIDGVLGMKAYGSLAKREKDDPQNSTTTDTGETPRIEGFSSRDGNVEFAWTPNQNHDFTAGYGFDRQDRDSDSLDKNRLERQNYSVSHNGRWDYGTSELKYYGEKVENKNPGNSSPITSESNTVDGKYTLPLTAINQFLTVGGEWRHDKLSDAVNLTGGTSSKTSASQYALFVEDEWRIFEPLALTTGVRMDDHETYGEHWSPRAYLVYNATDTVTVKGGWATAFKAPSLLQLSPDWTSNSCRGACKIVGSPDLKPETSESWELGLYYMGEEGWLEGVESSVTVFRNDVKDRISISRTSDVNAAPGYQNFVGFTANGVPVFSYYNVNKARIQGVETELKIPFNDEWKLSLNYTYNDGRDVSNGENKPLSDLPFHTANGTLDWKPLALEDWSFYVSGHYTGQKRADSATAKTPGGYTIWNTGAAWQVTKDVKLRAGVLNLGDKDLSRDDYSYNEDGRRYFMAVDYRF

SEQ ID NO: 6149 - protein, 351 aa, Escherichia coli
MTERELSIIRALGEEFSTVLADLQRTFEGKMAAQAQAFEEKLASLSAVLQKHVTVDEVHPVLQAMVDDAVGTIPVPRDGRDYDPDVLQQAVNDAVANIPVPADGKSITPDDVRPMLEQMVKEAVSHIPAPRDGRDYDPEVLKQAVNDAVANIPVPADGKSITPDDVRPMLEQMVKEAVSHIPVPRDGRDYDPDVLQKAVLDAVRALPAPQDGRDATALEIIPAIDDQKSFPRGTYATHQGGLWRAYEKTHGMRGWECLVDGVADIDVSMTGERLFSVVVRQSSGQRTEKTFSLPVMLYRGVFRAGETYHPGDTVTWGGSLWHCNSMTEDKPGEAHSSAWTLAAKRGRDAGG

SEQ ID NO: 6150 - protein, 200 aa, Escherichia coli; identical to SEQ ID NO: 1788

SEQ ID NO: 6151 - protein, 161 aa, Escherichia coli; identical to SEQ ID NO: 2582

SEQ ID NO: 6152 - protein, 386 aa, Escherichia coli; identical to SEQ ID NO: 3600

SEQ ID NO: 6153 - protein, 669 aa, Escherichia coli; identical to SEQ ID NO: 3677

SEQ ID NO: 6154 - protein, 36 aa, Escherichia coli
NNPNYGKAVPADFNGGSFGRGDSDEWTFGAQMEIWW

SEQ ID NO: 6155 - protein, 367 aa, Escherichia coli
MSRKTVSRTFSSFSISVVAVAVASTFSAHAGKFNPKFLEDVQGVGQHVDLTMFEKGQEQQLPGIYRVSVYVNEQRMETRTLEFKEATEAQRKAMGESLVPCLSRTQLAEMGVRVESFPALNLVSAEACVPFDEIIPLASSHFDFSEQKLVLSFPQAAMHQVARGTVPESLWDEGIPALLLDYSFSGSNSEYDSTGSSSSYVDDNGTVHHDDGKDTLKSDSYYLNLRSGLNLGAWRLRNYSTWSHSGGKAQWDNIGTSLSRAIIPFKAQLTMGDTATAGDIFDSVQMRGAMLASDEEMLPDSQRGFAPIVRGIAKSNAEVSIEQNGYVIYRTYVQPGAFEINDLYPTANSGDLTVIIKEADGSEQRFI

SEQ ID NO: 6156 - protein, 614 aa, Escherichia coli; identical to SEQ ID NO: 1883

SEQ ID NO: 6157 - protein, 233 aa, Escherichia coli; identical to SEQ ID NO: 3548

SEQ ID NO: 6158 - protein, 230 aa, Escherichia coli; identical to SEQ ID NO: 2995

SEQ ID NO: 6159 - protein, 446 aa, Escherichia coli; identical to SEQ ID NO: 2180

SEQ ID NO: 6160 - protein, 191 aa, Escherichia coli; identical to SEQ ID NO: 2727

SEQ ID NO: 6161 - protein, 729 aa, Escherichia coli; identical to SEQ ID NO: 2948

SEQ ID NO: 6162 - protein, 213 aa, Escherichia coli; identical to SEQ ID NO: 2232

SEQ ID NO: 6163 - protein, 708 aa, Escherichia coli
MKNYQNYVDPSLWENGINAAMLSYNLNGYHSETPGRRNDSIYAAFNGGMNLGAWRLRASGNYNWMTDSGSNYDFKNRYIQRDIASLRSQLILGESYTTGETFDSVSIRGIRLYSDSRMLPPTLASFAPIIHGVANTNAKVTITQGGYKIYETTVPPGAFVIDDLSPSGYGSDLIVTVEESDGSKRTFSQPFSSVVQMLRPGVGRWDISGGQVLKDDIQDEPNLFQASYYYGLNNYLTGYTGIQITDNNYTAGLLGLGLNTSVGAFSFDVTHSNVRIPDDKTYQGQSYRVSWNKLFEETSTSLNIAAYRYSTQNYLGLNDALTLIDEVKHPEQDLEPKSMRNYSRMKNQVTVSINQPLKFEKKDYGSFYLSGSWSDYWASGQNRSNYSIGYSNSASWGSYSVSAQRSWNEDGDTDDSVYLSFTIPIEKLLGTEQRTSGFQSIDTQMSSDFKGNNQLNVSSSGYSDNARLSYSVNTGYTMNKASKDLSYVGGYASYESPWGTLAGSVSANSDNSRQVSLSTDGGFVLHSGGLTFSNDSFSDSDTLAVVQAPGAQGARINYGNSTIDRWGYGVTSALSPYHENRIALDINDLENDVELKSTSAVAVPRQGSVVFADFETVQGQSAIMNITRSDGKNIPFAADIYDEQGNVIGNVGQGGQAFVRGIEQQGNISIKWLEESKPVSCLAHYQQSSEAEKIAQSIILNGIRCQIQ

SEQ ID NO: 6164 - protein, 518 aa, Escherichia coli; identical to SEQ ID NO: 2350

SEQ ID NO: 6165 - protein, 243 aa, Escherichia coli; identical to SEQ ID NO: 3561

SEQ ID NO: 6166 - protein, 224 aa, Escherichia coli; identical to SEQ ID NO: 3578

SEQ ID NO: 6167 - protein, 208 aa, Escherichia coli; identical to SEQ ID NO: 1949

SEQ ID NO: 6168 - protein, 816 aa, Escherichia coli; identical to SEQ ID NO: 4456

SEQ ID NO: 6169 - protein, 213 aa, Escherichia coli; identical to SEQ ID NO: 2232

SEQ ID NO: 6170 - protein, 518 aa, Escherichia coli; identical to SEQ ID NO: 2351

SEQ ID NO: 6171 - protein, 359 aa, Escherichia coli; identical to SEQ ID NO: 2332

SEQ ID NO: 6172 - protein, 784 aa, Escherichia coli; identical to SEQ ID NO: 2240

SEQ ID NO: 6173 - protein, 237 aa, Escherichia coli; identical to SEQ ID NO: 4356

SEQ ID NO: 6174 - protein, 191 aa, Escherichia coli; identical to SEQ ID NO: 2996

SEQ ID NO: 6175 - protein, 630 aa, Escherichia coli; identical to SEQ ID NO: 4909

SEQ ID NO: 6176 - protein, 565 aa, Escherichia coli; identical to SEQ ID NO: 2678

SEQ ID NO: 6177 - protein, 368 aa, Escherichia coli; identical to SEQ ID NO: 2370

SEQ ID NO: 6178 - protein, 720 aa, Escherichia coli
MNIYRLSVLSCLAMVTPPALTAEFNLNVLDKSIRDSVDISLLNQKGVVAPGDYFVSVTVNNNKISNGQQIRWQKSGDKIIPCINESLIELFGLKSDFRKKLPAIKECVDFSVFPEIIFTFDQANQQLNITIPQAWLAWHSENWTPPSTWNNGIPGFLMDYNLFASTYRPQSGSSSNNLNAYGTTGLNAGAWRLRSDYQLSQSDSGDNREQSGAISRTYLFRPLPQIGSRLTLGETDFSSNIFDGFSYTGAALASDDRMLPWELRGYAPQISGIAQTNATVTISHSGRVIYQKKVPPGPFIIDDLNQSVQGTLDVKVSEEDGRVNNFQVSAASTPFLTRQGQVRYKLAAGRPRSSMSHHTEDETFISHEVSWGMLSNTSLYGGMLLAGDDYRSGALGIGQNMLWMGALSFDVTWADSHFDTQQDEQGYSYRFNYSKQVDATNSTISLAAYRFSDRHFHSYANYIDHKYNDADAQDEKQTISLSFGQPITLLNLNLYANILHQSWWNADTSTTANITVGFNVDIGDWKDISVSTSFNTTHYEDKDRDNQIYFSISLPIGESGRLGYDMQNNSNTTTHRMSWNDTLDERNSWGMSAGIQSDRPDNGAQVSGNYQHLSSAGEWDLTGTYAANDYTSASASWSGSFTATQHGAAFHRRSSTNEPRLMVSTDGVGDIPIQGNIDYTNRFGIAVVPFVSSYQPTTVAVNMNDLPDGVTVSENVVKET

SEQ ID NO: 6179 - protein, 207 aa, Escherichia coli; identical to SEQ ID NO: 2211

SEQ ID NO: 6180 - protein, 377 aa, Escherichia coli
MRGYGYDNRTNYDAYYSPGSPLVDTRKLYSQSWDAGLRYNGELIKSQLITSYSHSKDYNYDPHYGRYDSSATLDEMKQYTVQWANNIIIGHGNVGAGVDWQKQSTAPGTAYVKDGYDQRNTGIYLTGLQQVGDFTFEGAARSDDNSQFGRHGTWQTSAGWEFIEGYRFIASYGTSYKAPNLGQLYGFYGNPNLDPEKSKQWEGAFEGLTAGVNWRISGYRNDVSDLIDYDDHTLKYYNEGKARIKGVEATANFDTGPLTHTVSYDYVDARNAITDTPLLRRAKQQVKYQLDWQLYDFDWGITYQYLGTRYDKDYSSYPYQTVKMGGVSLWDLAVAYPVTSHLTVRGKIANLFDKDYETVYGYQTAGREYTLSGSYTF

SEQ ID NO: 6181 - protein, 678 aa, Escherichia coli; identical to SEQ ID NO: 2902

SEQ ID NO: 6182 - protein, 125 aa, Escherichia coli
MYLLRLFFAVTLITQMSMATAGIVVGGTRVIFYGDKPDTTISIFNKETNLPYLLQTWVDPFNKEDKSKPPFSVIPPVSRIEPQQEKILRILKTAGELPKDRESVFWLNVKNIPPSIDKKIPMFLR

SEQ ID NO: 6183 - protein, 650 aa, Escherichia coli; identical to SEQ ID NO: 3057

SEQ ID NO: 6184 - protein, 368 aa, Escherichia coli
MNKTITALTIIMASFAANASVLPETPVPFKSGTGAIDNDTVYIGLGSAGTAWYKLDTQAKDKKWTALAAFPGGPRDQATSAFIDGNLYVFGGIGKNSEGLTQVFNDVHKYNPKTNSWVKLMSHAPMGMAGHVTFVHNGKAYVTGGVNQNIFNGYFEDLNETGKDSTAIDKINAHYFDKKAEDYFFNKFLLSFDPSTQQWSYAGESPWYGTAGAAVVNKGDKTWLINGEAKPGLRTDAVFELDFTGNNLKWNRLAPVSSPDGVAGGFAGISNDSLIFAGGAGFKGSRENYQNGKNYAHEGLKKSYSADIHLWHNGKWDKSGELSQGRAYGVSLPWNNSLLIIGGETAGGKAVTDSVLISVKDNKVTVQN

SEQ ID NO: 6185 - protein, 539 aa, Escherichia coli
MAAVCGTSGIASLFSQAAFAADSDIADGQTQRFDLSILQSMAHDLAQTAWRGAPRQLPDTLATMTPQAYNSIQYDAEKSLWHNVENRQLDAQFFHMGMGFRRRVRMFSVDPATHLAREIHFRPELFKYNDAGVDTKQLEGQSDLGFAGFRVFKAPELARRDVVSFLGASYFRAVDDTYQYGLSARGLAIDTYTDSKEEFPDFTAFWFDTVKPGATTFTVYALLDSASITGAYKFTIHCEKNQVIMDVENHLYARKDIKQLGIAPMTSMFSCGTNERRMCDTIHPQIHDSDRLSMWRGNGEWICRPLNNPQKLQFNAYTDNNPKGFGLLQLDRDFSHYQDIMGWYNKRPSLWVEPRNKWGKGTIGLMEIPTTGETLDNIVCFWQPEKAVKAGDEFAFQYRLYWSAQPPVHCPLARVMATRTGMGGFPEGWAPGEHYPEKWARRFAVDFVGGDLKAAAPKGIEPVITLSSGEAKQIEILYIEPIDGYRIQFDWYPTSDSTDPVDMRMYLRCQGDAISETWLYQYFPPAPDKRQYVDDRVMS

SEQ ID NO: 6186 - protein, 111 aa, Escherichia coli; identical to SEQ ID NO: 3153

SEQ ID NO: 6187 - protein, 224 aa, Escherichia coli; identical to SEQ ID NO: 3115

SEQ ID NO: 6188 - protein, 361 aa, Escherichia coli; identical to SEQ ID NO: 3061

SEQ ID NO: 6189 - protein, 221 aa, Escherichia coli
MQVQASVVLGGTRIIYPSNQNEVQITLKNKDAYARYLVQSWVSNIDGSKAPFLITPPVYKLEENRQTLLHIVFTGDKDKLPQDRESLFLANVKSVSAMPEELKDKNILQFAMKARLKLFWRPVSLDNNDALTAWEKLKFHKEAGKLIVKNPTPFYILFNDLTVSGKNIVPVDTKSEPGALLMMVGPFSEQRFSLPAGAGNVVEWSVITDYGSSSGKRKQKL

SEQ ID NO: 6190 - protein, 193 aa, Escherichia coli; identical to SEQ ID NO: 2246

SEQ ID NO: 6191 - protein, 203 aa, Escherichia coli; identical to SEQ ID NO: 2201

SEQ ID NO: 6192 - protein, 517 aa, Escherichia coli; identical to SEQ ID NO: 2462

SEQ ID NO: 6193 - protein, 203 aa, Escherichia coli; identical to SEQ ID NO: 2009

SEQ ID NO: 6194 - protein, 367 aa, Escherichia coli; identical to SEQ ID NO: 4285

SEQ ID NO: 6195 - protein, 207 aa, Escherichia coli; identical to SEQ ID NO: 2211

SEQ ID NO: 6196 - protein, 208 aa, Escherichia coli; identical to SEQ ID NO: 1948

SEQ ID NO: 6197 - protein, 539 aa, Escherichia coli; identical to SEQ ID NO: 3146

SEQ ID NO: 6198 - protein, 856 aa, Escherichia coli
MAGFFVRLFVACAFAAQAPLSSAELYFNPRFLADDPQAVADLSRFENGQELPPGTYRVDIYLNNGYMATRDVTFNTGDSEQGIVPCLTRAQLASMGLNTASVSGMNLLADDACVPLTSMIHDATAHLDVGQQRLNLTIPQAFMSNRARGYIPPELWDPGINAGLLNYNFSGNSVQNRIGGNSHYAYLNLQSGLNIGAWRLRDNTTWSYNSSDSSSGSKNKWQHINTWLERDIIPLRSRLTLGDGYTQGDIFDGINFRGAQLASDDNMLPDSQRGFAPVIHGIARGTAQVTIKQNGYDIYNSTVPPGPFTINDIYAAGNSGDLQVTIKEADGSTQIFTVPYSSVPLLQREGHTRYSITAGEYRSGNAQQEKPRFFQSTLLHGLPAGWTIYGGTQLADRYRAFNFGIGKNMGALGALSVDMTQANSTLPDDSQHDGQSVRFLYNKSLNESGTNIQLVGYRYSTSGYFNFADTTYSRMNGYNIETQDGVIQVKPKFTDYYNLAYNKRGKLQLTVTQQLGRTSTLYLSGSHQTYWGTSNVDEQFQAGLNTAFEDINWTLSYSLTKNAWQKGRDQMLALNVNIPFSHWLRSDSKSQWRHASASYSMSHDLNGRMTNLVGVYGTLLEDNNLSYSVQTGYAGGGDGNSGSTGYATLNYRGGYGNANIGYSHSDDIKQLYYGVSGGVLAHANGVTLGQPLNDTVVLVKAPGAKDAKVENQTGVRTDWRGYAVLPYATEYRENRVALDTNTLADNVDLDNAVANVVPTRGAIVRAEFKARVGIKLLMTLTHNNKPLPFGAMVTSESSQSSGIVADNGQVYLSGMPLAGKVQVKWGEEENAHCVANYQLPPESQQQLLTQLSAECR

SEQ ID NO: 6199 - protein, 834 aa, Escherichia coli; identical to SEQ ID NO: 3118

SEQ ID NO: 6200 - protein, 838 aa, Escherichia coli; identical to SEQ ID NO: 2795

SEQ ID NO: 6201 - protein, 157 aa, Escherichia coli
MISQEKIAQLPNDRETLFYFNVREIPPKTDKKNVMQVTMQHALKLFWRPKAIELEDDGVMSYEKVEIIRRNDGSIRFNNKMPYHVTLGYIGTNGITMLPQTQSLMVTPYSHADTQFKNVPSAFQVGYINDFGGLSFYEINCPTVNNSCNVSVAKRDK

SEQ ID NO: 6202 - protein, 162 aa, Escherichia coli; identical to SEQ ID NO: 1965

SEQ ID NO: 6203 - protein, 274 aa, Escherichia coli; identical to SEQ ID NO: 2309

SEQ ID NO: 6204 - protein, 790 aa, Escherichia coli; identical to SEQ ID NO: 5114

SEQ ID NO: 6205 - protein, 266 aa, Escherichia coli; identical to SEQ ID NO: 5141

SEQ ID NO: 6206 - protein, 641 aa, Escherichia coli
MLAVDDDGETMVVTASSVEQNLKDAPASISVITQEDLQRKPVQNLKDVLKEVPGVQLTNEGDNRKGVSIRGLDSSYTLILVDGKRVNSRNAVFRHNDFDLNWIPVDSIERIEVVRGPMSSLYGSDALGGVVNIITKKIGQKWSGTVTVDTTVQEHRDRGDTYNGQFFTSGPLIDGVLGMKAYGSLAKREKDDPQNSTTTDTGETPRIEGFSSRDGNVEFAWTPNQNHDFTAGYGFDRQDRDSDSLDKNRLERQNYSVSHNGRWDYGTSELKYYGEKIENKNPGNSSPITSESNTVDGKYTLPLTAINQFLTVGGEWRHDKLSDAVNLTGGTSSKTSASQYALFVEDEWRIFEPLALTTGVRMDDHETYGEHWSPRAYLVYNATDTVTVKGGWATAFKAPSLLQLSPDWTSNSCRGACKIVGSPDLKPETSESWELGLYYMGEEGWLEGVESSVTVFRNDVKDRISISRTSDVNAAPGYQNFVGFETGANGRRIPVFSYYNVNKARIQGVETELKIPFNDEWKLSINYTYNDGRDVSNGENKPLSDLPFHTANGTLDWKPLALEDWSFYVSGHYTGQKRADSATAKTPGGYTIWNTGAAWQVTKDVKLRAGVLNLGDKDLSRDDYSYNEDGRRYFMAVDYRF

SEQ ID NO: 6207 - protein, 111 aa, Escherichia coli; identical to SEQ ID NO: 3096

SEQ ID NO: 6208 - protein, 249 aa, Escherichia coli; identical to SEQ ID NO: 5120

SEQ ID NO: 6209 - protein, 224 aa, Escherichia coli; identical to SEQ ID NO: 4280

SEQ ID NO: 6210 - protein, 200 aa, Escherichia coli; identical to SEQ ID NO: 5121

SEQ ID NO: 6211 - protein, 162 aa, Escherichia coli; identical to SEQ ID NO: 1973

SEQ ID NO: 6212 - protein, 331 aa, Escherichia coli
MKKPVVIGLAVVVLAAVVAGGYWWYQSRQDNGLTLYGNVDIRTVNLSFRVGGRVESLAVDEGDAIKAGQVLGELDHKPYEIALMQAKAGVSVAQAQYDLMLAGYRDEEIAQAAAAVKQAQAAYDYAQNFYNRQQGLWKSRTISANDLENARSSRDQAQATLKSAQDKLRQYRSGNREQDIAQAKANLEQAQAQLAQAELNLQDSTLIAPSDGTLLTRAVEPGTVLNEGGTVFTVSLTRPVWVRAYVDERNLDQAQPGRKVLLYTDGRPDKPYHGQIGFVSPTAEFTPKTVETPDLRTDLVYRLRIVVTDADDALRQGMPVTVQFGDEAGHE

SEQ ID NO: 6213 - protein, 161 aa, Escherichia coli; identical to SEQ ID NO: 2582

SEQ ID NO: 6214 - protein, 641 aa, Escherichia coli; identical to SEQ ID NO: 3774

SEQ ID NO: 6215 - protein, 386 aa, Escherichia coli; identical to SEQ ID NO: 3072

SEQ ID NO: 6216 - protein, 161 aa, Escherichia coli; identical to SEQ ID NO: 2582

SEQ ID NO: 6217 - protein, 359 aa, Escherichia coli; identical to SEQ ID NO: 2329

SEQ ID NO: 6218 - protein, 199 aa, Escherichia coli; identical to SEQ ID NO: 5136

SEQ ID NO: 6219 - protein, 230 aa, Escherichia coli; identical to SEQ ID NO: 3348

SEQ ID NO: 6220 - protein, 760 aa, Escherichia coli; identical to SEQ ID NO: 5104

SEQ ID NO: 6221 - protein, 191 aa, Escherichia coli; identical to SEQ ID NO: 2727

SEQ ID NO: 6222 - protein, 231 aa, Escherichia coli; identical to SEQ ID NO: 3055

SEQ ID NO: 6223 - protein, 118 aa, Escherichia coli [sequence omitted]

SEQ ID NO: 6224 - protein, 816 aa, Escherichia coli; identical to SEQ ID NO: 4456

SEQ ID NO: 6225 - protein, 565 aa, Escherichia coli; identical to SEQ ID NO: 5118

SEQ ID NO: 6226 - protein, 883 aa, Escherichia coli; identical to SEQ ID NO: 2822

SEQ ID NO: 6227 - protein, 207 aa, Escherichia coli; identical to SEQ ID NO: 2212

SEQ ID NO: 6228 - protein, 203 aa, Escherichia coli; identical to SEQ ID NO: 2201

SEQ ID NO: 6229 - protein, 236 aa, Escherichia coli; identical to SEQ ID NO: 3482

SEQ ID NO: 6230 - protein, 747 aa, Escherichia coli; identical to SEQ ID NO: 2072

SEQ ID NO: 6231 - protein, 221 aa, Escherichia coli; identical to SEQ ID NO: 3141

SEQ ID NO: 6232 - protein, 865 aa, Escherichia coli; identical to SEQ ID NO: 2167

SEQ ID NO: 6233 - protein, 614 aa, Escherichia coli; identical to SEQ ID NO: 1888

SEQ ID NO: 6234 - protein, 170 aa, Escherichia coli [sequence omitted]

SEQ ID NO: 6235 - protein, 250 aa, Escherichia coli; identical to SEQ ID NO: 4332

SEQ ID NO: 6236 - protein, 432 aa, Escherichia coli; identical to SEQ ID NO: 2026

SEQ ID NO: 6237 - protein, 834 aa, Escherichia coli; identical to SEQ ID NO: 3095

SEQ ID NO: 6238 - protein, 213 aa, Escherichia coli; identical to SEQ ID NO: 4344

SEQ ID NO: 6239 - protein, 208 aa, Escherichia coli; identical to SEQ ID NO: 1949

SEQ ID NO: 6240 - protein, 432 aa, Escherichia coli; identical to SEQ ID NO: 2026

SEQ ID NO: 6241 - protein, 351 aa, Escherichia coli; identical to SEQ ID NO: 2519

SEQ ID NO: 6242 - protein, 230 aa, Escherichia coli; identical to SEQ ID NO: 4274

SEQ ID NO: 6243 - protein, 713 aa, Escherichia coli
MAMFTPSFSGLKGRALFSLLFAAPMIHATDSVTTKDGETITVTADANTATEATDGYQPLSTSTATLTDMPMLDIPQVVNTVSDQVLENQNATTLDEALYNVSNVVQTNTLGGTQDAFVRRGFGANRDGSIMTNGLRTVLPRSFNAATERVEVLKGPASTLYGILDPGGLINVVTKRPEKTFHGSVSATSSSFGGGTGQLDITGPIEGTQLAYRLTGEVQDEDYWRNFGKERSTFIAPSLTWFGDNATVTMLYSHRDYKTPFDRGTIFDLTTKQPVNVDRKIRFDEPFNITDGQSDLAQLNAEYHLNSQWTARFDYSYSQDKYSDNQARVTAYDATTGTLTRRVDATQGSTQRMHATRADLQGNVDIAGFYNEILGGVSYEYYDLLRTDMIRCKKAKDFNIYNPVYGNTSKCTTVSASDSDQTIKQESYSAYAQDALYLTDNWIAVAGIRYQYYTQYAGKGRPFNVNTDSRDEQWTPKLGLVYKLTPSVSLFANYSQTFMPQSSIASYIGDLPPESSNAYEVGAKFELFDGITADIALFDIHKRNVLYTESVGDETIAKTAGRVRSRGVEVDLAGALTENINIIASYGYTDAKVLEDPDYAGKPLPNVPRHTGSLFLTYDIHNMPGNNTLTFGGGGHGVSRRSATNGADYYLPGYFVADAFAAYKMKLQYPVTLQLNVKNLFDKTYYTSSIATNNLGNQIGDPREVQFTVKMEF

SEQ ID NO: 6244 - protein, 241 aa, Escherichia coli; identical to SEQ ID NO: 2884

SEQ ID NO: 6245 - protein, 591 aa, Escherichia coli
MPSFIGGLVVFVSAAFNAQAETWFDPAFFKDDPSMVADLSRFEKGQKITPGVYRVDIVLNQTIVDTRNVNFVEITPEKGIAACLTTESLDAMGVNTDAFPAFKQLDKQACVPLAEIIPDASVTFNVNKLRLEISVPQIAIKSNARGYVPPERWDEGINALLLGYSFSGANSIHSSADSDSGDSYFLNLNSGVNLGPWRLRNNSTWSRSSGQTAEWKNLSSYLQRAVIPLKGELTVGDDYTAGDFFDSVSFRGVQLASDDNMLPDSLKGFAPVVRGIAKSNAQITIKQNGYTIYQTYVSPGAFEISDLYSTSSSGDLLVEIKEADGSVNSYSVPFSSVPLLQRQGRIKYAVTLAKYRTNSNEQQESKFAQATLQWGGPWGTTWYGGGQYAEYYRAAMFGLGFNLGDFGAISFDVTQVKSTLADQSEHKGQSYRFLYAKTLNQLGTNFQLMGYRYSTSGFYTLSDTMYKHMDGYEFNDGDDEDTPMWSRYYNLFYTKRGKLQVNISQQLGEYGSFYLSGSQQTYWHTDQQDRLLQFGYNTQIKDLSLGVSWNYSKSRGQPDADQVFALNFSLPLNLLLPRSNDSYTRKKITPG

SEQ ID NO: 6246 - protein, 232 aa, Escherichia coli; identical to SEQ ID NO: 2087

SEQ ID NO: 6247 - protein, 226 aa, Escherichia coli
MIFAVLSLLVAGELQAGVVVGGTRFIFPADKESIAILLTNTSQESWLINSKINRPTRWAGGEVSTVPAPLLAAPPLILLKPGTTGTLRLLRTESDILPVDRETLFELSIASVPSGKVENQSVKVAMRSVFKLFWRPEGLPGDPLEAYQQLRWTRNSQGVQLTNPTPYYINLIQVSVNGKALSNAGVVPPKSQRQTSWCQVIAQCHVAWRAINDYGGLSAKKEQNLP

SEQ ID NO: 6248 - protein, 242 aa, Escherichia coli; identical to SEQ ID NO: 2697

SEQ ID NO: 6249 - protein, 840 aa, Escherichia coli
MNKSVVSISAAMLVLLCQPVMGSEISPATPSDEDNYTFDPQLFRGSRFSQSSLAKLTTRESVAPGNYKMDIYTNNKLSGSWNVTFKEAADGRVLPCLTPEVADAIGLKTGEDKGEKDPVCTFAKELAPGITSQTQLSQLRLDLSVPQSQLISRPRGYVPPSELDTGASLAFMNYIANYYNVAYSGQNAHSQRSLWASFNGGINLGAWQYRQLSNMTWDNDKGNQWNNIRSYLQRPLPAINSQLMMGQLITSGRFFSGLSYHGVSLATDERMLPDSMRGYAPTIRGVAATNARVSVMQNGHEIYQTTVAPGPFEINDLYPTSYSGDLDVTVTEANGAVSRFSVPFSAVPESMRPGTSRYNVEVGKTQDSGDDSMFGDLTWQHGMTNTLTFNSGSRIADGYQALMLGGVYGSSLGAFGANLTWSHARVPESEAQSGWMSQLTWSKTFQPTSTTVSLAGYRYSTSGYRDLADVLGERHAASNKQSWDSSQWRQQSRFDLTLSQSLANYGNLFVSGSTQNYRGGKSRDTQLQLGYSNSFSHGISMNLSVGRQRMGGYKDNSDDMQTVTSLSFSFPLGGNGPRVPSLSNSWTHSTDGSSQLQSSLTGMLDEAQTTNYSLNVMRDQQYKQTTLSGNMQKRFSQTTVGLNASKGQDYWQASGNVQGAMAVHGGGITFGPYLGETFALVEAKGAEGAKVYNSSQLEINDSGYALVPAVTPYRYNRISLDPQGMDGDAELVDSERQVAPVAGVAVKVIFRTRPGKALLIKSRMADGSELPMGADVLDENNTVVGIAGQGGQIYLRTEQTKGHLSVRWGEGANDSCQLPFDISGKDSNSPIIRLNETCQS

SEQ ID NO: 6250 - protein, 859 aa, Escherichia coli; identical to SEQ ID NO: 5113

SEQ ID NO: 6251 - protein, 784 aa, Escherichia coli; identical to SEQ ID NO: 2244

SEQ ID NO: 6252 - protein, 897 aa, Escherichia coli; identical to SEQ ID NO: 1908

SEQ ID NO: 6253 - protein, 395 aa, Escherichia coli; identical to SEQ ID NO: 3220

SEQ ID NO: 6254 - protein, 266 aa, Escherichia coli; identical to SEQ ID NO: 1894

SEQ ID NO: 6255 - protein, 765 aa, Escherichia coli; identical to SEQ ID NO: 4323

SEQ ID NO: 6256 - protein, 232 aa, Escherichia coli; identical to SEQ ID NO: 2087

SEQ ID NO: 6257 - protein, 395 aa, Escherichia coli; identical to SEQ ID NO: 5516

SEQ ID NO: 6258 - protein, 660 aa, Escherichia coli; identical to SEQ ID NO: 4092

SEQ ID NO: 6259 - protein, 230 aa, Escherichia coli; identical to SEQ ID NO: 2995

SEQ ID NO: 6260 - protein, 869 aa, Escherichia coli; identical to SEQ ID NO: 4463

SEQ ID NO: 6261 - protein, 227 aa, Escherichia coli; identical to SEQ ID NO: 3570

SEQ ID NO: 6262 - protein, 747 aa, Escherichia coli; identical to SEQ ID NO: 2954

SEQ ID NO: 6263 - protein, 445 aa, Escherichia coli; identical to SEQ ID NO: 4474

SEQ ID NO: 6264 - protein, 478 aa, Escherichia coli
MTRIKINARRIFSLLIPFFFFTSVHAEQTAAPAKPVTVEAKNETFAPQHPDQYLSWKATSEQSERVDALAEDPRLVILWAGYPFSRDYNKPRGHAFAVTDVRETLRTGAPKNAEDGPLPMACWSCKSPDVARLIQKDGEDGYFHGKWARGGPEIVNNLGCADCHNTASLEFAKGKPELTLSRPYAARAMEAIGKPFEKAGRFDQQSMVCGQCHVEYYFDGKNKAVKFPWDDGMKVENMEQYYDKIAFSDWTNSLSKTPMLKAQHPEYETWTAGIHGKNNVTCIDCHMPKVQNAEGKLYTDHKIGNPFDNFAQTCANCHTQDKAALQKVVAERKQSINDLKIKVEDQLVHAHFEAKAALDAGATEAEMKPIQDDIRHAQWRWDLAIASHGIHMHAPEEGLRMLGTAMDKAADARTKLARLLATKGITHEIQIPDISTKEKAQQAIGLNMEQIKAEKQDFIKTVIPQWEEQARKNGLLSQ

SEQ ID NO: 6265 - protein, 193 aa, Escherichia coli; identical to SEQ ID NO: 2250

SEQ ID NO: 6266 - protein, 368 aa, Escherichia coli; identical to SEQ ID NO: 2370

SEQ ID NO: 6267 - protein, 239 aa, Escherichia coli; identical to SEQ ID NO: 4453

SEQ ID NO: 6268 - protein, 252 aa, Escherichia coli; identical to SEQ ID NO: 3543

SEQ ID NO: 6269 - protein, 715 aa, Escherichia coli
MLYNIPCRIYILSTLSLCISGIVSTATATSSETKISNEETLVVTTNRSASNLWESPATIQVIDQQTLQNSTNASIADNLQDIPGVEITDNSLAGRKQIRIRGEASSRVLILIDGQEVTYQRAGDNYGVGLLIDESALERVEVVKGPYSVLYGSQAIGGIVNFITKKGGDKLASGVVKAVYNSATAGWEESIAVQGSIGGFDYRINGSYSDQGNRDTPDGRLPNTNYRNNSQGVWLGYNSGNHRFGLSLGRYRLATQTYYEDPDGSYEAFSVKIPKLEREKVGVFYDTDVDGDYLKKIHFDAYEQTIQRQFANEVKTTQPVPSPMIQALTVHNKTDTHDKQYTQAVTLQSHFSLPANNELVTGAQYKQDRVSQRSGGMTSSKSLTGFINKETRTRSYYESEQSTVSLFAQNDWQFADHWTWTMGVRQYWLSSKLTRGDGVSYTAGIISDTSLARESASDHEMVTSTSLRYSGFDNLELRAAFAQGYVFPTLSQLFMQTSAGGSVTYGNPDLKAEHSNNFELGARYNGNQWLIDSAVYYSEAKDYIASLICDGSIVCNGNTNSSRSSYYYYDNIDRAKTWGLEISAEYNGWVFSPYISGNLIRRQYETSTLKTTNTGEPAINGRIGLKHTLVMGQANIISDVFIRAASSAKDDSNGTETNVPGWATLNFAVNTEFGNEDQYRINLALNNLTDKRYRTAHETIPAAGFNAAIGFVWNF

SEQ ID NO: 6270 - protein, 368 aa, Escherichia coli; identical to SEQ ID NO: 5102

SEQ ID NO: 6271 - protein, 241 aa, Escherichia coli; identical to SEQ ID NO: 2890

SEQ ID NO: 6272 - protein, 760 aa, Escherichia coli; identical to SEQ ID NO: 3923

SEQ ID NO: 6273 - protein, 94 aa, Escherichia coli
MLRLARAVIPAAVLMMFFPQLAMAAQGAGQDLMQSGNSTVKATFGKDSSVVKWVVLAEVLVGAVMYMMTKNVKFLAGFAIISVFIAVGMAVVGL

SEQ ID NO: 6274 - protein, 878 aa, Escherichia coli
MSYLNLRLYQRNTQCLHIRKHRLAGFFVRLFVACAFAVQAPLSSAELYFNPRFLADDPQAVADLSRFENGQELPPGTYRVDIYLNNGYMATRDVTFNTGDSEQGIVPCLTRAQLASMGLNTASVAGMNLLADDACVPLTTMVQDATAHLDVGQQRLNLTIPQAFMSNRARGYIPPELWDPGINAGLLNYNFSGNSVQNRIGGNSHYAYLNLQSGLNIGAWRLRDNTTWSYNSSDRSSGSKNKWQHINTWLERDIIPLRSRLTLGDGYTQGDIFDGINFRGAQLASDDNMLPDSQRGFAPVIHGIARCTAQVTIKQNGYDIYNSTVPPGPFTINDIYAAGNSGDLQVTIKEADGSTQIFTVPYSSVPLLQREGHTRYSITAGEYRSGNAQQEKPRFFQSTLLHGLPAGWTIYGGTQLADRYRAFNFGIGKNMGALGALSVDMTQANSTLPDDSQHDGQSVRFLYNKSLNESGTNIQLVGYRYSTSGYFNFADTTYSRMNGYNIETQDGVIQVKPKFTDYYNLAYNKRGKLQLTVTQQLGRSSTLYLSGSHQTYWGTSNVDEQFQAGLNTAFEDINWTLSYSLTKNAWQKGRDQMLALNVNIPFSHWLRSDSKSQWRHASASYSMSHDLNGRMTNLAGVYGTLLEDNNLSYSVQTGYAGGGDGNSGSTGYATLNYRGGYGNANIGYSHSDDIKQLYYGVSGGVLAHANGVTLGQPLNDTVVLVKAPGAKDAKVENQTGVRTDWRGYAVLPYATEYRENRVALDTNTLADNVDLDNAVANVVPTRGAIVRAEFKARVGIKLLMTLTHNNKPLPFGAMVTSESSQSSGIVADNGQVYLSGMPLAGKVQVKWGEEENAHCVANYQLPPESQQQLLTQLSAECR

SEQ ID NO: 6275 - protein, 111 aa, Escherichia coli; identical to SEQ ID NO: 2911

SEQ ID NO: 6276 - protein, 162 aa, Escherichia coli; identical to SEQ ID NO: 1969

SEQ ID NO: 6277 - protein, 367 aa, Escherichia coli; identical to SEQ ID NO: 2431

SEQ ID NO: 6278 - protein, 200 aa, Escherichia coli; identical to SEQ ID NO: 1788

SEQ ID NO: 6279 - protein, 233 aa, Escherichia coli; identical to SEQ ID NO: 2005

SEQ ID NO: 6280 - protein, 229 aa, Escherichia coli; identical to SEQ ID NO: 5497

SEQ ID NO: 6281 - protein, 359 aa, Escherichia coli; identical to SEQ ID NO: 2332

SEQ ID NO: 6282 - protein, 713 aa, Escherichia coli; identical to SEQ ID NO: 3523

SEQ ID NO: 6283 - protein, 512 aa, Escherichia coli; identical to SEQ ID NO: 2813

SEQ ID NO: 6284 - protein, 229 aa, Escherichia coli; identical to SEQ ID NO: 4047

SEQ ID NO: 6285 - protein, 191 aa, Escherichia coli; identical to SEQ ID NO: 2727

SEQ ID NO: 6286 - protein, 838 aa, Escherichia coli
MPQRHHQGHKRTPKQLALIIKRCLPMVLTGSGMLCTTANAEEYYFDPIMLETTKSGMQTTDLSRFSKKYAQLPGTYQVDIWLNKKKVSQKKITFTANAEQLLQPQFTVEQLRELGIKVDEIPALAEKDDDSVINSLEQIIPGTAAEFDFNHQRLNLSIPQIALYRDARGYVSPSRWDDGIPTLFTNYSFTGSDNRYRQGNRSQRQYLNMQNGANFGPWRLRNYSTWTRNDQASSWNTISSYLQRDIKALKSQLLLGESATSGSIFSSYNFTGVQLASDDNMLPNSQRGFAPTVRGIANSSAIVTIRQNGYVIYQSNVPAGAFEINDLYPSSNSGDLEVTIEESDGTQRRFIQPYSSLPMMQRPGHLKYSATAGRYRADANSDSKEPEFAEATAIYGLNNTFTLYGGLLGSEDYYALGIGIGGTLGALGALSMDINRADTQFDNQHSFHGYQWRTQYIKDIPETNTNIAVSYYRYTNDGYFSFDEANTRNWDYNSRQKSEIQFNISQTIFDGVSLYASGSQQDYWGNNEKNRNISVGVSGQQWGIGYSLNYQYSRYTDQNNDRALSLNLSIPLERWLPRSRVSYQMTSQKDRPTQHEMRLDGSLLDDGRLSYSLEQSLDDDNNHNSSVNASYRSPYGTFSAGYSYGNDSSQYNYGVTGGVVIHPHGVTLSQYLGNAFALIDANGASGVRIQNYPGIATDPFGYAVVPYLTTYQKNRLSVDTTQLPDNVDLEQTTQFVVPNRGAMVAARFNANIGYRVLVTVSDRNGKPLPFGALASNDDTGQQSIVDEGGILYLSGISSKSQSWTVRWGNQADQQCQFAFSTPDSEPTTSVLQGTAQCH

SEQ ID NO: 6287 - protein, 101 aa, Escherichia coli
MGELALFFYGDKPDTTISIFNKETNLPYLLQTWVDPFNKEDKSKPPFSVIPPVSRIEPQQEKILRILKTAGELPKDRESVFWLNVKNIPPSIDKKIPMFLR

SEQ ID NO: 6288 - protein, 224 aa, Escherichia coli; identical to SEQ ID NO: 3165

SEQ ID NO: 6289 - protein, 512 aa, Escherichia coli; identical to SEQ ID NO: 2973

SEQ ID NO: 6290 - protein, 118 aa, Escherichia coli [sequence omitted]

SEQ ID NO: 6291 - protein, 660 aa, Escherichia coli
MSRPQFTSLRLSLLALAVSATLPTFAFATETMTVTATGNARSSFEAPMMVSVIDTSAPENQTATSATDLLRHVPGITLDGTGRTNGQDVNMRGYDHRGVLVLVDGVRQGTDTGHLNGTFLDPALIKRVEIVRGPSALLYGSGALGGVISYDTVDAKDLLQEGQSSGFSVFGTGGTGDHSLGLGASAFGRTENLDGIVAWSSRDRGDLRQSNGETAPNDESINNMLAKGTWQIDSAQSLSGLVRYYNNDAREPKNPQTVEASDSSNPMVDRSTIQRDAQLSYKLAPQGNDWLNADAKIYWSEVRINAQNTGSSGEYREQITKGARLENRSTLFADSFASHLLTYGGEYYRQEQHPGGATTGFPQAKIDFSSGWLQDEITLRDLPITLLGGTRYDSYRGSSDGYKDVDADKWSSRAGMTINPTNWLMLFGSYAQAFRAPTMGEMYNDSKHFSIGRFYTNYWVPNPNLRPETNETQEYGFGLRFDDLMLSNDALEFKASYFDTKAKDYISTTVDFAAATTMSYNVPNAKIWGWDVMTKYTTDLFSLDVAYNRTRGKDTDTGEYISSINPDTVTSTLNIPIAHSGFSVGWVGTFADRSTHISSSYSKQPGYGVNDFYVSYQGQQALKGMTTTLVLGNAFDKEYWSPQGIPQDGRNGKIFVSYQW

SEQ ID NO: 6292 - protein, 331 aa, Escherichia coli; identical to SEQ ID NO: 2705

SEQ ID NO: 6293 - protein, 774 aa, Escherichia coli; identical to SEQ ID NO: 3426

SEQ ID NO: 6294 - protein, 863 aa, Escherichia coli
MHIRKHRLAGFFVRLFVACAFAAQAPLSSAELYFNPRFLADDPQAVADLSRFENGQELPPGTYRVDIYLNNGYMATRDVSFNTGDSEQGIVPCLTRAQLASMGLNTASVSGMNLLADDACVPLTSMIHDATAHLDVGQQRLNLTIPQAFMSNRARGYIPPELWDPGINAGLLNYNFSGNSVQNRIGGNSHYAYLNLQSGLNIGAWRLCDNTTWSYNSSDSSSGSKNKWQHINTWLERDIIPLRSRLTLGDGYTQGDIFDGINFRGAQLASDDNMLPDSQRGFAPVIHGIAHGTAQVTIKQNGYDIYNSTVPPGPFTINDIYAAGNSGDLQVTIKEADGSTQIFTVPYSSVPLLQREGHTRYSITAGEYRSGNAQQEKPRFFQSTLLHGLPAGWTIYGGTQLADRYRAFNFGIGKNMGALGALSVDMTQANSTLPDDSQHDGQSVRFLYNKSLNESGTNIQLVGYRYSTSGYFNFADTTYSRMNGYNIETQDGVIQVKPKFTDYYNLAYNKRGKLQLTVTQQLGRTSTLYLSGSHQTYWGTSNVDEQFQAGLNTAFEDINWTLSYSLTKNAWQKGRDQMLALNVNIPFSHWLRSDSKSQWRHASASYSMSHDLNGRMTNLAGIYGTLLEDNDLSYSVQTGYAGGGDGNSGSTGYATLNYRGGYGNANIGYSHSDDIKRLYYGVSGGVLAHANGVTLGQPLNDTVVLVKAPGAKDAKVENQTGVRTDWRGYAVLPYATEYRENRVALDTNTLADNVDLDNAVANVVPTRGAIVRAEFKARVGIKLLMTLTHNNKPLPFGAMVTSESSQSSGIVADNGQVYLSGMPLAGKVQVKWGEEENAHCVANYQLPPESQQQLLTQLSVECR

SEQ ID NO: 6295 - protein, 784 aa, Escherichia coli
MKKRIPTLLATMIATALYSQQGLAADLASQCMLGVPSYDRPLVQGDTNDLPVTINADHAKGDYPDDAVFTGSVDIMQGNSRLQADEVQLHQKEAPGQPEPVRTVDALGNVHYDDNQVILKGPKGWANLNTKDTNVWEGDYQMVGRQGRGKADLMKQRGENRYTILDNGSFTSCLPGSDTWSVVGSEIIHDREEQVAEIWNARFKVGPVPIFYSPYLQLPVGDKRRSGFLIPNAKYTTTNYFEFYLPYYWNIAPNMDATITPHYMHRRGNIMWENEFRYLSQAGAGLMELDYLPSDKVYKDEHPNDDSSRRWLFYWKHSGVMDQVWRFNVDYTKVSDPSYFNDFDNKYGSSTDGYATQKFSVGYAVQNFNATVSTKQFQVFSEQNTSSYSAEPQLDVNYYQNDVGPFDTRIYGQAVHFVNTRDDMPEATRVHLEPTINLPLSNNWGSINTEAKLLATHYQQTNLDWYNSRNTTRLAESANRVMPQFKVDGRMVFERDMEMLAPGYTQTLEPRAQYLYVPYRDQSKIYNYDSSLLQSDYSGLFRDRTYGGLDRIASANQVTTGVTSRIYDDAAVERFNISVGQIYYFTESRTGDDNITWENDDKTGSLVWAGDTYWRISDRWGLRGGIQFDTRLDNVATSNSSIEYRRDEDRLVQLNYRYASPEYIQATLPKYYSTAEQYKNGISQVGAVASWPIADRWSIVGAYYYDTNANKQADSMLGVQYSSCCYAIRVGYERKLNGWDNDKQHAVYDNAIGFNIELRGLSSNYGLGTQEMLRSNILPYQNTL

SEQ ID NO: 6296 - protein, 170 aa, Escherichia coli; identical to SEQ ID NO: 2564

SEQ ID NO: 6297 - protein, 731 aa, Escherichia coli
MARSKTAQPKHSLRKIAVVVATAVSGMSVYAQAAVEPKEDTITVTAAPAPQESAWGPAATIAAKHSATATKTDTPIEKTPQSISVVTREEMDIKQPATVKEALDYTPSVFSTRGSSTTYDVVSIRGFTTASTVNTNQYLDGLKLQGDNYSEASIDPYFLERVELLRGPVSVLYGKSHPGGVVSMVSKRPSTDPIKEIQFKMGTDNLWQTGFDFSDAIDDDGVWSYRLTGLGRSQDAQQKYAKTTRYAVAPSFSWRPDDKTDFTFLSNFQSDPDAGYYGWLPRQGTVVPYQDANGSWHKLPTDFNEGEKDNKMSRRQQLIGYSFAHEFNDTFTVRQNLRYTRIHTLYDAVYGNGYIAPAQISRAYVRSDEDLNSFTVDTQLQSNFAIGAVAHTLLTGVDYLRMRNDIDANYGTANPISMTDPQYGNANININFPYAVINRQEQTGLYIQDQSEWNKWVLTLGGRYDFAKTSTYTRSTSSLDEINDQQFTWRGGINYLFDNGISPYFSYSESFEPVSGATKEGKPFDPSRGKQYEAGVKYVPKDTPVTVTASVFQLTKDKNLTADPSNTLFSVQGGEIRSRGFEIEAKAAVNANINVTAAYSYTDAEYTKDTLYKGKRPAEVPRNMASLWADYTFHETALSGLSLGAGARYFGDTSSFYTTGDKTNQTFNVGGYTLVDAMIKYDIARFGMPGSSVGVNVNNLFDREYVSSCYRDYACYWGAERQVVATATFRF

SEQ ID NO: 6298 - protein, 317 aa, Escherichia coli
MMITLRKLPLAVAVAAGVMSAQAMAVDFHGYARSGIGWTGSGGEQQCFQTTGAQSKYRLGNECETYAELKLGQEVWKEGDKSFYFDTNVAYSVAQQNDWEATDPAFREANVQGKNLIEWLPGSTIWAGKRFYQRHDVHMIDFYYWDISGPGAGLENIDVGFGKLSLAATRSSEAGGSSSFASNNIYDYTNETANDVFDVRLAQMEINPGGTLELGVDYGRANLRDNYRLVDGASKDGWLFTAEHTQSVLKGFNKFVVQYATDSMTSQGKGLSQGSGVAFDNEKFAYNINNNGHMLRILDHGAISMGDNWDMMYVGMY

SEQ ID NO: 6299 - protein, 102 aa, Escherichia coli
MSTVMEIGYDNVESQRTGDKNNQYKITLAQQWQAGDSIWSRPAIRVFATYAKWDEKWGYDYTGSSSTNPYYGKAVSADFNGGSFGRGDSDEWTFGAQMEIWW

SEQ ID NO: 6300 - protein, 351 aa, Escherichia coli; identical to SEQ ID NO: 4688

SEQ ID NO: 6301 - protein, 672 aa, Escherichia coli
MIVSAAPQVVSELDTPAAVSVVDGEEMRLATPRINLSESLTGVPGLQVQNRQNYAQDLQLSIRGFGSRSTYGIRGIRLYVDGIPATMPDGQGQTSNIDLSSVQNVEVLRGPFSALYGNASGGVMNVTTQTGQQPPTIEASSYYGSFGSWRYGLKATGATGDGTQPGDFDYTVSTTRFTTHGYRDHSGAQKNLANAKLGVRIDDASKLSLIFNSVDIKADDPGGLTEAEWKANPQQAPRAEQYDTRKTIKQTQAGLRYERSLSAQDDMSVMMYAGERETTQYQSIPMAPQLNPSHAGGVITLQRHYQGIDSRWTHRGELGVPVTLSTGLNYENMSENRKGYNNFRLNRGVPEYGQKGELRRDERNLMWNVDPYLQTQWQLTDKLSLDAGVRYSSVWFDSNDHYVTPGNGDDSGDASYHKWLPAGSLKYAMTDAWNVYLAAGRGFETPTINELSYRADGQSGMNFGLKPSTNDTIEIGSKTRIGDGLLSLALFQTDTDDEIVVDSSSGGRTIYKNAGKTRRQGAELAWDQRFAGDFRVKASWTWLDATYRSNVCNEQDCNGNRMPGIARNMAFASIGYIPEDGWYAGTEARYMGDIMADDENTAKAPSYTLVGLFTGYKYNYHNLTVDLFGRVDNLFDKEYVGSVIVNESNGRYYEPAPGRNYGVGINIAWRFE

SEQ ID NO: 6302 - protein, 203 aa, Escherichia coli; identical to SEQ ID NO: 2201

SEQ ID NO: 6303 - protein, 373 aa, Escherichia coli
MAVKISGVLKDGTGKPVQNCTIQLKAKRNSTTVVVNTLASENPDEAGRYSMDVEYGQYSVILLVEGFPPSHAGTITVYEDSQPGTLNDFLGAMTEDDARPEALRRFELMVEEAARHAEEAKKNAGEAETSARNAGISAGQAEKSAVNAETSAGDASESARQATESAASAKQSEDASSSSASAAAQKASESSQSAAEAELSRKTAESAAGNASRDATTAAEKARESAESAQSAEQSRIAAEDAVNRIPTVVGPPGPKGEPGPAGPQGPKGDKGERGDTGPVGATGERGPAGDAGPAGPQGPKGDRGERGETGLTGNAGPQGPKGDTGAAGPDRPTGTERRNRCGWPGGGNRTSGTKGRPGGDTNPFSSGAGEHY

SEQ ID NO: 6304 - protein, 237 aa, Escherichia coli; identical to SEQ ID NO: 3793

SEQ ID NO: 6305 - protein, 371 aa, Escherichia coli; identical to SEQ ID NO: 5126

SEQ ID NO: 6306 - protein, 200 aa, Escherichia coli; identical to SEQ ID NO: 1785

SEQ ID NO: 6307 - protein, 193 aa, Escherichia coli; identical to SEQ ID NO: 2246

SEQ ID NO: 6308 - protein, 191 aa, Escherichia coli; identical to SEQ ID NO: 2727

SEQ ID NO: 6309 - protein, 274 aa, Escherichia coli; identical to SEQ ID NO: 2301

SEQ ID NO: 6310 - protein, 430 aa, Escherichia coli; identical to SEQ ID NO: 2617

SEQ ID NO: 6311 - protein, 472 aa, Escherichia coli; identical to SEQ ID NO: 3900

SEQ ID NO: 6312 - protein, 331 aa, Escherichia coli; identical to SEQ ID NO: 5128

SEQ ID NO: 6313 - protein, 243 aa, Escherichia coli; identical to SEQ ID NO: 3483

SEQ ID NO: 6314 - protein, 121 aa, Escherichia coli
MNVKAIPSMDKSKLTENTLQLAIISRIKLYYRPAKLALPPDQAAEKLRFRRSANSLTLINPTPYYLTVTELNAGTRVLENALVPPMGESTVKLPSDAGSNITYRTINDYGALTPKMTGVME

SEQ ID NO: 6315 - protein, 551 aa, Escherichia coli; identical to SEQ ID NO: 2446

SEQ ID NO: 6316 - protein, 700 aa, Escherichia coli; identical to SEQ ID NO: 3128

SEQ ID NO: 6317 - protein, 193 aa, Escherichia coli; identical to SEQ ID NO: 2246

SEQ ID NO: 6318 - protein, 784 aa, Escherichia coli; identical to SEQ ID NO: 2244

SEQ ID NO: 6319 - protein, 130 aa, Escherichia coli; identical to SEQ ID NO: 3184

SEQ ID NO: 6320 - protein, 732 aa, Escherichia coli; identical to SEQ ID NO: 4284

SEQ ID NO: 6321 - protein, 266 aa, Escherichia coli; identical to SEQ ID NO: 1894

SEQ ID NO: 6322 - protein, 161 aa, Escherichia coli; identical to SEQ ID NO: 2582

SEQ ID NO: 6323 - protein, 351 aa, Escherichia coli; identical to SEQ ID NO: 2872

SEQ ID NO: 6324 - protein, 395 aa, Escherichia coli; identical to SEQ ID NO: 3220

SEQ ID NO: 6325 - protein, 614 aa, Escherichia coli; identical to SEQ ID NO: 1888

SEQ ID NO: 6326 - protein, 673 aa, Escherichia coli; identical to SEQ ID NO: 2919

SEQ ID NO: 6327 - protein, 641 aa, Escherichia coli; identical to SEQ ID NO: 3774

SEQ ID NO: 6328 - protein, 746 aa, Escherichia coli; identical to SEQ ID NO: 4275

SEQ ID NO: 6329 - protein, 162 aa, Escherichia coli; identical to SEQ ID NO: 1965

SEQ ID NO: 6330 - protein, 237 aa, Escherichia coli; identical to SEQ ID NO: 4356

SEQ ID NO: 6331 - protein, 518 aa, Escherichia coli; identical to SEQ ID NO: 2349

SEQ ID NO: 6332 - protein, 816 aa, Escherichia coli; identical to SEQ ID NO: 2817

SEQ ID NO: 6333 - protein, 430 aa, Escherichia coli; identical to SEQ ID NO: 2617

SEQ ID NO: 6334 - protein, 672 aa, Escherichia coli
MLRMTPLASAIVALLLGIEAYAAEETFDTHFMIGGMKDQQVANIRLDDNQPLPGQYDIDIYVNKQWRGKYEIIVKDNPQETCLSIEVIKRLGINSDNFASGKQCLTFEQLVQGGSYTWDIGVFRLDFSVPQAWVEELESGYVPPENWERGINAFYTSYYVSQYYSDYKASGNSKSTYVRFNSGLNLLGWQLHSDASFSKTNNNPGVWKSNTLYLERGFAQLLGTLRVGDMYTSSDIFDSVRFSGVRLFRDMQMLPNSKQNFTPRVQGIAQSNALVTIEQNGFVVYQKEVPPGPFAITDLQLAGGGADLDVSVKEADGSVTTYLVPYAAVPNMLQPGVSKYDFAAGRSHIEGASKQSDFVQAGYQYGFNNLLTLYGGSMVANNYYAFTLGTGWNTRIGAISVDATKSHSKQDNGDVFDGQSYQIAYNKFVSQTSTRFGLAAWRYSSRDYRTFNDHVWANNKDNYRRDENDVYDIADYYQNDFGRKNSFSANMSQSLPEGWGSVSLSTLWRDYWGRSGSSKDYQLSYSNNWRRISYILAASQAYDENHHEEKRFNIFISIPFDWGDDVTTPRRQIYMSNSTTFDDQGFASNNTGLSGTVGSRDQFNYGVNLSYQNQGNETTAGANLTWNAPVATVNGSYSQSSTYRQAGASVSGGIVAWSGALIWRTVFPKRLL

SEQ ID NO: 6335 - protein, 274 aa, Escherichia coli; identical to SEQ ID NO: 2300

SEQ ID NO: 6336 - protein, 729 aa, Escherichia coli
MLSTQFNRDNQHQTTSKPSLLAACIALALLPSAAFAAPATEETVIVEGSATTPVDDENDYSVTSTSAGTKMQMTQRDIPQSVTIVSQQRMEDQQLQTLGEVMENTLGISKSQADSDRALYYSRGFQIDNYMVDGIPTYFESRWNLGDALSDMALFERVEVVRGATGLMTGTGNPSAAINMVRKHATSREFKGDVSAEYGSWNKERYVADLQSPLTEDGKIRARIVGGYQNNDSWLDRYNSEKTFFSGIVDADLGDLTTLSAGYEYQRIDVNSPTWGGLPRWNTDGSGNSYDRARSTAPDWAYNDKEINKVFMTLKQRFADTWQATLNATHSEVEFDSKMMYVDAYVNKADGMLVGPYSNYGPGFDYVGGTGWNSGKRKVDALDLFADGSYELFGRQHNLMFGGSYSKQNNRYFSSWANIFPDEIGSFYNFNGNFPQTDWSPQSLAQDDTTHMKSLYAATRVTLADPLHLILGARYTNWRVDTLTYSMEKNHTTPYAGLVFDINDNWSTYASYTSIFQPQKDRDSSGKYLAPITGNNYELGLKSDWMNSRLTTTLAIFRIEQDNVAQSTGTPIPGSNGETAYKAVDGTVSKRVEFELNGAITDNWQLTFGATRYIAEDNEGNAVNPNLPRTTIKMFTSYRLPVMPELTVGGGVNWQNRVYTDTVTPYGTFRAEQGSYALVDLFTRYQVTKNFSLQGNVNNLFDKTYDTNVEGSIVYGAPRNFSITGTYQF

SEQ ID NO: 6337 - protein, 210 aa, Escherichia coli
MKIRTALLVSSLPLCFFVSANAKTFENEGNKTQMFSLHLGATRVIYNIFSSGETLTIINDHDYPMLVQSEVLLEDQKTPAPFIITPPLFRLDALQSSRLRIVRTGGDFPKDRETLQWICVKGIPPKSDEKWAESNKNSLNNVTLNVQVSLSTCIKMFVRPSSVKGHPEDVAGEVKWQRVNNKLKGVNPTPFYINLSELRVGGKKYLNIII

SEQ ID NO: 6338 - protein, 669 aa, Escherichia coli; identical to SEQ ID NO: 4276

SEQ ID NO: 6339 - protein, 359 aa, Escherichia coli; identical to SEQ ID NO: 4362

SEQ ID NO: 6340 - protein, 686 aa, Escherichia coli; identical to SEQ ID NO: 3129

SEQ ID NO: 6341 - protein, 517 aa, Escherichia coli; identical to SEQ ID NO: 3116

SEQ ID NO: 6342 - protein, 191 aa, Escherichia coli; identical to SEQ ID NO: 2727

SEQ ID NO: 6343 - protein, 565 aa, Escherichia coli; identical to SEQ ID NO: 2669

SEQ ID NO: 6344 - protein, 207 aa, Escherichia coli; identical to SEQ ID NO: 2211

SEQ ID NO: 6345 - protein, 231 aa, Escherichia coli; identical to SEQ ID NO: 2794

SEQ ID NO: 6346 - protein, 678 aa, Escherichia coli
MVPSTFSRLKAARCLPVVLAALIFAGCGTHTPDQSTAYMQGTAQADSAFYLQQMQQSSDDTRINWQLLAIRALVKEGKTGQAVELFNQLPQELNDAQRREKTLLAVEIKLAQKDFAGAQNLLAKITPADLEQNQQARYWQAKIDASQGRPSIDLLRALIAQEPLLGAKEKQQNIDATWQALSSMTQEQANTLVINADENILQGWLDLQRVWFDNRNDPDMMKAGIADWQKRYPNNPGAKMLPTQLVNVKAFKPASTNKIALLLPLNGQAAVFGRTIQQGFEAAKSIGTQPVAAQVAAAPAADVAEQPQPQTVDGVASPAQASVSDLTGEQPAAQPVPVSAPATSTAAVSAPANPSAELKIYDTSSQPLSQILSQVQQDGASIVVGPLLKNNVEELLKSNTPLNVLALNQPENIENRVNICYFALSPEDEARDAARHIRDQGKQAPLVLIPRSSLGDRVANAFAQEWQKLGGGTVLQQKFGSTSELRAGVNGGSGIALTGSPITLRATTDSGMTTNNPTLQTTPTDDQFTNNGGRVDAVYIVATPGEIAFIKPMIAMRNGSQSGATLYASSRSAQGTAGPDFRLEMEGLQYSEIPMLAGGNLPLMQQALSAVNNDYSLARMYAMGVDAWSLANHFSQMRQVQGFEINGNTGSLTANPDCVINRNLSWLQYQQGQVVPVS

SEQ ID NO: 6347 - protein, 738 aa, Escherichia coli
MPGEYSLIVSVNGEKKGNIATRFDENGDICLDQAFLQQAGLKIPSEEKNGCYDYILSYPGTTITPLPNQEALDIIVSPQAIIPIGLDLTNAATGGTAALLNYSLMSSRAEFSNGSSDYSQAALEGGININDWMLRSHQFLTQTNGTFSNQNSSTYLQRTFTDLKTLMRAGEVNLNNSVLEGASIYGIEIAPDNALQTSGSGVQVTGIANTSQARVEIRQQGVLIHSILVPAGAFTIPDVPVRNGNSDLNVTVVETDGSSHNYIVPSTLFNQHVESFQGYRFAIGRVDDDYDESPWVISASSGWNLTRWSAMNGGVIVAENYQAASIRSSLVPLPDLTVSSQISTSQDTKDSLQGQKYRLDANYNLPFSLGLTTSLTRSDRHYRELSEAIDDDYTDPTKSTYALGLNWSNSILGGFNISGYKTYSYDGDNDSSNLNINWNKAFKHATVSVNWQHQLSASENNEDDGDLFYVNISIPFGRSNTATLYTRHDDHKTHYGTGVMGVVSDEMSYYVNAERDHDERETSLNGSISSNLHYTQVSLAAGASGSDSRTYNGTMSGGIAVHDQGVTFSPWTINDTFAIAKMDNNIAGVRITSQAGPVWTDFRGNAVIPSIQPWRTSGVEIDTASLPKNVDIGNGTKMIKQGRGAVGKVGFSAITQRRALLSITLSDGKKLPRGVAIEDSEGNYLTTSVDDGVVFLNNIKPDMVLDIKDEQQSCRIHLTFPEDAPKDVFYETATGECQ

SEQ ID NO: 6348 - protein, 654 aa, Escherichia coli; identical to SEQ ID NO: 4042

SEQ ID NO: 6349 - protein, 386 aa, Escherichia coli; identical to SEQ ID NO: 3072

SEQ ID NO: 6350 - protein, 784 aa, Escherichia coli; identical to SEQ ID NO: 4454

SEQ ID NO: 6351 - protein, 237 aa, Escherichia coli; identical to SEQ ID NO: 2816

SEQ ID NO: 6352 - protein, 362 aa, Escherichia coli; identical to SEQ ID NO: 2998

SEQ ID NO: 6353 - protein, 274 aa, Escherichia coli; identical to SEQ ID NO: 2891

SEQ ID NO: 6354 - protein, 170 aa, Escherichia coli [sequence omitted]

SEQ ID NO: 6355 - protein, 246 aa, Escherichia coli; identical to SEQ ID NO: 1985

SEQ ID NO: 6356 - protein, 208 aa, Escherichia coli; identical to SEQ ID NO: 1949

SEQ ID NO: 6357 - protein, 673 aa, Escherichia coli
MKMTRLYPLALGGLLLPAIANAQTSQQDESTLVVTASKQSSRSASANNVSSTVVSAPELSDAGVTASDKLPRVLPGLNIENSGNMLFSTISLRGVSSAQDFYNPAVTLYVDGVPQLSTNTIQALTDVQSVELLRGPQGTLYGKSAQGGIINIVTQQPDSTPRGYIEGGVSSRDSYRSKFNLSGPIQDGLLYGSVTLLRQVDDGDMINPATGSDDLGGTRASIGNVKLRLAPDDQPWEMGFAASRECTRATQDAYVGWNDIKGRKLSISDGSPDPYMRRCTDSQTLSGKYTTDDWVFNLISAWQQQHYSRTFPSGSLIVNMPQRWNQDVQELRAATLGDARTVDMVFGLYRQNTREKLNSAYDMPTMPYLSSTGYTTAETLAAYSDLTWHLTDRFDIGGGVRFSHDKSSTQYHGSMLGNPFGDQGKSNDDQVLGQLSAGYMLTDDWRVYTRVAQGYKPSGYNIVPTAGLDAKPFVAEKSINYELGTRYETADVTLQAATFYTHTKDMQLYSSPVGMQTLSNAGKADATGVELEAKWRFAPGWSWDINGNVIRSEFTNDSELYHGNRVPFVPRYGAGSSVNGVIDTRYGALMPRLAVNLVGPHYFDGDNQLRQGTYATLDSSLGWQATERMNISVYVDNLFDRRYRTYGYMNGSSAVAQVNMGRTVGINTRIDFF

SEQ ID NO: 6358 - protein, 669 aa, Escherichia coli; identical to SEQ ID NO: 3677

SEQ ID NO: 6359 - protein, 729 aa, Escherichia coli; identical to SEQ ID NO: 2074

SEQ ID NO: 6360 - protein, 446 aa, Escherichia coli [sequence omitted]

SEQ ID NO: 6361 - protein, 478 aa, Escherichia coli; identical to SEQ ID NO: 2404

SEQ ID NO: 6362 - protein, 826 aa, Escherichia coli
MLRMTPLASAIVALLFGIEAYAAEETFDTHFMIGGMKDQQVANIRLDDNQPLPGQYDIDIYVNKQWRGKYEIIVKDNPQETCLSREVIKRLGINSDNFASGKQCLTFEQLVQGGSYTWDIGVFRLDFSVPQAWVEELESGYVPPENWERGINAFYTSYYVSQYYSDYKASGNSKSTYVRFNSGLNLLGWQLHSDASFSKTNNNPGVWKSNTLYLERGFAQLLGTLRVGDMYTSSDIFDSVRFRGVRLFRDMQMLPNSKQNFTPRVQGIAQSNALVTIEQNGFVVYQKEVPPGPFAITDLQLAGGGADLDVSVKEADGSVTTYLVPYAAVPNMLQPGVSKYDFAAGRSHIEGASKHSDFVQAGYQYGFNNLLTLYGGSMVANNYYAFTLGTGWNTRIGAISVDATKSHSKQDNGDVFDGQSYQIAYNKFVSQTSTRFGLAAWRYSSRDYRTFNDHVWANNKDNYRRDENDVYDIADYYQNDFGRKNSFSANMSQSLPEGWGSVSLSTLWRDYWGRSGSSKDYQLSYSNNLRRISYTLAASQAYDENHHEEKRFNIFISIPFDWGDDVSTPRRQIYMSNSTTFDDQGFASNNTGLSGTVGSRDQFNYGVNLSHQHQGNETTAGANLTWNAPVATVNGSYSQSSTYRQAGASVSGGIVAWSGGVNLANRLSETFAVMNAPGIKDAYVNGQKYRTTNRNGVVVYDGMTPYRENHLMLDVSQSDSEAELRGNRKIAAPYRGAVVLVNFDTDQRKPWFIKALRADGQPLMFGYEVNDIHGHNIGVVGQGSQLFIRTNEIPPSVNVAIDKQKGLSCTITFGKEIDESRNYICQ

SEQ ID NO: 6363 - protein, 367 aa, Escherichia coli; identical to SEQ ID NO: 3255

SEQ ID NO: 6364 - protein, 200 aa, Escherichia coli; identical to SEQ ID NO: 1793

SEQ ID NO: 6365 - protein, 774 aa, Escherichia coli
MTPLRVFRKTTPLVNAIRLSLLPLAGLSFSAFAAQVNIAPGSLDKALNQYAAHSGFTLSVDASLTRGKQSNGLHGDYDVESGLQQLLDGSGLQVKPLGNNSWTLEPAPAPKEDALTVVGDWLGDARENDVFEHAGARDVIRREDFAKTGATTMREVLNRIPGVSAPENNGTGSHDLAMNFGIRGLSPRLASRSTVLMDGIPVPFAPYGQPQLSLAPVSLGNMDAIDVVRGGGAVRYGPQSVGGVVNFVTRAIPQDFGIEAGVEGQLSPTSSQNNPKETHNLMVGGTADNGFGTALLYSGTRGSDWREHSATRIDDLMLKSKYAPDEVHTFNSLLQYYDGEADMPGGLSRADYDADRWQSTRPYDRFWGRRKLASLGYQFQPDSQHKFNIQGFYTQTLRSGYLEQGKRITLSPRNYWVRGIEPRYSQIFMIGPSAHEVGVGYRYLNESTHEMRYYTATSSGQLPSGSSPYDRDTRSGTEAHAWYLDDKIDIGNWTITPGMRFEHIESYQNNAITGTHEEVSYNAPLPALNVLYHLTDSWNLYANTEGSFGTVQYSQIGKAVQSGNVEPEKARTWELGTRYDDGALTAEIGLFLINFNNQYDSNQTNDTVTARGKTRHTGLETQARYDLGTLTPTLDNVSIYASYAYVNAEIREKGDTYGNLVPFSPKHKGTLGVDYKPGNWTFNLNSDFQSSQFADNANTVKESADGSTGRIPGFMLWGARVAYDFGPQMADLNLAFGVKNIFDQDYFIRSYDDNNKGIYAGQPRTLYMQGSLKF

SEQ ID NO: 6366 - protein, 355 aa, Escherichia coli; identical to SEQ ID NO: 5115

SEQ ID NO: 6367 - protein, 230 aa, Escherichia coli; identical to SEQ ID NO: 2580

SEQ ID NO: 6368 - protein, 869 aa, Escherichia coli; identical to SEQ ID NO: 3173

SEQ ID NO: 6369 - protein, 881 aa, Escherichia coli
MPDHSLFRLRILPWCIALAMSGSYSSVWAEDDIQFDSRFLELKGDTKIDLKRFSSQGDVEPGKYNLQVQLNKQPLAEEYDIYWYAGEDDVSKSYACLTPELVAQFGLKEDVAKNLQWSHDGKCLKPGQLEGVEIKADLSQSALVISLPQAYLEYTWPDWDPPSRWDDGISGIIADYSITAQTRHEENGGDDSNEISGNGTVGVNLGPWRMRADWQTNYQHTRSNDDDDEFGGDDTQKKWEWSRYYAWRALPSLKAKLALGEDYLNSDIFDGFNYVGGSVSTDDQMLPPNLRGYAPDISGVAHTTAKVTVSQMGRVIYETQVPAGPFRIQDLGDSVSGTLHIRIEEQNGQVQEYDISTASMPYLTRPGQVRYKIMMGRPQEWGHHVEGGFFSGAEASWGIANGWSLYGGALGDENYQSAALGVGRDLSTFGAVAFDVTHSHTKLDKDTAYGKGSLDGNSFRVSYSKDFDQLNSRVTFAGYRFSEENFMTMSEYLDASDSEMVRTGNDKEMYTATYNQNFRDAGVSVYLNYTRHTYWDREEQTNYNIMLSHYFNMGSIRNMSVSLTGYRYEYDNRADKGMYISLSMPWGDNSTVSYNGNYGSGTDSSQVGYFSRVDDATHYQLNIGTSDKHTSVDGYYSHDGSLAQVDLSANYHEGQYTSAGLSLQGGATLTTHGGALHRTQNMGGTRLLIDADGVADVPVEGNGAAVYTNMFGKAVVSDVNNYYRNQAYIDLNKLPENAEATQSVVQATLTEGAIGYRKFAVISGQKAMAVLRLQDGSHPPFGAEVKNDNEQTVGLVDDDGSVYLAGVKPGEHMSVFWSGVAHCDINLPDPLPADLFNGLLLPCQHKGNVAPVVPDDIKPVIQEQTQQVTPTDPPVSVSANQ

SEQ ID NO: 6370 - protein, 816 aa, Escherichia coli
MLRTTRWVAAIIFLYSFPGYAEETFDTHFMIGGMRGDKVSEYRFDNKQPLPGNYELDFYVNHQWRGKKDITIPESPAKPCLPKVLLTTLGVKTDNLNTEDNCILLDEAVHGGQYQWDISEHRLNLTIPQAYINELERGYVPPESWDRGIDAFYTSYNLSQYRSYDSNNNSNTASYGRFNSGLNLFSWQLHSDASYSKPDDMKGKWQSNTLYLERGWSQILSTVQIGENYTSSLIFDSLRFSGIRLFRDMQMLPDSMQSFTPLVQGVAQSNALITVSQNGYIIYQKEVPPGPFTIADLQLSGSGADLDVSIKEADGSVRSFLVPYSSVPNMLQPGVSNFDFIAGRSKIYGVKNQEDFLEANYIYGLNNLLTLYGGTILSDNYNAITLGNGWNTPLGAISFDATRSSSKLNNDITHEGTSYQVAYNKYLVQTATRFSVAAWRYASQDYRTFSDHLYENDKHNHQSEYDDFYDIGRKNSLSANIMQPLSNNLGNVSLSALWRNYWGRSGNAKDYQFSYSNSWQRISYTFSASQSYDENDKEEERFNLFISIPFYWGDDITKTRHQINLSNSTSFSKDGYSSNNTGVTGIAGEHDQLNYGIYVNQQQQNNDTSLGTNLSWRTPIAIIDGSYSHSKNTWQSGGSISSGLVVWPGGINITNQLSDTFAILDAPGLEGAHINGQKYNRSNSKGQVVYDLMIPHRENHLVLDIANSESETELQGNRQIIAPYCGAVSYVQFTTDQRKPWYIQALRPDGSPLTFGYDVLDLQENNIGVVGQGSRLFIRVDEIPTGIKVALNDEQNLFCTITFQHVIDENKTYICQ

SEQ ID NO: 6371 - protein, 227 aa, Escherichia coli
MRIIIALLMSFFILPVHAGVVIYGTRIIYPEKNREVLVQLMNQSKNASLIQAWIDDGNTTIAPEKIQVPFILTPPVSRVAGGSGQQLKIRKMPNNLPHNKESLFYLNVLDIPPNNPQNAGKNKIKLALQNRIKLLWRPSGIAPVDKKSLSQLNIKKKNNAISINNETANWITVTTIKAQNVKVNNESILLPPFSNNDITLKNNHASEYELTVVDDYGNNIHSKIAAR

SEQ ID NO: 6372 - protein, 518 aa, Escherichia coli; identical to SEQ ID NO: 2349

SEQ ID NO: 6373 - protein, 232 aa, Escherichia coli; identical to SEQ ID NO: 2087

SEQ ID NO: 6374 - protein, 213 aa, Escherichia coli; identical to SEQ ID NO: 2232

SEQ ID NO: 6375 - protein, 615 aa, Escherichia coli
MFWRDMTLSIWRKKTTGLKTKKRLLPLMLAAALCSSPVWAEEATFTANFKDTDLKSFIETVGANLNKTIIMGPGVQGKVSIRTMTPLNERQYYQLFLNLLEAQGYAVVPMENDVLKVVKSSAAKVEPLPLVGEGSDNYAGDEMVTKVVPVRNVSVRELAPILRQMIDSAGSGNVVNYDPSNVIMLTGRASVVERLTEVIQRVDHAGNRTEEVIPLDNASASEIARVLESLTKNSGENQPATLKSQIVADERTNSVIVSGDPATRDKMRRLIRRLDSEMERSGNSQVFYLKYSKAEDLVDVLKQVSGTLTAAKEEAEGTVGSGREVVSIAASKHSNALIVTAPQDIMQSLQSVIEQLDIRRAQVHVEALIVEVAEGSNINFGVQWGSKDAGLMQFANGTQIPIGTLGAAISAAKPQKGSTVISENGATTINPDTNGDLSTLAQLLSGFSGTAVGVVKGDWMALVQAVKNDSSSNVLSTPSITTLDNQEAFFMVGQDVPVLTGSTVGSNNSNPFNTVERKKVGIMLKVTPQINEGNAVQMVIEQEVSKVEGQTSLDVVFGERKLKTTVLANDGELIVLGGLMDDQAGESVAKVPLLGDIPLIGNLFKSTADKKKNVT

SEQ ID NO: 6376 - protein, 678 aa, Escherichia coli
MVPSTFSRLKAARCLPVVLAALIFAGCGTHTPDQSTAYMQGTAQADSAFYLQQMQQSSDDTRINWQLLAIRALVKEGKTGQAVELFNQLPQELNDTQRREKTLLAAEIKLAQKDFAGAQNLLAKITPADLEQNQQARYWQAKIDASQGRPSIDLLRALIAQEPLLGAKEKQQNIDATWQALSSMTQEQANTLVINADENILQGWLDLQRVWFDNRNDPDMMKAGIADWQKRYPNNPGAKMLPTQLVNVKAFKPASTNKIALLLPLNGQAAVFGRTIQQGFEAAKNIGTQPVAAQVAAAPAADVAEQPQPQTVDGVASPAQASVSDLTGEQPAAQPVPVSAPAATTAAVSAPANPSAELKIYDTSSQPLSQILSQVQQDGASIVVGPLLKNNVEELLKSNTPLNVLALNQPENIENRVNICYFALSPEDEARDAARHIRDQGKQAPLVLIPRSSLGDRVANAFAQEWQKLGGGTVLQQKFGSTSELRAGVNGGSGIALTGSPITPRATTDSGMTTNNPTLQTTPTDDQFTNNGGRVDAVYIVATPGEIAFIKPMIAMRNGSQSGATLYASSRSAQGTAGPDFRLEMEGLQYSEIPMLAGGNLPLMQQALSAVNNDYSLARMYAMGVDAWSLANHFSQMRQVQGFEINGNTGSLTANPDCVINRKLSWLQYQQGQVVPAS

SEQ ID NO: 6377 - protein, 361 aa, Escherichia coli; identical to SEQ ID NO: 3061

SEQ ID NO: 6378 - protein, 224 aa, Escherichia coli; identical to SEQ ID NO: 4053

SEQ ID NO: 6379 - protein, 591 aa, Escherichia coli
MPSFIGGLVVFVSAAFNAQAETWFDPAFFKDDPSMVADLSRFEKGQKITPGVYRVDIVLNQTIVDTRNVNFVELTPEKGIAACLTTESLDAMGVNTDAFPAFKQLDKQACALLAEIIPDASVTFNVNKLRLEISVPQIAIKSNARGYVPPERWDEGINALLLGYSFSGANSIHSSADSDSGDSYFLNLNSGVNLGPWRLRNNSTWSRSSGQTAEWKNLSSYLQRAVIPLKGELTVGDDYTAGDFFDSVSFRGVQLASDDNMLPDSLKGFAPVVRGIAKSNAQITIKQNGYTIYQTYVSPGAFEISDLYSTSSSGDLLVEIKEADGSVNSYSVPFSSVPLLQRQGRIKYAVTLAKYRTNSNEQQESKFAQATLQWGGPWGTTWYGGGQYAEYYRAAMFGLGFNLGDFGAISFDATQAKSTLADQSEHKGQSYRFLYAKTLNQLGTNFQLMGYRYSTSGFYTLSDTMYKHMDGYEFNDGDDEDTPMWSRYYNLFYTKRGKLQVNISQQLGEYGSFYLSGSQQTYWHTDQQDRLLQFGYNTQIKDLSLGGSWNYSKSRGQPDADQVFALNFSLPLNLLLPRSNDSYTRKKITPG

SEQ ID NO: 6380 - protein, 128 aa, Escherichia coli
MDRETLFELSIASVPSGKVENQSVKVAMRSVFKLFWRPEGLPGDPLEAYQQLRWTRNSQGVQLTNPTPYYINLIQVSVNGKALSNAGVVPPKSQRQTSWCQAIAPCHVAWRAINDYGGLSAKKEQNLP

SEQ ID NO: 6381 - protein, 815 aa, Escherichia coli; identical to SEQ ID NO: 2698

SEQ ID NO: 6382 - protein, 432 aa, Escherichia coli; identical to SEQ ID NO: 2026

SEQ ID NO: 6383 - protein, 430 aa, Escherichia coli; identical to SEQ ID NO: 2617

SEQ ID NO: 6384 - protein, 517 aa, Escherichia coli; identical to SEQ ID NO: 3116

SEQ ID NO: 6385 - protein, 232 aa, Escherichia coli; identical to SEQ ID NO: 2087

SEQ ID NO: 6386 - protein, 213 aa, Escherichia coli; identical to SEQ ID NO: 2232

SEQ ID NO: 6387 - protein, 686 aa, Escherichia coli; identical to SEQ ID NO: 3015

SEQ ID NO: 6388 - protein, 871 aa, Escherichia coli
MHQVLLLPRFARLTIALGLATAVFPVDAEYYFNPRFLSNDLAESVDLSAFTKGREAPPGTYRVDIYLNDEFMTSRDITFIADDNNADLIPCLSTDLLVSLGIKKSALLDNKEHSADKHAPDNSACTPLQDRLADASSEFDVGQQHLSLSVPQIYVGRMARGYVSPDLWEEGINAGLLNYSFNGNSINNRSNHNAGKSNYAYLNLQSGINIGSWQLRDNSTWSYNSGSSNSSDSNKWQHINTSAERDIIPLRSRLTVGDSYTDGDIFDSVNFRGLKINSTEAMLPDSQHGFAPVIHGIARGTAQVSVKQNGYDVYQITVPPGPFTIDDINSAANGGDLQVTIKEADGSIQTLYVPYSSVPVLQRAGYTCYALAMGEYRSGNNLQSSPKFIQGSLMHGLEGNWTPYGGMQIAENYQAFNLGIGKDLGLFGAFSFDITQANTTLADDTRHSGQSLKSVYSKSFYQTGTNIQVAGYRYSTQGFYNLSDSAYSRMSGYTVKPPTGDTSEQTLFIDYFNLFYSKRGQEQISISQQLGNYGTTFFSASRQSYWNTSRSDQQISFGLNVPFGDITTSLNYSYSNNIWQNDRDHLLAFTLNVPFSHWMRTDSQSAFRNSNASYSMSNDLKGGMTNLSGVYGTLLPDNNLNYSVQVGNTHGGNTSSGTSGYSSLNYRGAYGNTNIGYSRSGDSSQIYYGMSGGIIAHADGITFGQPLGDTMVLVKAPGADNVKIENQTGIHTDWRGYAILPFATEYRENRVALNANSLADNVELDETVVTVIPTHGAIARATFNAQIGGKVLMTLKYGNKSVPFGAIVTHGENKNGSIVAENGQVYLTGLPQSGKLQVSWGNDKNSNCIVDYKLPAVSPGTLLNQQTAICR

SEQ ID NO: 6389 - protein, 386 aa, Escherichia coli; identical to SEQ ID NO: 5575

SEQ ID NO: 6390 - protein, 200 aa, Escherichia coli; identical to SEQ ID NO: 1784

SEQ ID NO: 6391 - protein, 700 aa, Escherichia coli; identical to SEQ ID NO: 2784

SEQ ID NO: 6392 - protein, 250 aa, Escherichia coli; identical to SEQ ID NO: 2761

SEQ ID NO: 6393 - protein, 826 aa, Escherichia coli; identical to SEQ ID NO: 5098

SEQ ID NO: 6394 - protein, 360 aa, Escherichia coli; identical to SEQ ID NO: 3062

SEQ ID NO: 6395 - protein, 233 aa, Escherichia coli
MNIFAYLLVLVFSMSMSSSAFASVVMTGTRIIFPGDAKEKTIQLRNTSDQPYIINIHVEDERGSDKNVPFMPTPQTFRMEAAAGQALRLLYTGNNLPQDRESVFWFSFSQLPYLNKNDKSQNQLILALTNRVKIFYRPSSIVGKSSDAPKNLTYQVKQNRIEVTNPTGYYVTIRAAELLNNGKKVPLANSVMIAPQSTTEWTLPSGISVAPGAQIHLMTVNDYGVNVTSEHAL

SEQ ID NO: 6396 - protein, 656 aa, Escherichia coli; identical to SEQ ID NO: 5108

SEQ ID NO: 6397 - protein, 241 aa, Escherichia coli; identical to SEQ ID NO: 2887

SEQ ID NO: 6398 - protein, 686 aa, Escherichia coli; identical to SEQ ID NO: 3015

SEQ ID NO: 6399 - protein, 729 aa, Escherichia coli; identical to SEQ ID NO: 2948

SEQ ID NO: 6400 - protein, 746 aa, Escherichia coli; identical to SEQ ID NO: 5132

(The sequence listing continues in the following parts.)
